United States Patent Application Publication US 2014/0325702 A1 - sequence listing, part 16

SEQ ID NO: 16474 - DNA, 2520 bp, Heterodera glycines
aggtggtcctggcaaaccggggtcgcctgaaattcattaccatttaaaaatttaaattttccaaaaatttgacctggcggtccaggttcgcctggcagaagtggctcactgaatgccggcactcccgggtctataaaaatgccaagaatgtgcttcttctccaattccccgtcaatttataccgccggggggtccaggaagtccaggctctccgggaggacctaaatttatgaaaaatgaaaacatgaaatatggaaatttttttgcaagatttcaccaggtggtccttttggccctggctcgccaggctgtgcatcacgtcctgggctgccaggcatgccgggtgttccggggtcgcctggaggtccggaaggcccctggggcccaggcggaccctgcgggcacggcttgcaggggggctgaaaaatgttttaaggatgttagtcgcgactactttcggtgtgtcatttcaatctccatatagtcttggctttaccggtgttatgggctcgcaagcctgcataggcggacgccctggatttcctgacaatttaatgggttttaaagtaataatcatatatacacacaggaccacttgccattctgataaaaaaaaataatctttcataaaatttttcatagttctttgatttaatatttttgcaacctttttggtggatttccaatggttattgcctaaattatatttgactgtgtgtaccacaccccaattttcgtatggtcatatggtgatgaaaagtttttgaatctcgaatttgagcattgaaaaatctgtaagaaaattttatgaatgcgtttttatcggaatagcaagtggccctaaacatatatgctatgattgtacaatataaaaaataattctgatcagggaggaacactaatcattaattaccacaaaaaccattaattattaaaaacttttagtctagcaaaagataaaaattaaaaaattaaattttcatatgaaaatgactataaatcagataaaaaccatttttacctgggaggccaggcgcaccaggttttccaggccgtccaggtcttcccggtgctcctgtgagtaaaaattgagttattcaaacaatatagaacagaatgccagatttttttcataaaaatcatttcaacccggaggcccttgcggtcccggtaaacagcaagaatcgcagctggtgccgtaagcgtctacggcaacgttggtcgcggcaccgctgcctccaccggcctcatagccggcctggcgttttgtccgtcgtgctgctgtcacattggttggcgttgagttcatcaacgacactttccgcagctgactgacttcttgccagatgtcacgggccgagccctaatcgattttttttttaatactttaccgttttaaacgacgaaatgcaaacccgacatttaaaaaaagagacggataaataatttttttgaaaaaaatacgaaaaaaaaattctaacagctttgaaggtattcaaattttatgcggatttaggctccccgatgatacgggacgagcttctacctcgtagaggagctatgtagaacggtcgatcaaaataattaattatatattccgaaaaaaattttttggattttaaaattcgaattttttttttgctccccaactttgcaatagttgagctcgttttgcgtctgatgccgaacattccgcacataagtgtaaaccatgggcagcgtaacacaaacggacagaacagcgacaacggaaaatgttacggccgaataagccacgatccgatacgctttgatccgattctccaactccattaaatttttcatcacataaatctttatgaacacaaaaaaagtgcgaacgaaatgagtgtgacatttgtaggtatttttaaaatattctcagtaattttggagcccctaacatacagtattctgtacaggattttcctaatatccgccaggatttcctagggtccgcgttccggaacttgtatgttttttgaaagaatgataggactcggagtcctgttaaaacaggactcttttcgtccctgaatcagtccgggtccatcttaacccggattttctggtccgggtaaattggaaccgacatcaatgttctagatccggggttttccaaaattccgggctattcttgttttaatacagccttggaattttttaaaatcaacttaaaaatttttaatggtcgatgttcccgcttcacaaattaaatttattattaaaatgataatttttatttaatttaatccatttcaaaaaatgtccaaattaaatctaaaatatttcttggtcgaaaattttcagagcagatcagtccgattccgatttgttttcagcggaactttaggggtattgaaaatggcttaaaaatgcaggaagccaaaaaatgacaatttgagagatttggcaaccgcccggggcgaagggtggggggaaggcgtctaattacatggctggaggcaatgatttgtgtcgacgacgtaatgcttcatggat

SEQ ID NO: 16475 - DNA, 1266 bp, Heterodera glycines
  unsure (1)..(1266): unsure at all n locations
tgatcaaatgaaaaaaccagtaaaaattcttaatttaatgaattttttcctcttacattttaatgaccaatttgtcatgggttcgaatccgctagacagatggtgaataattttgattttttctttaaaatatttttgcatctaattcttttaattcacttattttttgctgatcaccttaaaaaagtttagtgactctagaagtatttttaattttattatgatttttttaaaaatgaccagttttattgattatccgaaactttgatcaagtttttctgattatttttggcgcccgtagccaaaaaagaaattacataactaaattgaattcgacagatctaaaatatatttccaattttgtaacttttttttattattagattttttcattattttttggcaatttttttaaatattagcattaatatgtatgttcatttttacatatattattttcacataattatttttttacttcatttttacaatgagaagaaggccttttccaataaattcgtggattgattgacgtttccaaagaaattttaataataaaattattagaattcttcttttttaaattaaaaatattataatgtaaatgtgaatagactaaattaaatattatttttcttcttttatattattaaaacatatttagggtcttttaacaaaatcccaaaaatgctaaatttttttcggtcattccgcaaaaattttgcaatcgaaatttaatctctaagaattcacttattttaaaataaggaccaaatcatggcttttttctcactaaatgcactaattattgataatgaatagtgaaaaatagtgtctttttctttcttttttttagtaaataaaattctgggttttattcttgcatttttaccatcaatttatacaaaactcatacaaaagttaaattttctctaaattaatagaaaaaagtaatattagtaataatactacataggttcctaaatacaccacaaaatggccacctctttctcgtttcttggcctttattttgccattatttggctttgcttctttaatgaacgcgcaaatggcaccggtggaggcaataaattaaaaacaattggcgaatcctcttcagatatgggtaattatataaacaaatattttgactaatttattctattaagtctctgtcgatcaaatcaaaaacatgcaagaacaaataaatgcattggnagtagaagtgaaggaattaaagaaagcaatgctatggaaaacgaaaaa

SEQ ID NO: 16476 - DNA, 2785 bp, Heterodera glycines
  unsure (1)..(2785): unsure at all n locations
agttttttatttttaattaattataatttaaatttaaaattaaaaaatttttaaagttataaaattaagttaattttttttaaattttctttttattttgggttgaattttttagtttaatttttcggtgagactatctatgctaatgaatgaatgaatgaattaattaattaattaaatgagtgtttttaatgaattcattatttactcacttttcagcgtttgcaacagcaagtcgagttgatccaaaaccagaacaagtgagcttacttacagtaacagcgataaaatattaatgagggcataaattacttttctccaatccactacccgaggaattttgccgtccagatccaagtcccgagattttctcatccctaatcgtgaacctaaagattttggccaccccggtctgaatcccggcatttttctcgtctctgcgatagtcattttacatgcccatttacagtattttggcggcactttgcaatggcattgattataacccgcaaaatcagcaacaacacaattggacatatgaagggagtcagtcgccatcgccagtgggccctttcgccgatggttccacggatttttcgttattcgccaacatgtcgcagccgtggcacagccaaagcgatagccaaaccgaaccgccgaagccaacggattcatatgccgaagtcgccgctaagccgccgacagtggcaaacactcggtacaactcaataatttatatggatatgagatttacaagatgataaatcatttttttctcaagttctgctcgtgatcgaaactttctcgatattcgagaaagactttttcaaaatattttccatattctttcaaaatcaaataaaaataattataaattatggaagcagccttagaattttttccttgcaaattttgattatttttttcctaatttgtttaaattattcaactataaattctttaaaaaaatttgtgggtaatacgtagggtattcttcaaaacatcagcagagaaataacctattttttacagtcaaattaatgtgccaatgccattggcttcagtggagccaaaaaagaaatctccgactgtcggagacgaagatgagaaagccgcaacggataaccttcaaaagagccaaatttgtcatttttgggaggcccataaaagtggaaaaagtcggaccaaatgtcagaacggcgccaattgtaaatttgcgcatggggagaaggaattgaagaagattgtcccaccctacttcaagaaccatctttgcaaggtcagtgctccgttcgggattatcaacaatgtccgggttcagcactggagctcgggcaaatgtctgaacggcgaaggatgccatttcgcacatggacccgaacagttgcgtaaagttggacttactaaaggtgggtgattggcaccgtttgcattctttcttttcccaaatggactcctttcgacccatcaaaattaagagtcgtcaaatgtgcctccgtcaccctccaaaagtcatcaaagtcgtcgtaagacgtgaacacgcacaaaactcacacaattcagccccaccgatgattttggcctctgttcaatgccccgatgatttgttacgatttaaaaacttttctttaaattctttctgttattttcttcccaaaagatcagtgtaaaatctgattttcttaaaaatttctttactaggattattttaagccctaacacgaatctgacgtttatttgaggctatcacgtattttacgcgacttatgtgaaaatttacatgtgaattttaaactttttttaaaattagcttttttcgttgatccacaaacgggggcacacacaaaaagttcgtcgatatttttgccattttttggctcagtttaaaaaaaataatatttcatgacatcattcaatagctctagatgttctctaccataatattaatttagaagttttttaacaaaattataaaaaagttatggtcataaaatttcaacaagtcttgagtcaaaattttttggccagatctttcgaccaatttcgaacgacgtgaatttgaacaaaagttcgaaaattcaaaaaatacgcgagatcaaaatcaactcattaatacttcaataaaaggttaaaccattttggatcaaaaatctgaagcaaacaaatggcgatttattattatattatctataaatataaagttggcaaacaactgacataaaaatttaattaaacaaaaaatttttttttgaaatttttgcagttttaaaaaacacctattgtggcggtttttagaaaaacgagctagcaccgtttgaaaagactgatattttaatagtatacatttaatgtatttaaagcacatttctttgttttatttcagtgacgaaaagtttagtgacgaaacgttcggccatttttttaaatagattctttttttaaataaaaaataattccaatttaaaagtaaaatcaagcccagaatatatttatatggcatttgcatattttgagatgtgtgcctagaaattctacagaatatgtcaaggtcaaccggccaaaccagggataaaggagagaaaatcattttcatatagaaaatttaatttataatttatcttttattgttttttctaccttttcaaaatttgagtcaaaatgaacaaagttatggtaaatttccttanagatcatgcacaatcttgtgaaattgtcttttctcttccgacaaaagcgttagcataanagcgatcattcagttttatatttcttactatgcactgaa

SEQ ID NO: 16477 - DNA, 2962 bp, Heterodera glycines
  unsure (1)..(2962): unsure at all n locations
tccttcgcttctccggtagtttctcataattcaaaccaatcttcccgtttgccaaaaacaaaggtcccaaagtttcatttgcctcggccttgaccaactgaattcacaaacagagacattaggtctctgaacaactctcaanaattgacaatggcaaattgttcattttagagcgatattctcgcatcgcttcttctaaacgtaagctgtccgattcaaaaagagctcccgctctcaggaccaaaggattttgtatgtttctgtatttcggtttaatgtttcccaaattttcagttaatctttgaacaatttccttttgtgtcgcattgttcatattattggttttttccatttctgtacactccattcttttgcctataatgctcaattctctggtacccggccgaataaaaaatgttgtattttctgcgaaaattggtatccattcgtaacaatcgttccccatttttctgtcccagaatattttttctggtgtaaccggtgcacaaaaaccaacttccaaattatctcctttccatcgtgccactaaatcgtctcgattaaatatttttctgactccctcatttggattaatttgtaaaaccgctttggccaattgtagctgaaatttagtattttcgcacgcttgtttataaatatgatcgtattgccttcttttctcctcatttagtcgatacaatgcataattgactcgcgtattcaaattcttattttcctgtcctgctttatttcgcactttgcttttctcaacttttttaatccaccgggcgtcaggtgttgtaactgtcgttctttttcttcgatccatgtcgaagatttcaatctcatcggataattccacactaacttcctcatcgctttcatcctcgaatgaattttcaaattcttccatttcattgccatcattagctaagctctcaatgacctcagcttcaacttcctgactgtattcttcctcactctttttattctttactgtcttttccgacacttctcttactttttcgtcctcaattttcttcacaaccgtaattgccgtggatggaattaataacttttcatttttcttttcagctttaatgctgtctgatttgttttccactttctctttcggcaattccaccttttccacaattttttgagtggttggaggaattggagtcataagtgctggaatctcagtcacattcattgttggttctgtgtgtttaattgtctttggaaatagacttgctgttgtggcctttttcagttcaacctccggttttttacccagcacatgcttagaaaaatttttggaattatttgcgctttttactgccaaaattgtactcggagttgtaactgactttggaaaaagctcattgaccactttattagtgcttggtctaactgtgctaagaaccttctgcgttgtgctcttcaaacccacaatttttggttttggtgttgcctttttcagtgtgttttcaattttcgattttttagtcgttgtaaaaggagctttagttgtcgtagctaccaattgttccacctttttcccaactgccttgtatactgactgagttttttgctcattttttatctgaattttctcgaaaattggttttttgacttctgtcttaggccttatagtcgttggaaccgtgcttgtaataattttggtcggaattgccatggttacttttgtcgtactccccactgtgcttgtggactggggaaccggggtactcaaaattattagctccgttgtgttccttttaggactcaaagttgttcgtgtccaattgcttttgggtctggacgctgggtccaaattttcaaattttgaattttgacccggcctgattttcagaaacacttcctgtttcgctggtcgctcttttctctgaggttcacttttctgctttgtttcccttttttctctcgctttttgtggactcggagtgtgtatcagaatgaaaacgtcatttgacattttatacgcctcgtctggtacgccaacaataccctctctttcatcgcccttttctttttcaaaataaaacacgctttgttcgctttctaacacaattgcgttctccgttacttctgccacaaaatcaccgacagggaaatgagttgcccaataagcctcacttggttccggaatttcccaaataaatgtccatttttgtccttcttcccatccgttgtacggattaaagttatgtccaaacgatgttaccaaataaaaatccagaattccgccttgtcctttctcaatgaaatcattcactgttgtctcacatctttcaccaatccatgcatattcaacttttgaaggcctctcagttgtccataaattctctgtcaatctcttcattgtatgtcccatgttatttttaaatccatgacaagctcggtgacttactcccttcacgtacgaatcctgactttttatgtctttccagaaaaaaaaaaatttcccgtacaaattttcatcattttctgatagcagttataaactgggaattgctttggcattcgaacaggtaaaaaaagtgtaacttttctctcgtcagctttttggtactccggtactgaacattctgttacgtttggtaaccaaatgggtgtggtgggaacccgatcagaacataattggtattgaccagaaatagtcccgaaaaatgagcacagaatcattgaaattgtcaaaaatgtcattgtcggggtcagggaccttcgggagttggatgccgaaggctgagctgcctcatccgaaatcgcatttattttgtatttttgcctttcacttcctcttcctcttgaattccctcggaaattcccaaaatttcccctctttggtcggaaattctcaaatctccacgtattatttccaaaattcccattccaagtccgattttgtcccaatggaataaaatttggatttctttgc

SEQ ID NO: 16478 - DNA, 3204 bp, Heterodera glycines
  unsure (1)..(3204): unsure at all n locations
tttgagttataaaatattctttttaatattattttccctaaatataanacaaaccattttttcagtgaatttctaacnccatttatttttgcccatttttccaaagcctcaattgctttatccaactgattcgaatggtcatcattttcgtgggcataatataatttaacatcatcggncatacatttttatgccaactgatgccgcttcaattgtaataaaggacggcagatcatttataaaaattaaaaagagtaatggccctaagacacttccctggggcactcctgaaaatattctgaaactttctgacaattcttcgccaattttaaccttaaaactccgatttttttaaaaagttagttaaaaaattatgaatttttccttcaattccaatctttttgattttttgaagtaataaatcaattagaacagaatcaaacgccttgacaaaatcaatatagataatgtcaatttgttgatccttttgtagagaattatatatatcgtccatcatttttaatatttgggttgtagtcgatctattttttaaaaacccaaattgttctttatcaaagaatcttgtactgttcagaaattctaaaattttgctactcaaaattcgttcaaaaactctacagacagtgctggttaatgaaaccggcctgtaatttaatggatcagttttttcgccttttttgaaaattggtacaaataatgatgttcgccatatttccggaatttgaccggaatccaaaattgcctaaatatatctgctaatatttttgtaattggttatgcacaattttttaataaaatgtaaggaacattatccggtgaagtggaattacgccggggaagtcttcttaatatattccaaattattcccgcattcaattcaatgtcagaaagtttaatcttattctgtgttgattgagtttgtggaccattaacaattgattttcttaaaaaagacttttgaaatatttctgctaatatcttacatttttgaacattgctggaaaacatatttccagcattatcaattagagtaggaatctcaaaaaattttgataacttatttcggataaatttgttaactgaattttgcccctgggaaataatttttgactcttgttcatttcttaatttgtacaattgttttttcatttccctagaaataattttgtaatttaaaatgagatcacttttttcaggaaatttttttacaagcttatgcaaacgtaatttctctgaaaataagtctcttattttttgaggatacgattgttttattatcgattttagaggcctattgggtataaaaatatcatataatttcagaactttatttaaaaattctttatatttctgttcaacggtgaacactgagtttattgataaatcaattcgattttcaagtaacgcctgacttaatttcgaaaaattaatatttttaaaatctcttctgtaaattttaggatttttatgactgaattttacttttattttaaatccaaccattttgtgatcggaagttgaaaaattttctagaactgtcaattcattaattaattctaattcactagtaattactaaatctaaaattgctttttctctggttggttccttaacatgctgtatcaattgtctttggtgcataaactcaaatagagaattagacgccggatcttttattttttttaccttattttcatcccacaatatatttgggatattaaaatcaccacagaatatggtattttcagaatcgctctggtcagaaatgaatttgagtagttttttagtattctgaatgtacaatttggtggacgatatatatttataatttgaataggttttttaaaaagtaattttatgtgaataatttcgctttggaattttgtcccagagaaaagtgtctgataagggatgtttgattttaataaaattgccgatcctccgccctttttatcatttcggcttgcaaagattatttgatattgattatttactgtaaattctgattctactgtgtttctgaagtttaaccaggtctcatttattataattataaaaggatcgtatttttgggttataagttctatgtcaactattttatttgttatcgatcggacgtttattaataggcaagaaatccaaggatttttctttcccatattcccaatatttttgtttgatttgctcgcgtatccctagcgagttctgagcgggcgggggtctttcagagatctgatctccaagtcaaccacaaaatacttatactcacctgcggcaatattggcctgataggcttgttgccgaagggagtataagattttgagctcactttgggtcatatccctttggactttgatatgttggggcacattgggcaattttttcacagcattacggaaattaaagagaaatttgtcacgtgaaaatttgtccaaaaaacggcacttttaaaatccgatccctttttacccctccttcaggccgtgtccttgggtggcggtgaatgtcgggcgacaatttgtctttgacaccgcattgttctgcaaattgctccaccactgcctgttggtccatcgcctccggcaatttttcgatgaccgcacgagtggacttctctttcagttgttcggagttgatgattgcctcggtaatcatctgcgaaacggcgccagtgccagcaaaaggcggcggttgaccccattgaacattgccgttgttgttggtggagaaaaatttattaaatatcattagaaaaaagaaaagacgcgattggaaattttgctcaaaatttaaacaaagcaatttaacgtatttatttaattataatagacccagacaatttaatattaataaaccatccattaagggaggaatttgttaaggtaaattttcgtcggcttttgtaaaaaaagctatttcaataaaggcataaatactcttttatttttaaggtaacaaaccaactttttgatgatttagacttgattattccaaacgaggatgaaaattttaatttgacaaaatgccaaaggacaaattgtcttttcgaattgtgttcaattaatctttgatttggacaaaattcctgtcaaacaattccccggggtgcttattaaatcagctgaaaacataattattatgtgttcacgtcaacattggcattcgaatgtgaattaaacaata

SEQ ID NO: 16479 - DNA, 2919 bp, Heterodera glycines
  unsure (1)..(2919): unsure at all n locations
caagcagacgcaggggacgaaggcactccgccagggacaaatggcacgggtgccgaacgatgttcaacccctgcacttggacatggactgctcggactcgtcgggccgcatcccttaggatttatttccatgcctaagaaatggcaatacgaaactgactttgttcactgctggggatatgtcccgattaatcactcgttcattttgcgattggaccaaatttgttgtcgttttaataaaatccccaaaaactgtgggagaacgttgaaaggggggaagcagagccgaggaaggcgaaggcgacgaagaaacagcggcgaattgggcacccgccgaccgcgcggcattgggcccattgttcgactgaattcgccgttgtttctcatcccaacggcgcatttgttgtctattttaaatatttttgatttcataaagacattttctaatgcttaatcatatagttttaagcaatttgatacaatttccatgaacagagaaagaaatgcttcacgaattaagacaagcgaaaaatgggtggaaggacaagcagaagaagccaagcgcaaaaagccattgtctcaccggngcagggggggactccccggggttttcactcccccggctccccccccccaacaagattgcagagagtgtttaaagtggtttcttgataaattcaagaaaattgaaaaaagttgaagataatttatatttaagattttcaatgttttatttataaaaaaaaaaactgaacaaaagggccaatcagtgccaaagataagcaggcgtttgtagtgaatttttttatatgaaaaatttcgactttttagtcttcaatcttattgttagcttttttgggaattgcttagttgtttaaatcttaattaattcctttaaatcgctgagttaaatgtcaggcggtaacaggggtgggacgcgaccgcgattcgcggcgttttttcagcgatccgcgaccgcgggatttttttttgcgcggcgcgtcgcggattttttgggacaaattttttataagaaaattttttgaatcgattgtaaataaaaattatttgaaaatggattatttttctcaaaaaattcgtttcaaaattacaattttccacgtcggagctgacaaaaatctattatttttctttaaaaaatggctctaaatcaaaaataggtaatttttttacaaaatcttttatcaaattgcattcaaatttcaaaaattttctcgacgacgcctagcggcaccgccggacccaccccatctgttccccaaaagttttttagaaagagcgggccgaaaataaaacaaacggtgcaacaaattaaggcccctcgctcaacaaattttaagctgaatccttcctttgtacgtggaattaatcgtcaaaaaggggagacagttcaaaagtgattggaaattcgtactcgggttttcagtgacgagaaatcttacaaatgacaaaagtgcgacatagtgaagaaatagtgacagaagattgtcaaccaataagcagtcaaaaattcgaattacagagaaataataaatttaaaaaatagcaaacaaatttattcactcatttcaattgcaaaaaattaatttattattcgaaaatgcaaaaaatgagaaattctctttcaccgaaaaagcgattttttttattctatgctatggcatttttttaaaaatttttgtcaaaaatcattgaatttcagaaaaatctaataaatttctcaccgaaaagaagcgcagaaacaaacgaattaaatcactaaatttgccttctctgttgatgagctatttgtttttttgtcaggaaagatgcgtacgactttcgcttcttccaaccgatgcattctctgctcattctcggcctgctccaaggtcatcccaaagtgaaaaatgaacaattttggtacactcattgaatgggggggggagcagcagagaacggcagacaacaaatgccaaaatcgaagggaaagccaaggggagggggggggggagggggaggaatcggataggacgaatcgataaacccccgggggagggggaattggacggatcccaaagggaagacgggacggaaaggaggcgcagtttaaatatagactaataataagataaaaccaatcaataaaaaagtgctcgatcattcctccccgacaccacagatggaggaaggtaaagggaagcgatgggaagtgatgtccgcgaacgatcagcgagaatattttatagtggagagagagggagagagagagagttcgtctgcactcattcgccttggaatggggaataaacatcaaaaacgggaaccgcccactttggcgcggccattttggcgccctatataaaatggctttttttggcgccagagttgaaaaatctccaaaaattttcagaaaatttttagtttgtctttttttatggataattataagccattttctttaaaagaaccatgttaatacaattgctagcaatggtgcagaattgtggtgcctaatttaacttttatattttggtccaaaattactattcggtgggtttcgagggtgttgatcataatctgaccatagatttgactaattacgaaccccggactcaaattagaatatgtatactggatggactcgaaaattcgtaacacaacccaatagtcgatggtacacaacacttcaaataaaaattttatttttaagcaaaggaaaaaattgattttgacagggttagttctaaattttgaaaattttttaaaaattcttttacggcgccaaaaaagccattttatatagggcgtcaaaacggccgcgccaaaatggcccgggccaaaaaagctcgcgccaaaaaaacctcgcgccaaaatacccgcgccaaagtggccgcgccaaaatggccgccccaaagtg

SEQ ID NO: 16480 - DNA, 1647 bp, Heterodera glycines
ttttcatcagaaccgagcagataaagcaatttgatggatctcttcacttccgaatttaattcattgaagggacggaagccaaggtcaaacgcagccacgtggccagcgaactcatgaagcaaattgagcactttcggctgtccgttgcctgaatgtttgtagtaaatacggcgttgcccatggcttcacctccccccaaacccttggtgttttgtttcgtctgtgaagttgaacggagtttttcggccaattgatgaagtttttgaaggagggacgaggagttttcgccttgaaatgcttgtgctccgacgacaatcatcggatgtttcgcattttccaatttcttatttgacactgaccgtgaaaataatgggggaagaaaaaaacctttgaaaatgacgactttccatttaaaagatcgtccaaaacggaagaattgggccccaaataagtgtagtcataagtgaggtcgacattcgcaccgataaggccaatttcaatgtccgaatacaaatatctgaaagagaggaaggaaaggaaaaatacatattttcaaagcaattaaaaaaaaattatattagggcaagtactcgaatttacattttttcccatggtacgaagtctcccaatgagtttgtaaaacatcctcgcatatgtaaacaggcaaacatagtttaagaaattgtctaacaaaattaacttataagaaaatatgcgtctgcaaacattggacaagagttttaaattaatttaatccgttttttaccagtcttatattttgaggcattttccacacttacgttttgcgaattcgggcgttgagcacaggtgcttcgtaacgagggttagtaccaaccaataaaagtgcatcacatttctcaatgtttgcaattttgtcattgaacagataattggacctaaagtgaaactgtgaccatagctgtgcaagggggcgggtcagggggggggtcgtgaaaaaagggagaaaggaaaaaagggaaagaaaaaaaaagagagaaaagggaaagaaaaaagggagaaagagagaaaagggagcggcgagatcaaggaaagggtcgtgcattgcgttcgactaaccctgacatgagggcgatttgtcgaacgcaaaagtggagacttgaaaattgactatttccctaagaaatttggccaaaattttccaatttttctgcgttcgacatctgaataattcctaaaatcttgcctatttttttaaatctcaataaaaattcctaagttctcttaaaagttgacccaaaatcgcaaaaatgttgtcattttttggtgaaaatctgttaacaaagcacaatcaaaatttcaaaaattttctcggcggtgcctatcggcaccgcctgacccaaccgcccgttccccaaaagtttttcgaaaaaagtgcaacgcaaaaaaactgacatgaaaaatgcaaaaaatggtcgcgcaaaaaattggccggccgctgacaaaaggcctccgcaaaaaaaagtattgaaaagcaaaaaaaaaagaggtcttcaacggggcaaaaatggtcggccgcaaaaaatttgacgctgacccccactagggggggtcatcgccgaacgcacgacccttttcctgaccccccccccccttgcacacgtatga

SEQ ID NO: 16481 - DNA, 1338 bp, Heterodera glycines
  unsure (1)..(1338): unsure at all n locations
aaaagcaaaaaaaggtcttcancggggtaaaaatggtcaccccgcaaaaatctttgacgctgacccccccctaggggggggggggcatcgccgaacgcacgacccttttcctgaccccccccccttgcacacgtatgactgtgactgcaattttcgactaaaatgacaacctcaagtcagtccccccgctaagaattggcaattccccttcactgaaaacattttccgagttgatttgattcagcagatccttcaatgcgattagagattcttaaaaatccacatatgattgcgttttggcgattagaaggacctgcatcgacgaggccgccggccaacccggcaattgcatttggagtgatctgacgaagtttttgtgccgctgtgaagagggcttcttcccaattgcagggactgaatttacaggagcatgggcaatgaatggcaaactatggaccaacctcagaacttccgactcatttttgagcatcggctgtaacagtcgctgccgcttcagcccgtcgcaaatgaaccgggctttgtccgacaaccattcttcgttcacttcctgtcaaaatggcaatggtcgactgattcacttatgccttggtcacttatacatcgttcattcgtggaattatcctcaaaatctctcctgttctgtgtgcaattacaatgtttgagcccaatgcatccataacgtcaacactttccgttttccgagtttcccatggccgggcaacgaaacttatggaggaattgttgcgcattattatcaataagggatcatataaagggggtgctcacaagcaccaagggccattagactaaagattgaggcagggggtattttggatcgatttttcaaacgaaggtccaaatttttctcagtggcgaccttttttaattttcgcactttttttgttttgcatttcgcctttttcaaaaaatttttgaggaatagggggggggggggaagcgtcgccgggaaaaactactagtttcaagggattacccctttcccccagtcgacctttttgttgctcatggtgatagaaaaaatatgtgccgccttttgtcaaaatgagtccccggcggtgacatttgccacctcattgtcagactaacaatgagtctgttttgaggctcggctattgtacagactgaaagtaatgggtgtacctgtactgtttgctggtcagtgcacccacggggcacaagtcgatgacatttccggaaagctcagaggcgaacagcttctcaacgtacgtcccgatttgcatgtcggaccctctgccggtcgagcccaagtcgggcaccccggcaatttcgttggcg

SEQ ID NO: 16482 - DNA, 1034 bp, Heterodera glycines
cagaatatgctctgaaacgcaccaaattttccttaccaggtagtttaggcactctgatgctttttctatcaaaaagggagatgaataaatttttaaaaatttttaattcctttttaaacaggccaaaaagtttaggcttatcttttttttcagaaacttatcagaagcgccccaaactttgcagggatactgaaaggaaaagaattaacctgttttatcacattagcttgtcatcagtttttataaaaaattttcaaaattctgagtctcctattattttatttttttttcaaaattttgaagggcggagggggggcgaaggcccaccacgaggccgcgaagcggccgagtgagtacctcggtgcatgaaaattattaaggaagagagttcattatttgtttattttttgcataattaattcataaatattttttccagaaaatgctctgaaacgcaccaaattttatttacatgttagtttaggcactctgatgctttttctatcaaaaagggagatgaataaaatttttaaaaatttttaattcctttttaaacaggccaaaaagtttaggcttaacttttttttcagaaactgatcagaagcgcaccaaactttgcagggatactgaaaggaagagaaataacctattttaaatattatctagtcagttcatttaaataatttttatccaaaaaatttttttttgggttttcggggcagtccccctgaaccgatgcgcccagatttatggggagaccgaatccttcgggaatagcttccctatagtctgtactttaattctgcgttggatttttgctccccataattgtttgagtaccccaaacggacacttgaaaaaatcgatttatttttgttttcggggcagtccccccgaaccgatgcgcccagatttatggggagaccgaatccttcgggaatagcttccctatagcctgtactttaattctgcgttggatttttgctccccataattgtttgagtaccccaaacggacacttgaaaaaatagatt

SEQ ID NO: 16483 - DNA, 1032 bp, Heterodera glycines
agaaaaatgtttgattattattgtttacttaataaagcacttagaaattgaaaaactcaccatagaagagataatctgttatagaagaaaattgagaaattattagtgaaattaagatttctcttaacagggtaggcgaaaagggcggcaatttgttaaaaatattaatacagtttagttccccgtttttagcatagtcgtttagatgtgaattaagaaagtaggtatgaatgcttgggaaaattttgttgtttaaaacagagcaaatagagcggtgtgcgaggaaatgcttatcgtttaaagtgggtcttgaagaaaaatcgacaaaaaatttaatgcgctccaattgcatgggcgcctgtaaattcgaaaccagcacaaaaaataagcctcatggcaaaattccagcgcaattggtcgggctataagcatggaattaccacaaatttcgacgacattcaagactgctttttgttaaaatatgaacacatatttaaccggaaataatgaaaggtgtgtgcttgatcagactttatcttctctatttgttacactatcgattgcttatagaaaattgcataagatttatacaattaataaaattacaaaaaaaaattgtttatttaattgaccttttccaaaacataatgaaaataaaaaagcctatgattttttaaatgctttgcaatcatagaaaaatgtttgattattattgtttacttaataaagtacatagaaattgaaaaactcaccatagaagagataatctgttatagaagaaaattgagaaattattagtgaaattaagatttctcttaacagggtaggcgaaaagggcggcaatttgttaaaaatattaatacagtttagttccccgtttttagcatagtcgtttagatgtgatcccagtgtaattaagaaagtaggtatgaatgcttgggaaaattttgttgtttaaaacagagcaaatagagcggggtgcgaggaaatgcttatcgtttaaagtgggaattgaagaaaatcgaccaaaaa

SEQ ID NO: 16484 - DNA, 1144 bp, Heterodera glycines
  unsure (1)..(1144): unsure at all n locations
aaataatgaaagtgtgtgttgatcagcacttatcttctctatttgtacactatcgattgcttatagaaaattgcataagatttatacaattaataaaattacaaaaaaaaaanttgtntatttaattgaccttttccaaaacataatgaaaataaaaaagcctatgattttttaaatgctttgcaatcatagaaaaatgtttgattattattgtttacttaataaagtacatagaaattgaaaaactcaccatagaagagttaatctgttatagaagaaaattgagaaattattagtgaaattaagatttctcttaacagggtaggcgaaaagggctgcaatttgttaaaaatattaatacagtttagttccccgtttttagcatagtcgtttagatgtgatcccagtgcaattaagaaagtaggtatgaatgcttgggaaaattttgttgtttaaaacagagcaaatagagcggtgtgcgaggaaatgcttatcgtttaaagtgggtattgaagaaaaatcgacaaaaaatttaatgcgctccaattgcatgggcgcctgtaaattcgaaaccagcacaaaaaataagcctcatggcaaaattccagcgcaattggtcgggctataagcatggaattaccacaaatttcgacgacattcaagactgctttttgttaaaatatgaacacatatttaaccggaaataatgaaaggtgtgtgcttgatcagactttatcttctctatttgttacactatcgattgcttatagaaaattgcataagatttatacaattaataaaattacaaaaaaaaattgtttatttaattgaccttttccaaaacataatgaaaataaaaaagcctatgattttttaaatgctttgcaatcatagaaaaatgtttgattattattgtttacttaataaagtacatagaaattgaaaaactcaccatagaagagataatctgttatagaagaaaattgagaaattattagtgaaattaagatttctcttaacagggtaggcgaaaagggcggcaatttgttaaaaatattaatacagtttagttccccgtttttagcatagtcgtttagatgtgatccccagtgtaattaagaaagtaggtatgaatgcttgggaa

SEQ ID NO: 16485 - DNA, 1525 bp, Heterodera glycines
taaaacttttttgtagagcattttaaatgctatcgaatggtatactatatgaagggaaatttttaaaaaattttcgagctagtccccctagaaattttcggaaatttttctaggctcgaaaagggtggtgaaaaatttttttctggggtattttgaggtgctgagctcgaatctgacctttgttttttgtttcggaatttttggaattttttaaaaattcgaaaatatttttcaattttttgcccctctggaatattgtataatattgaaaaattcataactcagtgatggtttcatcgatttaactataataatgctttaaaaatagagaaaattcaggagaattttataggatttatttggaatttctatctctaaaaataaaaaagatattccagaatttctggaaaaattcgaattttcagaaaaaaattcagaactcggttctgaaaagtcactggtgaaaagtaaaatactacaaaaatccgcaatttttttctctataagataaattttatttcaagtttttatcatctttctgaacattgttataaaaataaaactaattttgggattcgggaccaaaggggtgagcataggatttttgagtggaaaattttttttcacaaaattcttccaaaaatatgtctttaggggttatttgggccgctgatcacgaatacgtgatcagattttacttttgacataatcaagacctcagaatccctgtgtgattggggattctgggcatcattttgaggggggggtgggaagttcggatccgggcggtgtcaattattttctttgcattttatcattattttctatgctttaaataatttaaatgtttttgtttaactaatatgaaataaattaattatttacattaaatttaatttagcgaaaccgtcagtccgctaccatttttttcgaaagctagcgtagcaaatgcacgagcgtagagtatccagtgtaggatatctacactactcccacagataagtctataaaagggcagcgaaaccgtcagtccgctaccatttttttcgaaagctagcgtagcaaatgcattagcgtagagtaatcgcttcctcagatcatttttgaaaaacctagcgtaggattcctacgctgactaatgacatagcgtaggattcctacactagcctttcatacactaggctaatgtagttatcctactcgagctcaaagtctataaaagggagtggaaaatcgcttcttcgtatcatttttgaaaaacctagcgtaggattcctacgctgactaatgacatagcgtaggattcctacactagcctttcatacactaggctaatgtagttatcctactcgagctcaaagtcgtcaaaaaccggaacttgctcggacccaacccacgggtgggtcgtttctgtccctaaacatccattagtcgtctaacgactcacacggggtgggattctcccttttgggggtgggtcgcttataggaggaactagctccggcccaccccacggggtgggtca

SEQ ID NO: 16486 - DNA, 903 bp, Heterodera glycines
ttaatcttactttttaataaacgatttccttaattatttaattttaataccatgattgtaccctttttaaccattgttgtaccattccaacaatttttgtcctctcctaatcactgttgtacctcttctaatcactgttgcacctcttctaatcactgttgcacctcttctaatcactgttgcatctcttataatttttttggccttcgggattttgggttaattttcgaaaattcataacaaatcgaagggtggataaattttcatgcaattatattataaaaatagagaaaaatcaggagaattttatgggatttatttgggatttctatcttaaaaagaaaaaaagttattccagaatttctgaaaattttcgatttttcagaaaaaaattcataacccccttctgaaaagaaatttttgaaaattaaaatactacaaaaatccgcaatttttttctttataatataaattttatttaacatttttatcactttcttacgaattgttacaaaaataaaaccgattttgggattcgggaccaaaggggtgagcataggattttttagttgaaaaattttttcaccaaaaatcttcaaaaaacccggacggtgtacattatttttatatgcatttttgggttattttcactgtttttaattaatttgaagatttgttttaaattatttaaatttattttttttaaattaaagaaattattttttgttttattattaataacaaaataattttaattaaatttaatttttcttttgatgaatagatttatttttaagcaaaattagatttaaaaatttggatgcataataattcatttcaaaataaagtaaaataaattattccgtttattaataaaaataaacttttacattttttattatt

SEQ ID NO: 16487 - DNA, 2505 bp, Heterodera glycines
gagcagggcatcctcctgacgggtcatttcctccactcggtcggcatttgcgacgatgtcggccttaaaaataaatatttaaaaaatataacattttttgagattttagaaatgcattttactgcaatagttgatgctttttcaacaaattctcaatgctggccaagtcccgaccgtagtcttcagaggcgagcagtgtttcgacctgaaaaaatgaaaattgtataaaaaatgtttaatacattggtaatatcaaaaaacaatttaagagatagaaaaattagtaataaaaaagtaaaaaaaattaactaattaaaaaataaaataaaaaagtttttatcatttttatcaaaaatgattttaaaaaaaaatcgcatcattcaaattgatgtttttaaatagtcaaaaaatatcactaaatctcggaattcagtttaaaaaaatattcaaaatccttaaattcttaaatttaattgatttatttgcggcaaaaactaatttgaccgctagtttcttaaaattcttcagaaaatttgtaattttatggcgtagtgtcacttagattttcataatttttttttgaacttttgcagttaatagagaacatttagggctatcgaataataccaagaaattaaaaatttggctgctttagagcaaagttataagtagggataacatttatagttgctaaaaactgccaaaataattaatttttagtttctaaaaaaccccaaaatagttgctaaaaatgggtaaatagttgctaaaaacttcaaatttatgggggtgtaaaatcgtaaaattttaccaaaaaaggcaacaaaattaattcgaaccagtattgagataaataatttttaaaatcacaaattcatgtcaaaaaataaataaataatttggagatgaatttttgagaaatttttcatttcataggggtgcatttttgaaaaaaaatttgagtccattcttaagcgtttatttttgaaaattttcaaaaagttgatccttaggggtgtattttttctttttattgcatttttgttaacaaattttgggcataacgccaaaatagttgaaaatagtttttttcaaaaattttatagtttttttagttgctaaaaataaaactgcgactgcgaagtttaattttattatatttttaacatttttgaaagggattttgaaaaacttgacagctgtgaaagtgattacagataaaaaatgtacagcgataccagtgaacagtattgagaacacaggctaaaaaatatcaaattttcagtatacaaactgcaaagacgaagccaaaggaaattaaagcgattgataaaataattgctaataactcgaaaagtagcttaacgacagccgaaaaaaacatgtttttcgtgcatttcaggctacggggagctcaggaaaaaaatagtgaaaaaattataaatgttatccctagttataagcaaaatttttataaattttgtgaattattataaaaatcaaggcattttcgtttttaacattaatgtcaacaaaacgagaaaaaattgaataatatttaataaaattttttttataatattacagaatattttattcaaaaattttccatatgtaaaaatgcatttgtgttatttattatatttttttaattttttttttgtaaatgactccggcaaaatccgaccgaattttgatgaaatatttggcgatttataggacaaaaaaagaaagaatatgccaaaatgtggtaattaatacgaaaaatttgtcagtaaaaaagtttttttggaaaaagcgccacaaagggtcggggtcacttcaccgcggccaactcgccgcggacaattcgcagcgagtttctcgccgcggcgctttctcgcccccgtccaactcgcctcgccttgttttttggctattcgccgccgtgtacgtgacgtagagtgcatgtggctccctttccggttcgcgccaatgggttttggttaacatttcttaccaagtgccaatgggtcagcataggggaaagcccgggggggaggggggggggagggtcactgccgccgccgcattcattcgctggtcgcgcgatagttggagacagaggcgaaagaaatggtgccacaaacaaaaattgtcagcggcggagggaaagcccatcaacagcagcaacagaaatggcacaaaacaaaaagcaaattgtggggaaggagcaaatgactgtacgggggaggggcaatgagaggaagaagaggagagagtgcagaagacgagaggaacgaagagagaggagggcacaaagagagggcaattggatgagaatgagggaagagagaatgtgtgagaaagaatgcagaagacgagaggaaggaagagggggagagaaagagaaaaagagagagagaggaagaaggaaagagagggggggggggagactggatgaggaagagggggagaggaagaagtggagaaagagagagaggagtggagactggatgaggaaga

SEQ ID NO: 16488 - DNA, 1706 bp, Heterodera glycines
tcctggtgtgcctaattaatatttaattaatggaccctcccacctgattgctcctatttatagataatataaaacaaatactcaatatggaacgcacattcatctgtttgaggcccacaaatccgtcgccggttggacgagtgattgcccgctttgagtctaatggactcaaattgatcgccatgaaaatggttaaaaatttaggattttttaaaaatataaattatattttttttcagtatttaaattaattaaatctttttaactttttttaaattatttaaattaaatttttagattaacgctacacgaaatcaagcgactgagcattacaaagagtacagagacagaccgtttttcaacaaactgatcaactacatcacgtcagggccagttgtggccatggtctgggaaggtgattaaattggaattttttttttaaatttaacctattgggtcaaacaattttattaaatctaattcaaatggaaaaaatatcataaaaaaataaaattattaaaaaaacaaaacaatattttcataaatctaatggttgccaaataaaaatttgtcagcatataatttttcgtgttaattaaaaagtaatttaaaaaattagtaggacacatcatttcaaaatttaattcaaatggcaaaaattaaaaattaaatcacaaaaacaattagaataaacttgcattaaaaatttaatataatggttgcaaaataaacaattttcattatttatttctcatattaattaggaattaatttaaaaattaaggaattgactcagtcaagaaaagtctgcatctgctggagtcggcatgtttctacaatttgagggtgaatttgatttaaaaaattagaaaaatttttttattttattattttagaatatggatgagtgccgtgacattgtgcgccatggttcgtgcaatgtgcaggacgcacaacgcaaaatcaacatttggttctcaccaaatgagttgcgcattaattccacaagcagataatcccaagcgaaattattatttttttcatttttattttaatttatattaaattgaataaaatcatcatttagatttttattcaaaaattaaaattcttttaaaatcattttggctttttttcttttacttttcaattttttttaaatcgatgtgatatatatatatatatatatatatatatatatatatatatatatatatatatatatatatatatatatatcatttttattagcgttctacatgcaataatattttagcactaataaaatttttaaagaaattatcattaaacatttagacaaagcaaaaataaaaactgacaaaatgttttttcgatggtcaattgcgaagaacttgctggttcggcagacaaggcaattttcttagccccagaattttcaggattcgacgacgcaaacattcttttcaaaaaaaaaatacaaaatgccaattgaaaataagaaaatttaaaattttttttcgtcctttttcgtccaaattccgtctgacgaaaacgaaaacgaaacgaaaatttcttgaaggacgaaaacgaaactcaaaaagagacgaaaaaggggggcgacacgaaaacgacacgaaatttcgcacacccctgaacggcaccgaagagggggaaaaagtcaaacgcgagtatgccaatcgtgccccccaatcaaccaaacgaaa

SEQ ID NO: 16489 - DNA, 1090 bp, Heterodera glycines
agcaatacaaaattttttatgaaaaagaattttttttattttatgtaataaaaatagtcctaaaaatgtttggcccttcaaaaataccgttaattatcattgccttctctattatttgtgctcattttggccaaattttgtcaaatcctgatgataacgatgctgatggatgccttttatcattcaatcaaatcggcgaatttattaaggctgttaaagagccatttttaaacaaatcatcatttttggacgcccaataaataacggcaccgaagaggggaagaagagtattggacagacaaattgggtaggaccaattcacaggactgatgagtggtatcatagccacctgtgcttttactacggcccccggcggcggatggttaaaacgctttaaagaggaggcataaagagccataaaatggaaggattaatggaatgggctggtagctaagattgtaagagtggtttggttttagagaagccgatcgccgtaccgaagtttgagtgtagtgatgctcgaaagtctgtccccagtctcgactcgtgtaaagtctcgagtttttttggtctcagtcgcttggtgcgggaaccttcagtctcaagcatcactagttgaggtttcggttccatcaatctcgagtttttgaccatagttttttatttaatgttgaggcataatgccacatcattggttaaagcatttttagcgctggctttttaggcaacaaaatgatttacatcggtgtccgactcgggacaatcgagctaattcggtcaatcaattcaagaatttatggagtacaacaaatgatcgttgactgtgtgagtaaccaatgcgctgatcagcctgacaattgccaagagatggtcaaggtggcaaaagcacagctgagtgtccgtctgctgatcacaatggccaaatactttgtcgaaaatagaattttgtaccaaatttacaacaatccgttacaaaaagcccggctttgccaatggtggcaccgattcaggtagtggagcatttagccaaagaatccttggcttatgcccgtgctgagccgaacctcaaaaatatcattacggattacgg

SEQ ID NO: 16490 - DNA, 2602 bp, Heterodera glycines
tgaaattttttttttaatttatgaaagaaaaaaatttccctcacaaggtcatatactcgaaacaattttgaatttctaccctttgacaattagaaaaacaagttatggcctatgaaactttgaacgcgtaaactggaaaaaagccaatgaactttaagtaaaaaaattttcaataaaatattttaagtgacaaaaaaaggaaattttaatcaattaaatgaaaatcaacgaattactagtttttttttaaatggatctgtataattaaaaatttaatttattaaaatacatattaagtcatacctccgcaatgactcaccattctcttttactttttttattcggtcaaattttgcaaattttgttcggccaagcaaatgccaatgccatcgccagtgttgggccacgttttgggccaacccaattgcaatgtgtggcgggttcgaccaaaaaattgacacaacactggaacattcagaattgttccgcaggacaaagttgtgtggcatacgtttgtgcccatggtatgaaaaattgtgtcatttcaaatcatgattagcaattataaaatgcctaaatgatttttatcattttaatgctaattatattacacgtctcatgcttttattaatagttttatttcaaatattccctcgatttaaacaaaatttatataccgaatttcctagatagagccagccccctggggctttatttttcaacctcctcaaaaggggctttattttaggagggcattaattatggggggggggcgctctatttaggaggaactattttaggaattacggtaaattacttcactaattggtcttttacaatagaggaggctatatttagattatgccggagagccggttgaggtcgtcacaatgggatgtatggaaatgcacttttgtcgcgttgactcgcacattgaatgcctgtacaacggcggtgcaatccttcggatgtgcgacgaatgcaatggcgagcagttgtgcaacgcgaaggagggggccaagcttgcgcaccattccccctcgcttgccgcctttttgcgtgaccgattgcagcccgtagttggacaacaacaatggctgcagcagcagcaagctgctcatggcatacatcaggctgctgcgaatgcgatgcaataccaacgcgtacacccggcgcccaaggctgcagcggcagttgctgcattttttccacctcatgcaggctcagttcagcagttgcaaccacctgcagctggtggttcagtgcttacgcagcaacctgcagcagcgcatgccttaagccaagcacaagcagtgcagaagcagcagcatgcaaatggtggtgcaaaaggattgcaacatcctgcacatggttcaaacattttgctgcattctgcaagtggctcaaagcatttgcggccgcgtctaagatgcttcgtgggcagtgaaggtcaattgcaattggtcacatgcagccaaagcgagctgtgcacgagcagtttatgcgatactggtaggaaaaaatttttttattaaaaaaatgaataaaaatcccaattattatgcaattttatcatgaaattttttatttttgcaatataaataataatttttttattttaaaaataaaataatttaaaagttaaaaaaaactattttaaaaattaacaaatattttttcagttacatgcaaaactaccttcaaaaaatgtgcaatttttttacatttatatttgcatattctttgacattgttcggttgccaaaaatttggcacttttacattagcataattttttatttacaaaattagtagatggcgaattgacggaggtgaagttctgtggcgtgccacagttttgcacaatgacaaacgatttgtgcaaacgatttaaccgtggcatttcgttgaactgttcgcagtgcgacaccgattcgtgcaatgggaacagcgcgttcgcactggcatcattggtcaaccacacttttcgggatatcatggccgcaaaaatcaacactttgacagcactgaatggcacaaaagtgtcaaagaagacggaggacgataagaaaagcaacgacacaacgccaaatgtttgtgtttaactagagccagaactttgagaatatccggaacagggcccaggtttgcgagtcagaatccggacagaatttcggttaaaaaaagttattttaacaggacttcgggtcatgttgcatttttgaaaaaaaaaataccggacccggtctagggcccaaaatcttgtacaaaattctttccttccatataaaaaaaattaaaagaaaatttaggaaaccaagatgaatgccagacagaaaaaaaaggaggaggaagaaataaaaaagaaatttgaagagatcaagaagagagaggaggaagagttaaaaaagaggaaggcagagaaagagaggaaggcaaaagagaaagaagaagcggagaagaaggagaaagaggaaaagaaggaagagaaaaagaacagagagaaagtgaaaggaaatgaaaaggacaaaaaggagggagagaaaagagcagaagaaccttgtagagaatcggtgttacaagtgataggaagaaggaagaag

SEQ ID NO: 16491 - DNA, 665 bp, Heterodera glycines
gatgcacgaaaatgtgccacattttcatgtgcacttgctggtaatgcctaaagtcttggggttggtctcgctcgatgagtcaagaaaagtctcgttttttaaaaagacaaaaaacgaatcggcgtaaaaacgaattggccccaaaaacaaattgggggtcgtctgtttttttttggtattgatgtcagtcttgggcttttaattctcgattcggcaattagtcaaatactattttcatgtctgtaaatgtacctctaatcattctgatcatcatatccatgatcagaaaagaaggaattggtgatcaaatcatgcgcgccgaccgacccgaacaatgcgtactggagagagggcggaatggcgtcacgggaatgtgccaaattcaacggcactctgatcacgaaacatggcatcaccatgtgcaatgagtcattgtgcaacaaccgggcaatgcctaacactggtgtacagtttcaacagctcgtgttcatcacctgtttcactgttgtttacggtaacgatgaaaaatacggtggataatatatgataaaaatttttagcattcgtagcgctaatcatccatcattaatcataatacgaacaatgaaatgaagagttgatgacagtaaaaaaaatttaatttacaatatgaataatgctttttg

SEQ ID NO: 16492 - DNA, 3502 bp, Heterodera glycines
ttttaagttgaaatattttttattaattaatttaaataaagtaaaaaaaatataaaaaatgttctatcacggtggggaattgaacccaagagacaagtaatgaaggacataaggtatagccactacaccacataatgatataaaatcctttaaatgaaataaataattaaattttttctctcaaaatttacttttccctccaatttctttctcttttctcatcagacccccattcttaccaatgcttatttagtcccgccgggaccgggactagcaaaaccgggaccgggattcctgtttttccaaaaaccgggaccgggacctgaaaaacccgggaaatcccggctcggtcccggtcccggtcccgctcaacttacttctcacccatccccattttttttgtttcaaatcttggtgggggggggcacttgcctcctccgaaactaacaacaaaactttttttttattttgaatcggaataattcccttcgtaaattcgtaacttataaaccgcgacaatcttttcttccgtgctggctcctcacgaagttaaattctttcttttttcccttttaaattgttaattcttattattgcaactcgtacccaaatttttttaaataaattttcaaaataaaagctagaatttttttgatcggggtccccgagccccttgaagcgtgcgtgcgctctccgaccccaatcccgctgacttgtccttcccgccgatgttccacgctccccgagaattccttctccgagggttcgttgagcaacctaataatcaaattacttcttattaattaaatccataaattaagcaattaaattcaacccattttatcattgaaattttaatttttatcattgagcaaattcacatatattatataaaaatacctaaataaattattcatattttaactcataaattcaacagatatgctataattatagaaagtaatgttacaaatcgagtattaaattatataaatttggtgaaatacatatttaaaaaaattaaacagtgtctagatcgaaaaaaacggacaaaaataccgagcacattatgcaagacaaacaaaaacaaaacagcgaaaaggatttatttatttaaaacaaaaaccaattttaaaagaataaaattaggcatttaaaaatgattatttgaatatcaaatttatatttaaattgacaaatttgcaacttttatacggaataatgataatttaaaaataaatcattctaaaatacatcaatattataacatgaagaataaaatattgaaaatatttacgctacgatttagaaatttattatttttcctaaaaattaagcaatatttagcgaatgaccaacgaaaattgaggaaatcaaatagcgagagtaaaaaataaatacataaaaaggcaaacaaataaagtttaacatacatatatcaataaaaaaaagcaaaaaatgagaattgaagaacaaataaaacaataaataatacaaaaaataatttatataatttttacaatttgtctaaccaaaagaatttgtttataacttttttaataaatggcaaaacaaaacctttaataatttttttattttcaaataaatttttggcttttcaatattgggttcctagttagaaagtattcatataaatggtcatattgaattcataaatcatataccacacttaagaactttaatagataaattagaatattttaataatggtgattataaaaatcattttcattattaaatttaaaaattacattgcaaaattaaatgaagattaagtttgaaattgggtaagaatatttaataggtaaattatgtaattttataatttactccgaaatttcaactattatttgtctcccgtttttaagaaagtgtagaaatgtcgctagggctcgtctaattgtgggatttactttacccttttacaaaatatagctgtccacggtcggctgatttcggctcttctcttgccaggaatttgttttccttttttccactgcttgtcgagggatttacttttccctttttttcaattcgaggccagtccaatttgtatttgtccactgctgattcaccagtgccaggagcgccaagtcgtacaaaacagaaaagggatagttctcgggggctttaataaatgttgttgtacagcacacagcaaaacacaacaacccaaagcaaacacaacaaaacaggccaatgccgaagacaattatttatttcaattaaaataagcgaggacaaatcaatagggaaactgccgaatgcataaactaacaactaacaaaatcacaaacaaaaatgacacaaataaaaataacaaaacaccaatatatatttaaatctcaatattatcacacaacaaaattaagcaagatctttaatgagttacataattttttaaatttaaaatcgttgtcaagaaataaatttaaaaaatttaaatacgaatttttgataaaattttcatttcttaggggtgtattttctgaaatttttggttagattcttttggatgttatttttctgtaatttttgaggtcgattcttagggatgtatgaaaaaaaatttttttttctgagttttagggtattgtgaattttaaaacgtatccctaatgataacagagcaagtaattcattcttataatacagaaatataaagaatttcatccttcaaccaaaaaaaggtccaaatcaccaagaaattaatatcattgttttgtttggcataacaaatgattaaagattaaaagaaaatattctaaagaaaaataaagaaaaaagaaatacatttaaaaataaaatattcatttaagaaatcagaatttaattattttaataacattgaaaaacaaactagttattatttaaataagtaatgataccactaaataaaagcttaaaacaagaccaaattatcaattatgaatttgttaaagaaaaaagctattaaaataacaacaagcgaataaataaaagtgaactaaagcataaatttagctcctttcaaaaaaatattattttatgtaacaatgaaattttttatgtgaagtaaaaaaaaaactttacaaataattacatttatggacaagtcaaacacgtaaacaaacaagcataaaagcgagataaatttaaatggtaatgttaaacttattaaattttctatttaccatatttaaaatgacaggaaataaataaatgaataaaattttgaaaaaaatattcaggcaattaattataaaacaattaattcaagataattcaactcttgtattccagaaacaacgcctcaataaacttttagtttagattcattttaggataagtaataaaaacagagccacaataaacttagatatcgaaacaaaatgttcttaataattacaattaaacaaaaaataaaacataatgaaaatttactaattataattctatcggggagttcatctgctcgttttgcgaaagatatatatcttcc

SEQ ID NO: 16493 - DNA, 1811 bp, Heterodera glycines
  unsure (1)..(1811): unsure at all n locations
tgacttgaaaaattttcagaaaatacatncctaaagattgaaaaaattttagaaaatacacccctaaagaactgaaaaatnttctcaaaaattgatcgccaaaattcattttttttcttgataaaaaattctcggtttaaaaattttccttattcgaaaaacattataaaatatttaataaccatttaaatgaccaaaattaagtttttggttaagttttacgtgttttgctccctaaaaaaccttagaaaaatttttttaaatgcctttattcatacctttttcgggattttcgtgccttttcatgcctttttttcaattttttcgtgcctattttagtgcctttttcgcgatttttggtgccttttttgcggtctagtcattacacaggtcaaaaatgaatgaaaaatataaagaatatttcgaatttcaattactaaaaaaaaagtttgccaaaacaaaatttattttaggggtttagaaaatttaaaaattaaattatttttcatgtgctttgttttgtgttttggggcttaacatgaattgcttcaaatggattttgttgtccttgcctatccaactctgctgataatttggtgccgttttggcattaatttgccatcattccttgttctcttcccatttgttgtcttttcccattgccttttgtcttctaatttatggccattgtgccaccaccattttctgaattgtccaacaaccaaaaagtttccattacaccttttccccaaataaaaataaataaataaaagtatttcaaaaaaaaataaaaaagaatttcattaatcaatacaaaatttaattttggctcaatcgccaggacgaacaatctctctcttacttttttgttgaaaaatagagcaatttttataaaagttttttcattttggtcgcctcgcgaaataaaagatgaaaaaaaccttggaactctttataaagcccttaattcatatcaaaggcttctaaaaatccattcattaccatgccaattaaattaatgaccaaaacaaatgttttttcttcggctggttctcaccttaatgatcatttctcctctgctttcaattatataaccgcaattagaattttcgagcaacaaattgcgcgtttccttggaactgtgaattttgttagctgaaattaaaaaagaatttatttaaaaaaaattcttatttttgaaacagaccggaagaagaagtttccatccgagacgcggtgttcaccgagtcgccgaacaaacagaagcgaggcatggccaaacctgtaatcggataataattttataaaaaacagaaaaaacatatatacgattaaagggattaataataactttcatgtaaatattaaaaattaatttttaaaaggtttccctacaaatttaccgacaactcccgccacaaatggcccactgtgcagcccaattctgtctgtctcatttattattatttttctgtgctaaaattatatctgttttgctcctcccaattttcaccttcttttatttgttttaatttatttcatttctctttcacaataaatttaatttctgttgttcctttgggacacaacaaaatcaagcttttttccttttttatgggaccacaataatgttcactattaataattttctttcttccacattcatccacaaaaaatggagttgaacagcataatttggccataattgacgagaaaagcggcaaagggacggttggccacaaatttgggcggtgccaattcactgcaagcgctgcactgcacgggacgaatgattgtgacagccgcggcca

SEQ ID NO: 16494 - DNA, 2323 bp, Heterodera glycines
acagtgttcgtttaagtgccaatttgggccaaataaaatgaaagtgattggcctacaaaaaacactcgctaatgtcattttgtttttcattgtttttgaaaacagaataaattctgaaatttttctgctagtaaagcaatccaagagctgctatattacaaagatttaagttggttgtttttatgcaaaattctgatgagttttttggcaaatctataaaattgggacaacccttcacagaattaagggattaatcagaaaaaataatatggtattgtctaatacacaagagggatagtgggtcaatcaccggctttaattcaagacattttttaatttttttttcaaatttagaatgataaatgacttatttggggtgtggggggtaaatatagaatatctcgtgaaatttgaatgaaagtgaacaaaaaaaaaaattattaataaaagacgataaagaagatttaaatgcaaaaacatacgacttaacattcctccatgctttattaaaatattgtagtgatcttgacaaattatccatggaaaattgtgccaaaaagggcaagggcatcactgttaacgacaacggcgaagaaaggacgatccgcaatgaaacgagccgggctatttttggcatttattaatggcaccaatcgaatgcccgtggcggcggtcgcttcagttccctgctcattgacctaacaaatgaatgaatggacagagtaattactaaatgacactgatagtgctataaatatgattaacagcagaggcattgcagggaaaaaattcagtaaaaggaagagaaggcaaggcaatagcaaagcgaagacagaaattagtggataaactaagcaaaatttagcacagagagacaaaaggaaaagcattggaaatgcagggaaatttaaggacaaattaagcagtaaacataaataaagttataaaagcaagtgaaaagaagcaaagaaaagatgaaagtttgaataatgttttaacagaaaagccaaaatggaaaaaattttaattaataaaaaatttataaaccatcatttttccaaataattattccactgacggatggattgtccgcggtttcaacccccgctgaacaccggcggatgtgttgccgcacgtaccctcccctcgtaaacaggggtatgtgccaaattcgtttcatttcggatttaaaaattaattctaaatttatatttcgtttcgtgttagtgaaagataataataatattttagtttcatcagctcggaaatagagcagctccccccaccgggcatgacctcatttttgggcattcacttcacctcaatgaatgctttctgcacaacgtcgctgatcttcaacgaatcgccctcggcaatgccgtcaaaatcggcactgtcggagaaagcgttcgccattcccatgctggccaacgattgttccaattggagcgtggactccaacttgaactttggcaacacaacctgaaaagacggggggatgaatggcataaaatgatagatttttgcgaaataaatgatcaaacataacgccaagcacacatttggcgcataattttacctgcactttcattttgtcccgctttttggtcaattccagcagccttttcccgtccaaattggccaacagtttagccaacccaaagcgatccttcggcaacagcacaaacatgaacacttcaccacctttgtagggcatgccgagcagttggagctgttcaaattaaggaagggacacaatttaaagaaaaggggacaatggaaaacggcaaacaccaccaacatggccatcctcaaaataaatgaaatcagctgtcttgtgcatcatttccaactgaaaaaaaataaaataattcattttttaatccatttgagtgtttacaaattttacggttttatgtgttcaagtttcaaaaaatttttggtttcgttttaattcatttaaagcatttggagtttgccgagccgccgccgtgcaaattttctctgaatttttggtgaattcgctgtacaaaattgtcaaatttttaagccaaattttgtaaaattttgaaagacttaatttctaagattgggatgagtctttccaatcgtttttttgcgccacctcttttttgttctgttggtccacaaaaaatgtcttcttcttggtatattttgcgttgaatcgctccgcccaattgcccttgaaatagacagcgttgaccaacaccaagctgaaattaaacaaaacatttcatataattaaggcattttgaattttttaaatttcctcgtaaattggtccagagaggttgggcgagaa

SEQ ID NO: 16495 - DNA, 2599 bp, Heterodera glycines
gttttggcgaattgactgcatcaaaatttaaaaatttactccatttcacttaaaaaacgccaaaaaaaaaaatccgtaatccgtatccataatttatactgatcaggatcaggactacggactagacacctatacggattacggactaaaaatccggaaaacccgtactccgtaaaaatccgtatacggatccggtccgtacccgctctctacttttaatggtataaaaaattttttggaagggggggggctttattttaggggggttctaatttagggggagggctgtatattaggaaatacggtatattatttttatttggtagaaaaaagacataaatgaaagtggattaaacaatagcagagctcacaatcacaaaatagcactttagcgaattttctacgatttccccatttttcatcgaattttttcccagtaaaattctggcggtgcccaaggcgtcgtcggggaaatttttgcaaaattataaagatttaaatcaacttttaaaaaaatcacagactacccggttcggctccctccggcatcccttcgtacattgccaatctgcccgatcatgctgtgcatcgtgccgatgattttttcgccgacttttcattgttcgccggcactttggtcatgccgttgcccaacacgcttcaggtgccacttcttcacaattttcaaaataggtatttaatttttagttttttcacttttcaaacaaaaacaaatttttttgatgaaaataaaatctcaaaaagactagaaattaaaaattttcattttaaaatttttttgtcgtgctgtggaggagggaacacaacctaaagcgttaacgttcgccgcgacatatcgtggccgcaaaattttttatgaaaatttccagggaaaaaattagaaaaatttattgatttcaaaatttttagcctcccccccccgcctcctcccgctccttccaaatgagagcagctcatcccctggtcggttcccccgcatcatttccaccccttaaacttaattcaaatttttttcacaggacgccgtcactattctgatggacagcgaacggcatggtcctgttagtgccgcggctttggcaccaaatttttgggggcggctcttacttcgtgtcagccacccaactgatgcagcaaccgcagcagcaggtcgggaaaacagttcatatattgttttgtttgggaggttcgccccaaaattttggcgcccgaaatttcgtcgacgaaatttcaaataagcgttggcctaaaaaatccattcgcttttctttcgtcggattttcttacatattttcttattggaataaatgttttttttttttttttgctttttcataattttttattttctgccactttttacacagatgcccttctcccggtgcaacactgttcttcattctcaccattcgactgacaacgccctggggacattgacgcagcgttggaaaaaaccgtcgcctttcatccgagtgatttgtgatgatcacttacgatcacgatcaaccttccgattgatcaacctttcgttcaccccaaaaaaattgttgtttttcccaatctattttattaattgtttttttgccaaatttagactttgcaaaattagagtcaaataaaattttcatctcaaattttttcgcgttcgacaacttttgcccctgtgaagacttttttatttttattttttttttgcttttcacatccttttttcgcggcgccctttttgatggacgaacaggcttcagcggcacccggtggcgagagaagcggcagaccaatggaccggacgagcgaggccaaaaaaaggtagggctctttcgccctaaaagaggttgaaaggattagacttacagttcggaatgttctctcgtaaaaatgacattttttgtaattttcaaaaaaaaaattagcgcgccacaaaaaattcatttttaagctgctttttgaacgtcaggttcaaattcttagaatttgttcgcaatttttttaatgcttttttagctgatttttacggtcggaatcagggatggcacggcacggaattccgacttccgaaatttttgataaaaagtcggaatcttgtacaatttctgttaataaattgcatagaaattttcaattttttccggtggcgcctgtcggcaccgccggactcaagaaaatacttaattttcttgaaaaatttgctcaaaatcgctaaatttggccttttttgacaaaatttgttaacaatttgcattaaaaattacaaaatttttcccggcggcgcctattggcaccgccggacccttccccacagtttcccaaattctctttggataaagcgcgccgcaaaaaaaaggggtataacggtccccaaaaaattccaaaataatgtaaaattacttaaaatattttgaaaatcattaaaaaattttcaaataaatatagaaataaactaaattaccttttacatggttaaaaatttaaaaaattagcctattaaatattttaaaaaaattttatattttatttttttgaaaaattccgacttccgacatttttggagtcggaattccgacttccgaaaattttt

SEQ ID NO: 16496 - DNA, 2675 bp, Heterodera glycines
tttttttcattcttaggggtttattttctgaattttcccccgtcgattcttaggggtgtatttttcacttttattaaggatttttccgaaaatcctgaaaaagtcgtcaaaaatggcgaaataggcacaaaaataggcaaataggcattaagcacaaaaagtccaaaataggcaaagttaggcattataaaagtcattgtatacaccccaaaccaagcggaaaatgcgtttttcgtgcttatctaagcgtattaagtgcgcaaaaattttaggcatttgcctaaaaatagcatccctattgattaaattccgatggattgactcattgtacaaatttgtatgtatgtcatggtgttgtgtatatgtatatattgctgtattgtattgcattgtatagtctgtataaataaatgtgttggaattttacgcctggtacataatttttcaaacgctaaaaagttgtgatttttccgataagtttcaaatttaggggtataattttttaaataacttttatatgaaaataatttcaaattaaggcaagcaattttatttactgattacagttacaaatgaagtacatttcgggattaaagtcgattcttagggatgtatttttgttttgattgcattcttgttaataaatttaccaaaaatcgcgaaataagggcgaaaataaggtcaaaacgccaaaatatgggcaaacaagggcgtaggcagggggaagggctgaggggactaaagcccccccccccgaaaaaatgtacaacaaaattgactgttgccactgaaaatatccgaactttggagcccgtttggctcaagtacagtttatgcgtgcgtacaatcaaatttttcatccggcggccatgtttcgttaattttaaaagtgagcggaaaatttagtttttttttttttcgttcttctctcgtaaaatgtaacccgcagaaaaaataattacaaaaaacgattattaccatacataattaattgacagatttggagctgaatgagaattaaatttatgcaaaaatatattttttaattattttgggattttttatcactaaaaatcccatccctacttataaattatatggattaacatattttttctgcgcctatgctacgaagaaaggggctcaaaaatagcatttctacgttaaaattttttggttaagtcccaaaaatgaattgaaaattcaatgttaaaaggtcaaagtgtgtttttcgaggttaccaaaatccgtaaaaaaataaacatactgtaattgttattattattattatttttactttgcattaaatctcaaattttggcttaattttgttgctttttggataaaattttacgattttacacccctaaatttgtaacttttttgcaactattttcccatttttagcatctatttaaacggtattccttttcactgcatccgacccacaagcatatccggacatagttaaagcagtaatgggttctctgattggtgtccaatgggcctgcgtaattttttcaacaattccgagaacatcaaaacatatttcttccgcagatttgactaaacccaaagaataaaattttgccattaattgcaatttgcccaatcggacattagccagaaaagcagtgtttaatgatgccagccaggactttagctccaccatttaatacaggctctttgatttttttatatatatttttttaacaaatttcattaaaaatttaatttgacatgcgcaaaagattatgggaagaattggatgaacaagcaaaccacggattttccttcatcaaatgccttttcaatttctgaatttgtagtcgctcccctgttatagcaaagtttacaccaagaatggcatttttttgatttagagcggaatttcaaaaattaattctatggagtcgggcggtgccgtgccaacgattgaaggggaaaattttacaattaacaaaaaggtaaatttttggatatatttttttcttgttacataattatgcttaattttgttgaaaaaattattgtattttttgattgaataagaaaatctacatttaaatgaaatggcgcgctgtcatttcgtcccgcgtcgtttcgtcccgcgtcgtttcgtcctgcatcgtttcgtcccgcgtcgtttcgtcctgcatcgtttcgtcccgcgtcgtttcgtcctgcatcgtttcgtcccgcgtcgtttcgtcctgcatcgtttcgtcccgcgtcgtttcgtcctgcatcgtttcgtcccgcgtcgtttcgtcctgcatcgtttcgtcccgcgtcgtttcgtcctgcatcgtttcgtcccgcgtcgtttcgtcccgcgtcgtttcgtcccccaagccaaaattagtcgtttcgtccccaaatttgttttataaaatatttagattttaagtgttaccactaaaaatttgtctgggtttagttaaacaaatcataaatttacgaatttagacgtatgatgaatcgtaaaaaattgaaaatcttcaaaaatgtcgtaagcgcaagtttttggataacaatgacagtgaaaacgaaacgctatctgctgatcaccgtgaacaaaatgagaacaacaacgaccgcgacgatgattttgaagaacacgcaatcgtaaacaaaggacttggagaaacgaaaagaggaggtgtctgcatttg

SEQ ID NO: 16497 - DNA, 1158 bp, Heterodera glycines
  unsure (1)..(1158): unsure at all n locations
aaatcagaaattttaaatgttcaaccatctttaaaccttgtttaaagagtttctgatgtattacttgttcttaataaaaaaaaattttttcggattctggacacgtttcctcatcaagtatcttggggagtattggacatgtaatgcgcaaatgtatatataccatatttcactatatcttaaatatttccattataaaaaattctttaaaattccaaaaaaattttcacccccaaaattattaaattttttattattccaacattatttcaanaataatacattatttcttcatcatttcttcattaattcttcattatttcttcaaaatttcattattttacataccaaaattcacatccaatatctttataataacttaaattaaatcacaaatttaaacatcaaacatctttttacactattttaatactttctcatatattacttttattacttaacctaattttcaaaattcaattttttccaattctatacacaatttcccatcaactatcttgggtcagtattggacatgtaatgcccaaatgcacgtagggcgtctttacacattattttaagtatttccagtgtaaaaaattcatcataattacccatcaacccctctgaatccctgcgtatcccccctaacaaaaaaagtaggcaaaaaaaattgtcaatcagatccctttttagggtatttcccgaacccggaccaaaacctgccttataccatctgaaagagcaaagtatgtagaagtgacatcaactcttcttttttcgattgaaccgattttaaggcaggatatgagccatcaaacacaaaaagccaaaaatttttgaaaaaattttcaaaaattttctgaagaaacttttttttacgtgaaaatttcaaaaaacgctttacaccattcgatccgcaatcgaaaagtgccggaaggatgcgcaaaccgcatcccgctatgagcaaccgctcgcttatttttttagcaaacgtcatttcaggctacatttttctcttatagagggaaccagggccccaaggggccctgtgaaagcgccggagccgctttcaacaccggggccagccggggccattgggttttccccgcgcttaaggtactcgctcggccgcttcgcggcctcgtagggggcttt

SEQ ID NO: 16498 - DNA, 1064 bp, Heterodera glycines
ttgtgtcagaggaccacgaatcaacggcaattgtaatgttatcggtgctttcaattcgccttttaacattttgcaacatcaaggaatagctgtactgtaaaacatcatttgtcaaatattttctgcccctgaaaaaagttgatcatcgaaagttttatttatcaaattaatacctagttttatagtgaggaaccaatattcttaataaattttttagcccaggttcttccacaaaagagaacggcaatccagcagtacataccaaatcgttaattgccttgtcaattttcttagtcatttctccgtcgggtgtccattgagctgaaaatgttatgtaaattcatttaaaattaaattcctacaaaaggttttttcgatggttaattgcgacgaggtagcagattcagccctcgctatttttttaatcactggacttgaagtcgcaaaaattcgttttaacgtcggttgtctcgggttcgcttcattatttttgaggctttctgcagccttatctttttcttccaattctttcaattttggttgatggtgattttttaagtgagaacgaagtgaagccattggatacctagacaatttctttgattcaaatttgtagctgcaattttcagaacggcaacaccataaattgccgcttggaattgtgtcgcaattaaaatactggagatatttgcttttggaagacattaataggcctaaaaaagactttgatgtgtagtaaaacggaaattataacacggaaaaaaaaggactaagaaaaatggtaattctgtagtttgcccccccccctttatttggaaaaaacggaatgccaatgaaaaatctaccaacggggcctattcttaccagtgctttttcgtacttttttcgtccaattttgctctgacgaaaacgaaacacgaaacgaaaaacaaaattttgaaaaccgaaaccgaaaacgaaacgaaaaaactttggtagacgaaaacgaaacacgaaaacgaaactcaaaaagtgccgaaaatgtaggacgaaacgaaaacgaaacgaaatttcgtccatccctg

SEQ ID NO: 16499 - DNA, 1443 bp, Heterodera glycines
  unsure (1)..(1443): unsure at all n locations
tgcacgttccaataatccaccagaaaacgcggacgtctcacacgtgctatttggcaaaggaacaccggtgtagttgatgacttaccggagaanaagcaaaggattggcaaattcccagaaaacttaccatcccaaaattccctcgagggcttgtcccacgacatcgttcagcgcagtaattgcagcagtcaaatgctgaattggcacaaatgcgagcgcggtgatcatacgagcagtttctgcgaaagcggggtcacttcgatagcgctaaatgggatggaatttctttcttttaaaaacagaaatttaaattttggagtccttcggaaatgaggcgcttgggcagattgggcactaggtgaaaaagacatcctcaaatctgcgcaaattcagagtaagtaataattatttattttttaatttttaaaaataaataaaacttatttttgctataaaaaaattttaaaggaaaattaattcatcacaacattattattgttattattaacaaaggcttcatagatggcatactgcaaatttttaagcacttttagtcgtttttttattattaacaaaattttcatattttttttattttctatgggttttttaaaaaaaaatcagaccaaaatcccaaaaatttcccaggcggtcctgtcttcactgaagggatatataattcatatttagtatattttaaaaacgcttaaaaaacgagcttattttagacaaacctacaaacatttgcatcaaaattaaaaagatttgttaaaaactttttggttaacaatttttttttattttcgttctgatctatctttttgactgcttattgaccgagcatttaattattattttggctttttttcttaattcttaattaattattaatttggataacttgttattgttagtcattaaaaattgtctgcccaaattattattacactatagttgatcagccaatcgtctagctaattcggcatccgcttgctcctgccacgctttacccatggcttccgcaatttgtgcgtcatttaccgttgaatcatcataatgcgataggctaagagcaatttgccgatcttaaatttataaatttttccagttaaatttgtaaaaaatttttttttcaacatttgtgtagtgagtacttgttttttatatttgatttttaatgtttattttgctattttttttttttgcattattcgattttaattgttgcttattatgaaatcttgggttcaatattctaattagtaattaggtaaattaattaatattctgacttttttgttgattaatttatttattaattaggtaaattaataaacatttattcagcttaaaaattggttccctagatataaccgtatttcgtctgttctctttttgaatttgatgggcctgcctttaaaataaataataataataaaaata

SEQ ID NO: 16500 - DNA, 842 bp, Heterodera glycines
aattatttagtcttgggtggttgatttttgaaaaatggagatcaaaatggcaaaaaatagtaagtttctgcgaaaacggctaaacattttgtaaaatacaccccccataattcgggatttaaaaaaatgaaaaatacacccttaaaaattgactgataaccaaaaatacacacctaaaaatcgaatttttaacttcagcccccaccccccccccccccccccccgaagcaagggcctggctaatgtgctttaatttgttattggcatttttttttgaatttatttatgtattaatttgctttaatttgttattggcatttttttttgaatttatttatgtattaatataacttcgcaatttggcaatttttcagcaggaattgatgcttgtccttgttttatttcatctaaacagattgggcattcatcatttgttgctgttttatgtttcgttggagcggtgacaacggcattttttaattttttccatatctttggagccgtgccagcggtatgaataaatattattatgatgcatagaataattaatgaatggcaaatagacatcgtgaacaaattgttaaatataattaaaatgacaattttgggcaaaaaaatggttcaaaaaatgcaaattgaaaaatggacaaatcgaagctctataataaattatattaattcaaacttattaggtaggattaaatctggggagccacttggtcgcatttaggtgacttgaaaccgggcctgcaaatctaagaaaatccaattttggcccagttctaaaattttatgaaaatatccagggggagtgtctgtttagtcccaggcttttagttgtc

SEQ ID NO: 16501 - DNA, 2476 bp, Heterodera glycines
ttttgaatttttttcactttttttttggtcaatttttttttgtttatttttacacataataatgaatattaaacattaacagaacaattatggcgaatgaaattataaattatggcgaataaaagtacattcacgattttttatgtcaaaagaattttgcgaaacaaaagggttcccccctttggtttttgataaattcaaaatctttcactttttaactatcgccaaattttcttttcaaaattattttcaattattaaatagcgtgaaatacgtaccatcggcgcccccacaaaatgtccaagccacgaaatgtccaaaagagtaaaaacccacgaagtgtccaaaactcgaaaaagctattaaaaagccggaaaatgggtctaaattaaggtattcggggtcgctgaatacgaatacgacatttatataacccatttcctaaccttcgatccacccgaataagaaaaatctcaaattcggttaaaatatatgctgttttttgtcttcagattttgttattcattgatcgaacaaaatgggtgggccgagtattatccacctggcattctggctacacccggccaccagttagagaggaatcttttgttgcaagttcatgccatgattcagcttccgcttcaatatggctgccattgctgcccataaaaagccgtggagaaagcttgttgcgactgccctgcacgagggaatccattgtggtgcagtttacctgggtggttgttccaagcgagataatatctgccgagcgatggccaaggcctacgggaaaaaagtgacgccacaatttgacgctctgagaaagattgtggagaaggcgtttccttttgtcaagccccatctggacgtatacgaatgtaaaagaaaaatactaaataccatttacaaagagattgtttatagaggagctcctccggcgacaacggcagttgtgtggtggtggtaggtgttggttgtgaaatgggggtaggtgttggttgtggaaattttaagagaacaacaacaaaataaaaaaaatattttgttttcgttactctaacaaaaccaaactattaaaaaacacaaaaaataattttcaaatgtgttgaccagttccgtgttttcctcgtaaaataatgtcgtattcatgggatggtggcacgtttgctcccgagtcaaggaaaaactacaattattttattttttaattaaaaaatatttttacctgtgcgaccagcttactgcctgcgacagtttcgacattaattcgaccaggatgaatttcggaaatttgtcgttcttgtgagcaaagttgatcatcattttggcaattggtcttgacacatcgttcctcgccctttttgttcgtgtcaacaaccaacattttgaaattcactttttcatcctcattgagtgctttaaatgtttgcgcagctgtcaaataaatcttcctgtaaggatgatgctcacgcaaaacagcatgcagatagttaagcaggttttcctaaaagcctttttcattgtcgtattttttaataagtttacatcaagatgcttttcttttgcaatttcatccaagcgtagacgtgcatgttctggcggaattgtaaaaagttgaccgtgcaattgaggtagatcgtcctttggcgcattgaagtcccagagaacgtaacgaatcatgttgttgcactttacgatccggaaggaattttgcagttttggatctcgctgaatccgcacacaaccaaatgcaaggctgtcgttgtatgccattgaatgttgcgtgagatgggaatgccaacgaatgtttgttgtgtcgttgttgttaaaaagtgccataatgcttgaaggccttttttgcagatcgttgaagcgctccatgagagacacacgtccttttgcacaacactttgagaatgcagttggccctttggcttctgacggtaacaatagcgcattacactttggacaactgatttgttcctaaattatttttttaacaaaattaaatatatttaaatacatttttcaaggaatcgtaatattctggaagatgtcttgcacttttggccccgcaaccatatccaaaatgtgaagaatgccgtgatgcacattgggacgttattggaagaaaggatggtctcgaagagacgggcgttgaaaatagagatggtgtatggctgagacggcttgatgttcttcgtggcgcaagtgacggtggaggcattaacattgagtcaattgtttgttgtgtattggtcagtcattcgtctctattactattgtacctttaaaagggaatattttcgattcattaatttatttctaccagcagtcacggtggtaatatgaattgcaacatcccaaaaagactccgtagcggtccaactcctgacaagacaaacagctgtttacatagaatgcaaaagctaagagggctgagatgaacagttatggcattttcccatttgtgatg

SEQ ID NO: 16502 - DNA, 3243 bp, Heterodera glycines
  unsure (1)..(3243): unsure at all n locations
tcaaannctctttttgggaccatattaaatcatcaatttctgatcactagtaaaactttttttagcaaatctgaatgtgccattagactaacaataattagtactaaaaatttacatcggaattaattttttttcatttatgaattttgaaattaaattaattcatgaatttagaataattttcattttcgagtgttgaattaaaatcttaaaacaaacaaaaagatttgaaataaattaaaattaatggcttaaaaactgacaaaattgactttggtttaattaatatctcatggtttttattacacatttcataattctattcattttataaaattttcttaaatttattatatttgttttcccaaattacagatataaatgcaaggaattggaaagtgaaactgtcccagtttgggcgccgatattcaaatcaaaactgtcggaaaagcatttagtgtaccttggtagaaagctgtcgttggactcgtcccaaatgggccaagtcggcctttggtttggcaacgatcgaatggccaatgaaagcgaattgtcgcatagactgcgcattctgagcacaaacagcgaatttgacaagttgaaagcggtcaaaacattcatggaactctttttgatgcaaaactcacacattggcattttggtggtgcgtcatccgctgacattttcggcaggtgaatgaatggatgggtagtggacggatgccgatttgcgatttggaacttttttaaggcattggaattccaattttttggggaaggggggggggggttcggattacgggtgaaggggtgctattgcgttgattaaaaaccataattgcttataccttttgaagcttaatgaaatattttaaaagttataggctaatagagaatatttagtgctattgaatgatattaaaataaaataagttactttagatcaaagttagcaaaatttttatgtgataattttttaaaatacgccctttataatatgttggacccgcccccccccccccattctctttgtcagtggttaccgtaattactgagaccaaggagtaacaaattcatgagggagtagtaaaccgataagtacggtatttggttccatctcctaagggattaaaagattaactggaattttgtttttttaaattcggctcatgcgaccctattaaaaataatattgtaaaattcattataatccacagaagtaatgcgtgaaaatgaattgtttatatcggtcagcaatctgttggaagcaaatatgaacacttcttcaaatgccgttcgatggctcgaattttattttattttcggaaaaactttctcttatttcaaacaaatttataatgatgaagttttaaagacgaaaattcaaaatctgtgggaatttttcaccaaagttttgaaaaaagtgcaggaggaacagcaaacattatcagtgaacgaaatgacaaattcaatctttcaaattttatcgcaattagaaaacaattttggcacaagaaaattggggcaaaagagtgaagatttgttcaaaaaatatgcacaacatttgtcggcattttacaaagaaaatgaatcatttcgcaaaaaatttgacagaaataaattgggaagagaaaacataaaaaagatttttcaacttattgaccaaagtcaacgaataatgccacgcaaattttgggaacttttcgataatgcaaagaacgaattccacgctaaaagctcgtcctatttggcatgtccaagtggatcagaaatttgggagaagcctacaaattcatcagaagattcttccgagtgtaattataactagggatagtatttttaggttttagcctattttttccctgagctccctatgatctgaaaggcacgaaaaaaaacctttttttggttgttgttaacctacttttcaagttattagcaactattttatttttataatttttagaacctaaaaaactaaaaatatttggacctattttgaggtttgcccaaaaatttattaccaaaaatgcaacaaaaacgaaaaataacacccctaagaatcgaccacaaaaatttcagaaaaatacacccttaagaaatgaaaaattttctcaaaaattcatctccaaaatttattattcctttttaggaatttttcgtttaaaaattatgtatctcaatacggggttggcttaatttgttgctattgaataaaattttgtcattttataccctaaatctgaggttttttggtaactattttcccatttttagcacttattttaggttttttagaacctaaaaactatttaatataaaaatattcgcctattttaaaattcatgcacaaacaaaatatatttaagctgctgattatgggctaatgagttcatatgttgaagttatttacaaaatagaaaacagtgccgaaatatttgagtgcaaagccaaagattatgggcacattttggagatgaaagccgttttggagatgaaagccgttttagagatgaaagccgctttatgggtgtataaggaagtgatcgagaacgaactgatcggatttgccgactcactaaatctattggacacaaattttgattatttgctcgaaaatgaattggacaaaatgacgacaaacgacggacaaaacgacagcgacatccattactcccgattatgcttccttcacaaaatcgcattagcatttgtgaaagatgaagcgctgagaagaaacaagcagtgggacaagcatttgaagcggctgttgacggacacagcggtacttcaaatgaatgatccggtgaatgggaaaggggttaagggcttggcgattttaattaaaaatatgattttttatttaaattttaaaaaagatttttgaaattttttaattcaaaaaatagaaattcaaaaatcaatttaagtatttaaaaaaattcttatatgtttttgttttacatatgaatacatattggcattttaaaatgtatctatgcaattttaaattaattaaaattaagaaattaattctgttgttgaatcatgaagatggcatcaattgggccagtgccgactgcgccgacccaaaattcacaaccaaatttatataaaacatcataaaaattccaaattnttcttaccaacttcatttctactcactaaagaaattaatcccanantttcntatttcaagcttcaggagaacggaacgcccactgctgattcaatcacataaagg

SEQ ID NO: 16503 - DNA, 1002 bp, Heterodera glycines
aaagggaattaaaaagggattaaaaaataaaggaaattaaaaagtgattaaaaaataaaggaaattaaaaagggattaaaaaataaaggaaattaaaaagtgattaaaaaataaaggaaattaaaaagggatttaaaaataaaggaaatttaaaagggatttaaaaataaaggaaatttaaaagggatttaaaaattaataaagggaattaaaaagggattaaaaaataaaggaaattaaaaagtgattaaaaaataaaggaaattaaaaagggatttaaaaataaaggaaatttaaaagggatttaaaaattaataaagggaattaaaaaggaattaaaaaataaaggaaattaaaaagtgattaaaaaataaaggaaattaaaaagggattaaaaaataaaggaaattaaaaagtgattaaaaaataaaggaaattaaaaagggatttaaaaataaaggaaatttaaaagggatttaaaaataaaggaaatttaaaagggatttaaaaattaataaagggaattaaaaagggattaaaaaataaaggaaattaaaaagtgattaaaaaataaaggaaattaaaaagtgattaaaaaataaaggaaattaaaaagggatttaaaaataaaggaaatttaaaagggatttaaaaattaataaagggaattaaaaaggaatttaggatgccaaactgaacaagaattgatagatgcattttattaccaacgcaattttataaaagaatgcaattacacggcaataaataagctaatgcaataccacagcgaccaaatattagccaaaccggcggcaaaaatgaaattgtggaaaatgctcaccgaattagggccagagcaaataataatttacgatggcacatgggagtcggaagtgatgagaaagaggagaaaacaaggtcattaaggggaacaaatttaaaataaataaaaaaatttgcttttaaatgaatattaattaatagggtttcttttttaggtac

SEQ ID NO: 16504 - DNA, 4222 bp, Heterodera glycines
  unsure (1)..(4222): unsure at all n locations
attaatttttaaatcaattttgtagtactttcttgaggagcctgcgcggggggtgaggatcacttcgcttcttcttcgccctgcggagcatgcgccggatggtcttgttttggcttttagacaacgtcncaatggccgcgacnccagcaaactgcaaaaaaataaatggaattaaattgttttttttcaattaaagaacttttttggcaatccgggtggcatccgggatgttcgcgccccggtgaccgacgcttcctttgcaaaacatttcgctcccgcaccctgcccgccgagaaaggccacccatttcgccccaattcccccccccccttcccttaccaaaatccccccccctgaaaaattccggcccaaatttggtcccaagatccccccaccctccctttcatcggaccccccccccctaccgcgattcgctccccacatattttgatcggataagattattcaattgcgttttttaattttcgtttgttgcgaaatttttgtgcggggcgcaccaaaaatggtgccatccgcgctccaaggtcaaaatagtttttatgttcacaatctgtcaatcaaagttcttgggcgagaaaatttaaagcgctgcggagatgcaaaagtatttgcggccactttaccgcagtttttatacacgggaactgtcaatcatataaagaagggaacgccgaagcgacttcatttcaattccatttcgcttaaggcggggggtcgggggccattcttgcccctcggggcgcttgcccacatattcaaattttttccatcgatcatctggatctgtcaccgcggcacggcagaacgggatggcagtgggaggagtcagcagcggcaccatccgcaagtttacttcatttgccactttcgcccactttttcaatttgtcagcagcggagccacatcccaaattcacttttcgccatttgccattttcatccgctttcatcatgtcttttattacccccggcactttcacgtttctttcaaaagagtatggggaattttcggctgggcattttgacccaaacagagcatacgacccaaattcacttgcagaactttcgtaatggcatttattttgcttccattatctttcattttttctttgtagtcaatggcgaaaagagtttctggacggccgatacggatccaaacaaccaacccctccttccaccccgcgtgccccatcgcccagattcccaatcccggtcattgttggtaattttaatttgttttttggattttgcaaatattccgtttacaggaaatcgtccacaggatgaaaattgtttggttttccacaaatatcttgtctgattttttccattttagggcggcagatgttccccgatgacgatggctacgaatcggaagatgatgaaattctcttgccacctccgccgatccccccgcaacttggccaccctccgccaaatgtgccggtaatttcggtttcgcttttcgttgctttttctcaaatttccgagtgcttttttcaggcagttcgtgttcagccaatgcatgttgggcagcagcggctgccgctgagagacttgccacaattcgaggaccatccgcaaaatgtgccagtaattttgggtcgattttcgctgcgtttttctcaaatttctgcgtgctttttttcaggtaattcgtgtccaaccgatgcctcaaccattgccgctgagagacctgccgcaaattttccaccctccaccaaatgtgccggtaattctgggtctttctttcgattgctttttctcaattcccgagtgcatttttcaggcaattcgtgttcaaccaatgcagcaacccgtagcaatgagagccgtgccacaattcttccaccctccgccaaatgcgccggtaatcttgagtctcgttttcggttgctttttcataatcccgagtgcattgtttttcaggaaattggtgtgggaccaattcatgatgggcaacaaccactaccactaagagcgttgccacaattcgcccaacctccaccaanatgtgccggtaattttggctcgtttttttgttactttttttaattcccgaatgctttttttcaggccgttcgggtccaaccagttcaacaaccgataccactgaaagacgtgccgctatttgtcaacccaccaccaaatgtgccggtaattttggctcgcttttgttacttttttttcaagatcccgaatgcattttttcaggtaattcgtgtccaaccgatgcctcaaccgttgccgctgagagacatgccgcaaattcaccatccaccgcgaaatgtgacttcaatttggatcaaattgtggttgctttttctcagtctctgggtgtttcttcagggaattcatgttcgacaaattcaacgggaatacgccgtaccgcaatttgcccatccgccgccaaacttaccgtatcatccaccagaaaacgttccggtagttgggtcttgtttttcgtgcgtttctcatattttcggatgcttattcaggtaatccaaccacggcaacgaccgcgccagctgagagatgtgccactattcgaccacccactgccaaacggacaggtaatttcagaccctgtcttttacctaacaccgaaacatcttttcttaagcaaatgtatgccaaccccccgagagtgctggaagtgatccgacggctgggcgagtggagaggaagaccaagggacccaagacgtccgcctcaatgaatgaatggaatttggattttgataaaatttgttgttttaattttttgaattgataagggttaaatcccgttacctaaattgtttgaaaattattaaaattttaagaaattagatgctaaacctaacctttgacaaagattatgaaaaaatgaaaagaaatgacgaaatttttggaatgttccttctttttattatctatggattttttttcatgtgcattattttggtgctagtaagatattgtcgaatgaattaattggtttttttcccttcattttaaaaaatttcacgtccccatgccctgcccacttcccgcggaattgatcaaggaaataattgacgctctcccccctccaaaaacacatcggcttttgcgcgtaaattttgttttggcatactttgttaagtgtcggttttattccatgatgagaagattgtttcgcccagagcatatatcaataccaatggcccgaagaactggaatttatttctttttcgatgtttatactccccctatttattttccactctaccaataataacatttaaataaaattatattttttttttattatctgattaatttcgatcaatattttttgataattaaacaaaattgtatttttcccaaaagaattttctcgcagtaacaactcataggcttttttttactcccttcataaaatgtctcgcttttgccccctcgcccaaatcaaggaatcgggtcggcttaacacaccaaaggggaaatttagtgagttccaaacctatcaaattaaaataaagaattttgataatcgttttaggtcttttttacgctctggaaaatgctcgcaattaccaattgattggaaaggggataacggaaaaaacttttcgttatctcatgaaaacggaaaagaaacaaagggaaatggccatggaattgatggaaaaggcagggataagcacggatgacaaaacttttggtacccaacatcttgaggctgtacaaaaatactgggacagggaatttccgggcatgttccgagctgttgttttcgataaggttaataaataaaaacacaaaaaaatcttttctatttttttagaaatttggacttaagccaattttcaagggccaaggcgttcgtaagaatgaagtgtgtgtgataagagagggagaccattgggatgggatcaaatccgcttcctggtttttctgcgtcaaaaatttttgtgttagttgtgaagtgacgtacgatcgacctgaaagacatagaatggaatgtaaagagcgctgcaagaaatgttgtcggatggggttcgggtttccatgtacggatgtctgcgatgagattcactgcggcgaatgcaatctcaagttttacaacccggaatgttttgaagcgcacaagaaggcgacgtgtattgagtacaagaaatgtgaaaaatgcggagctgtgtggaatactcggaacaaacacagtgcggcgaaaagttt

SEQ ID NO: 16505 - DNA, 2803 bp, Heterodera glycines
ggcctgcccattggcaaaacaatcactttccttacggtagaacaaatcgaaaccaacagcagcaacaaaaggcacacgcaacagccacagcaggtaatcaattaggaaggataattagggtaattagcattgttaatcggcaacttgctaaatccagcagcagcaggtgtccatcgccaaaatctctctccaaatggccttccggcagagtcagtgccaaacataagtcctttggcggcatggggccgccatcagcagacaatccgggcaaaacagaaccaacaacgacagcaatggccatattctcagactgtgccaaacagtggtcagcccaatcgaagaaacaatggtaaaaaccattaaaatggattattcatttttaaatttatcacataattttaaatgcgttaagtgggctggccaaactccttctctccaatcgccaaccctcagcaaaatggcatggagcctaacaaaaagtcttcgccatttgaaggagtgccgtcgtttcgcagtcaataccaacaaaatcgacgaaaattcactggtggtgggctaagtcgacttgtgctaagcagcgaggaagaggagcaaagtgccgagttggaacaaagccacgcaagcacaaattggcagcaaatggcacaacggacgacgatggttacggtagaaagggtgattgattacgatgggaaagtgtagcctaaaaggggtactgtaacaatgagaagccccccaaaagagatttgtttacccttttcaaatccagccaagctcaaatcatccgaccttgaacaactttgagcggtacatgccgttgttggctcggcatcggccacctcccaaaaatgggaccgcccgttggagtttgtccaacagtgcggagccgtctacggaggaacgaattggccaatcggcgggcggcgaccgagtgagccaatcaaattaaatagttgtacattgtaacaacacactcctactgtataaatcgcaggccgagcgcgagcagggcactgctgaggaggaggacgaggcgggcagcgacgcgcggatgggcgggggaccgtgcgtatcggccaactgtcgcacgtggatcaccatcacaattcccagcgaattggtcggattgggcggtgccgaaacaaacggcgaaacgcaacacaaagaaagaccacccgcgcacaaagccattgtgacgcaggtgaacggcaaaacaatttcaaattgaattgctcactcatcagggccaaattgtgcagtcaaagccaccgacgaacggcggatggacgaagcctaacacggtgccattccgaccaaaagccgaaaaaccgaacacttccctaccgatgcagcccattcagccgccgaagagtcgcggaatgccgacggcacgcggcggaacggcggcaaagagcggagtcggggaaacgacgagcagtcctcagacaagtgaatgagtgggagagagagagaagggaagggaagagagagaaaagggaagagagagagagaagggaagagagaaagagaagggaagagagagaggaatttaaatggggcggaagtgcaaatttaattgtcttgattttaagttggtcaaatttgaatgttttctatgacggtgccaacatcatttaagatttgcctgtgacgactcgccaggcaccgcccggttttgtgttcagcacaaaatggattttgccggtcaatgggctttccgtgcggccaaatggcacatccgctgcgccgtcatcaatcagcacaacaacgccgactattagcacaatgccgtgggtttagtacgaaaaaatacaaaatttaaaaaaaaatttcaattaaaatggtcaattaaactatcggtcgttgctttaaaaaaacgaattgaaatttggtcagtttatgaaactgatttgcttaaaataacaagcaaaagcagaaaaaaatttctgaaaagacaacaaaaagtttttgattttgttttggaaagtttccgaagagattggccaagcgaaaactcaaaaagtgacaaagcaattaattcccttgcttttttgatcccatagaaagctaaaaaatttataaaatatattactgcattccacgcctaatttaaggtatatttaaataaaatatgtaattaaaaaattttccttttaatattttatatttatttgtcattccccattaaaaattcaaaattatattaatcttaataaaattaaaaaatagggaaaataaataaaattcactaatttagtgtttgatttttgcactttttttttggtcaacattgcatttagtacctatcctcaaagattggcacatgagtgaactacccccccccccctaattttttcgcaaatcaaaaatcagctaaattaaggccattcacaattgggccaaggccaaaagtttctccgacgcaaccgccggtggttccgcgcgaaaggcccagcgacaaaatgcgaccgccgaagccatggacgcacacaagcggaggaaaggaaaaggcgtcgaacgtgccgaaatcgaggcattttatggcattaaaatattataaattaaaaagagaagacaaatttgtgaggcaaaattacttttattttctcatttttgaatgcctaaaataggcccgaacaaacgcaacagccaaatccgacggaaccgacgacggaccaaaccatcgaacaagcggcaatttgggtcagagattggatgaggaacataaggagtggaagtgccacagggagtgattctggtggcacgtcctaaggtgtgcagtgcattgtccccttctctgacc

SEQ ID NO: 16506 - DNA, 4386 bp, Heterodera glycines
ttcccggtgagagttttgacgaagatttgcatgatagccaaattgaaggggtattgaattcaatcgctaaattataatattaaaaggatgatattacaattacattgggaaagaaaaagtgatgaaattggaaagaaacagaaaaattagaaatgaatgtcagaggaggaataagagctgaatatatgtgatgtgtgcggagttattgcaaaggcagagatgcaacgatgaattaaaacaaacatgtggaaagcagagaaagcaaaatgtgggttaatcgttaatcgaagaatggtgggaggagaggcattgggaatgggaagagaagaaaggaaaactgagtgggagaagaaaaaaaagccgtgatgagtgtgggtgagaacagtgagtgtgcggacattaacgacccggacatttgagtccgaacatttgagccgaaaacaattaggcataattgtttagggcgcaaatgttcgaggcgcaaaagtccaaggagcaaacgtcactttgtgacttagttaattaaacaatgatttgcttgggagagaaaataaaacttagaatgaatggatgagttgagcggaggaggtaattaggacgagaatcgttgagaagttggagacaaaataaatgagaaaatgaaaagtgtgctggaattttgccatatttatacacaatcaactcggtctgtaaaagacagaattttttgcggcagtcactcttctgtaatgtagacaaatgcattgtaaaaagtgtataaaaggagcgatttttggccgtccatcgccatcaggaatatgagaaaatcagaaaaataactttccaaaatggaagaggaaaatattttttttttcacgtaaatgaaatgaaaataaaaattttaaaaccggaaatgtttccgagaaaaaatcgtaaaacattgcttaaacgcaaccaaattaaatcaaggtaacttcatactatgtatatctccaatgaaaagaaaattttttgttggacgaaaaggaaacaaaaaaaataacacaaaataaatgttttcgtacgaaatgaaacgaaaatctcaattgactaacgggaagtaggtgcatgacaaaatttcttgattcataaacgaattgctttccccactttgccgctatttttaagctcggaatttgggtttttgagatcgctactctaacaacttattgtcgataatatcttccaaaacataatttatgcttcgtccgcatcatgaactcgcaatatctctaagtggttgtggctttctttgttcttaccatattggggcgatgatttgttttcaaaagcatgccaatgtacaaatatacagtatacaaatacgatacatataatacaatagattttttcaatattttacatttggaatgctccatttacagaaaaatcattataccaattgtttaaaaatgtaaaactgcttctttttggtttagtctctcctctctcgtgttaacttttattgtggtgcgtccgctggtgccctaatcgcctctttgctcgttttatcgcctcattcactggaagtactatattatttggtttacattattaatctaattatttttatagactggattaaaccaattgtacagacttgcagaagaggtgcaaaaccaacgcccttttggtgctcttactcctgggtttaatatggcgcaacggcttgcaaaaattgttgatgattttttacccgaagacattgatcgggcgaatggacggctaatcatttcagtgacgaaacagagagtgagtggatttggtcccttttcggcctcggatttgttatctccaatgatttaattagtatagccaacattttaggactggtcaaatcgtctgatttcagaatatccgagcagggaataccttctgcagtgcctcaatgccacctgttatgtccccttatattcgagcagtactcctcccgcaatcgatggcgaagtattgttaattaattacgctcataattcaattcaacttttgcaagcgctacattgacggggtttattccaacaatttgcctgtccccgatattccaaatgttcacaccattacgatcagtccgttcagcggaggagcaatgatcgcgccacgtgaccaaagcgctttcgactggcagatgataatgggacagcagagaataaatgtgaatttgaggcttttaattgtaattgattttaaagttaacgggtccgggcttttatgttacgcaattggctctattgcagtttacccgaccctaaacttaaaatataatataaaaaaatttatatttataattttggatatggttagtaatttattgtgctttttcaatggtcatgaaatttcccaggtaaacatcagaaatgtcatgcgcggtgcacagtcacttttcccacaatcattggaaagactcggccggctttaccgagcggggtattacgacgcaatgctttaccttctccgcaagggctgtttcgaaagagaagttggaagtgaaatttgattctattttttgtattttctggtgtttaattgagagaacattgttagctcaaatgttacatatttttcaactattgttcattcaaatggttatttattaatttctcgacaataatggatgtttgtttgtctcttatagtaccaacatttcaataacattactcactccgtttcttcgaaattctttcctaaggacgccttttgcttcggtaagttttcatctgtcgaatggctaatgttttgttgagttcagattgttattttgaccatgggcatcaaggatttgtcaaaggtcattgcggatcattcgccgttcgccattaaaaccaacgaaatgaaagcgtatttcggacggcgcatcgcaatcgacgcgtcgatgagtctttaccagtttttgatagcaattcggcaggatggtgctcaattgacaacggaggagggagaaactacgaggttttacggaaaaatgccattgttagtgccacaattacatcgactttagtcatctcaatggcattttttaccgcaccatacgaatgatggacaacggaattcggcccatttatgtcttcgatgggaaaccaccggagcttaaggtcaaccattgagcaaacgttttgccatttcgtgttttcagtcaatcgaattggacaagcgaatggaacggagggcggaggcggagaagcagcacttggaggccacagagaggggcgacaaggcggacattgaccggtttggacgtcggctggtcaaagtacaacaataaattgcgcacggcatggtaacatttcccttaaaaggtgaccaaggagcaaagcgacgaatgcaaacatttgctttctctgatgggcgtgccggtggtggaggcgccttgcgaggtgaattaatgattataggttcaaaacttaatggaattgccaggccgaggcacaatgtgccgaactcgtacgagcgggaaaagcgtacgccactgccaccgaagacatggacgcattgacttttggttcgaaaattctggtccgccacatgacattcagcgaagcgaagaaaatgccaataaaggcaagtaaagttgatttggtgagttagttataataagacgcttttctttgaggagttctctttggaacgcgctctgaaggactgggagataagccacgacgaattcgtggatttgtgcattttgctgggctgcgattattgcgcgacaatcaaagaaattggcccgaaaaaggcgttcgaactcatcaaaaagtacaaaagtattgagacaattctcgagagcattgaccaaaaggtgtgatgacacaacgcgttaagggggatggtaaaccggtaacaatttcagaagtacgcaccacccgacaattggttgtacaaagaagcgcgacaactttttttgcggccggacactacgccaggagaacaattcgaagtatgaacaattgcaatatagccaataattaatggaaattcttccgaattggtttctttttatccgttaagttcacttgggctgagcctaaagtgccggaattggtggactatttgtgtggtcagaagggatttaagtgcgttttttggctccctttctttcactttcaatgaatttccctttttagcgaggatcgcatccgatcggcgcttgaccgactacaaaaaagtcgaaaaatggcacttcaagggcgaattgattccttctttaaaccgcaagggacagcaaataaagcgatcacagaagagacaaaaaagaaacggaaggcggaggaggaagagaagacgacgacgaataagaagaagagcacagtgaagaagacaaagaaaaaatgaagggacattctgaagaaaggggggggggaggagagaggggttggc

SEQ ID NO: 16507 - DNA, 3566 bp, Heterodera glycines
ggtcgcaaaaaaaatgcattttcccttacgttttaatgcccatttgtcttctttttttgagattcaatattttcaattgaaaagtagcacctttgtacaaagatttataaaatggtttttcatttcacaaaagttggtattttcgtcagatttttaatgttttcaatttcttcatttttggatttattgtacgaaattcctgtaaaaaatttttcatcttcataaaaatttctatctttattagttctttttcgattttctcctgaaagtcgttgaatacttttaatttttgaaattttcttattaaagaattaagattttttattgaaaagtttcaaacataaatgaagttttaaaaaaattggggcgggggaaagaactgtgggaaaacttacaattagtccacccggctttttcgtcatagtcaaaactcaacagaaaagaattgaatacaaaactacgagttttcgataagtacaaattttgactggggtttttaggtgtttaaaatcgtaaaaaggcacttaaataattgctgaacaataccaaaataggtaaaagaaaaagtaattccagctctgatagacaaaaaaataaagcttttgaaaaagttttaattttgccattggcgggaaattatgttaaatttaagaaatattttagaaattctctacaaatgaatgagacagtgttatgccctcttttcatccatcccataatcccttgggattcctctgtttcccatttcttttgcaatttcctcattttatcgacccaaaactctgttttctgtgtttccaatttgatttaaatcccaaatcttcgatttttttaccctttaacttttataaaaacagcattttttattcaatgtcttttaattcgctaagtttccaagtcacgcgattgcgtgcttttttatcgaatgcaaaactttgcaactaaaatggatgaataccacaattgcacataaatatatatttttagcaatttcttttttaatgattatccttccaattgaccggcatttccattgtcctcctctcttttgtctttcattgcccattgttttctttcatatgccgaccaatctgtgctgaaatatgacacaattccctcccttactccattttaaatcctctgctgaacggccatcggtctcaatttgttgagtctaattacccccccccccccatttgtcaaattaacctttccgtggagtgtgccattctgattattttctgtttctcgtttatgccattttccttacaaattactctttctattcctttcacctttttgtgttatattaaatcttaaatatgttttctactgttatatttgctcacacttttgcctttgcaatgactccatatttgccatttaatgccaagtgcaaataaggccacaatgatttttgctcaaatactcttgaaaatgtgttgtccgtttaggaatttattcgggtgaattcgcaaatgtcgtccctccaaacgcccaatcaaagtctttactttgccaattgtgccttttgtaccatcgcatttcctttcattttccgtcacatcaatcaaaccggacagaaccacaaaaacggggggaacacagggaatttttgttgcccaaatgcctccattcgctgctgttgttaatcctctctctgtgttggtccacccgaccccccctccccttcccatgatgaatgtggcggggcggggagcgaggcaaaaggcatgcaaaatggtcgatggacgaccgaccggagatggtcgacgcatgaccaaaaggggttggaggcggcggtggtattccatgggatggaagtgggagatcatctcttggggcggcggataaatttctcctctcatcagcacatctctcccctcagaccattcgcttgaggaaagtaatttacttggaggtcgaaatgactcactttgaattaaatggcaaaacaaactcaacgcatcacttaagcagcacttatttgtaattatttaaaactgcaattctgtatgattgctaaactgaataagccgagccctaaatggtctttggccagattttgaatttgaccacaactctgacattctcctgttttcaccatcctcagaattgtgctaatggaagtaaaaaaacaaaaacaaaccattaattgattttcgtttggttaaattacatttttagccagcagcacgtatccgcctccgatcattcagtatggtcatcaaaaccagacacttatgttcagtgacatggcaattttgccctgtcaggcaacggggcgagtgcccgtccgaatcacttggttgagggatgggaaagagttggacttggacgcaatgcaacacaaagggaggtaccggcagttgccggtgggcacattgcaaataacggatttgaagtgagcaaagccttctttttatgtgtaaacaaatgcccgctcgttgcaggaaggaggacagcggcgtgtacacgtgcagagcgagcaacgaagacggcgaagcgacttggaccgcttctttggttgcggaagggcacaccaaccaagacactgtttttcaccggatgcccgatgctgctgctctcccctcatcacctgggcaacccaaagtgctgaatgtgactgaaaacagcattgaattggagtgggcttccccggaacggcatggctcttctccaattactgactaccttcttcagtactggagtcctgaattgggagaggtggggtattataatgataatgagcgatttattttaaatttcgttgtagtcttggcgaaatatattggatgttgtggcaaagtcccgttttcgcatcactggtcttcagcccgaacattcttatgtttttgttatccgagcggagaactcaaaaggcattggacttccttcgtctatgagcgaaattgtctcaacaaaaaaatcgaccgaaattgaagagggcaattatcgaagtcagcgaatgaatcgacttttggacttggaaacggctcgtcaaagactttcttcggaacaattggtcaaactgttagaagtgcgtgcattaaatgcaactaccgttttattagcatggaaacggcagagaaatgtaagtagaaaatttgaaaaccaaaagccaagggcggcgaaatttaattttaaaaatgggattttgaaaaaataacattttttaagaattgtttttcgaatttgcaggaacctctagtccaaggatattatataaaatggcgaggcccgccgcttgcgcaggaccacagttgggtcaatgttaccaatccggagactgatcacgtggtcattaacgggctcaggccgttcaacaactacgagtttttcgtgattccctaccaccaaactgtccaagggatgccgtcaaattcgctcgacgggaccacggctgaatctcgtatactttaattcaaaacagttgcccaattcttttctctcccgtagctcccaacatgcctcccgtctgatggtcggctgagaatgcttaatgtcacattcgcttcgtgtttcatggcgtcctcctcccgctgatgcaatcaatggaaattttg

SEQ ID NO: 16508 - DNA, 2626 bp, Heterodera glycines
catttctctgtcgctatttggaagtgaataaacgaacttttatggactggacaatacacaaatgctcaaattggagccactctttaacaaaaagtcaacaaaaataggaaaataaacaaaggaaaaatttaaaaggaaaaaggtagagtagagcgctttggcgaatacaaattgtcacccgacattcaccgccacccaaggacgtggactgatggagggataaaaagggatcggattttgaaagtgccgtttttggacaaattttcacgtgacaaatttctttttaatttccgtaatgctgtgaaaaaattgcccaatgtgccccaacatatcaaagtccgaagggatatgacccaaagtgagctcaaaatcttatactcccttcggcaacaagcctatcaggccaatattgccgcaggtgagtataagtattttgtggttgacttggagatcagatctctgaaagacccccgcccgctcagaactcgctagggatacgcgagcaaatcaaacaaaaacattgggaatacgggaaagaaaaatccttggatttattgcctattaataaacgcccgatcgataacaaataaaatagctgacttagaacatataacccaaaaatacgatccttttataatcataataaatgagacctggttaaactccagaaacacagtagaatcagaatttacaataaataatcaatatcaaataatctttgcaagccgaaatgataaaaagggcggaggatcggcaattttattaaaatcaaacatcccttatcagacacttttctctgggacaaaattccaaagcgaaattattcacataaaattactttttaaaaaacctattcaaattataaatgtatatcgtccaccaaattgtacagttcagaatactaaaaagctactcaaattcatttcggaccaaagcgattctgaaaataccatattctgtggtgattttaatatcccaaatatattatgggatgaaaataaagtaaaaaaaataaatgatccggcgtctaattctctaattgagtttatgcaccaaagacaattgatacagcatgttaaggaaccaaccagagaaaaagcaattttagatttagtaattactagtgaattagaattaattaatgaattgacagttctagaaaatttttcaacttccgatcacaaaatggttggatttaaaataaaagtaaaattcagtcataaaaatcctaaaatttacagaagagatttaaaaaatattaatttttcgaaattaagtcaggcgttacttgaaaatcgaattgatttatcaataaactcagtgttcaccgttgaacagaaatataaagaatttttaaataaagttctgaaattatatgatatttttatacccaataggcctctaaaatcgataataaaacaatcgtatcctcaaaaaataagagacttattttcagagaaattacgtttgcataagcttgtaaaaaaattccctgaaaaaagtgatctcattttaaattacaaaattatttctagggaaatgaaaaaacaattgtacaaattaagaaatgaacaagagtcaaaaattatttcccaggagcaaaattcagttaacaaatttattcgaaataagttatcaaaagttaatgaaattcctacgttaattgataatgctggaaatatattttccagcaatgttcaaaaatgtaagatattagcagaaatatttcaaaagtcttttttaagaaaatcaattgttaatggtccacaaactcaatcaacacagaataagattaaactttctgacattgaattgaatgcgggaataatttggaatatattaagaagacttccccggcgtaattccacttcaccggataatgttccttacattttattaaaaaattgtgcagaaccaattacaaaaataatagcagatatatttaggctaattttggattccggtcaaattccggaaatatggcgaacatcattggtggtaccaattttcaaaaaaggcgaaaaaactgatccattaaattacaggccggtgtcattaaccagcactgtctgtagagtttttgaacgaattttaagtagcaaaattttagaatttctgaacagtacaagattctttgataaagaacaatttgggtttttaaaaaatagatcgactacaacccaaatattaaaaatgatggacgatatatataattctatacaaaagaatcaacaaattgacataatctatattgattttgtcaaggcgtttgattctgttccctaacttattactaaaaaatcaaagttttaaggttaaaattggcgaagaattgtcagaaagtttcagaatattttcaggagtgccccagggaagtgtcttagggccattactctttttaatttttataaatgatctgccgtcctttattgcaaatgaagcatcatcagttggcataaaaatgtatgccgatgatgctatattatattatacacatgaaaacgatgaccattcgaatcagttggataaagcaattgaggctatggaaaaatggtcaaaaataaatgagttatcatatttcaactgataaatgttctgttttatatgtaggggaaaataatatgaa

SEQ ID NO: 16509 - DNA, 2898 bp, Heterodera glycines
  unsure (1)..(2898): unsure at all n locations
acctaacaaattcccaggtctcaacgaacgcgccgtccttctgaggaaggaggaggaacgacttccaaaggagacagcctttcggacaagccaaaggacaagaaagaagcaacatcaaaaggcggcagcagcaccaccaataacgcgccgaatgccatggtagatgaagcaacttcaaaaatgcggcagagcatcaataacctaacaaattcccaggtctcaacgaacacgcctgctcaaagaggagcaatgacttccaaaggcgacagcaaaacggacaagccaaaggacaagaaagaagcaacatcaaaaggcggcagcagcagcaccaagaacgcgccgaatgccatggtagatgaagcaacttcaaaaggcggcagagcatcaataacctaacaaattcccaggtctcaacgaacgcgccgagtattgccaaaggaggaggaacgacttcaaaggcgacagcaaaacggacaagccaaaggacaagaaagaagcaacatcaaaaggcggcagcagcaccaccaataacgcgccgaatgcccaggtagatgaagcaacttcaaaaggcggcagagcatcaataacccaacaaatttccaggtcacagcgaacgcgcctgcccaaggagaaggaccatcttctgaaggcggcagcaccaagaagccaatcacagacaaatcaaattatatgagtcaaccataaactttcttggaaaatgatcctgtatttatgttatttgtggtgataagtttataattgatccgtattttatgttattgtntgatcattctatgattcgatccgttatttatgtatttattgtttcattgttgattgatccccgtattatgtatgtntttattcactcatatacgaaatataaaaccccaacctcagggtttgtcagatctgaggattttatcctcattttgtggctttattgatatgtcaatgagggatttttttgaaaaatgatgattttttgtggcttttcgaggcctgtgggaaaaatcctcagaatcttttaaattttgataaattggcataatgaaccaaaagactgtattttattaatttgaatgctgtttgggtatttgggattgaaaaattgaagattgaacccgattttggacataggcgccaatgtcgggacgcaaatgtgggataacctttaaaatataacatttcatgttcgcttaaaaaatttatcaattttttaaaaataaacaattagcataataataagtgatcaaaacagcaagatggactttttgcttgcaattagaactctcgtagaagccaattctgaaaagtgcgttttaaaaaaacatgagggaatatccatccgttcctctggatctcgatcacccactttgatgatgtgatgagcaattgcgccctggggcggaatgtatcgcagttggattctcgtctcgggatcctttccactttctgtttaaaaatattttaaaacgtcatttctcatgtccaagatggaatatttggcacgcccatccgatcaaattgaaactgtaatttaattgtttaaccccaacaaccgctaagatggcggtacagcttgatcagcagcggatcttcttcagaacggcgcaatgcttccgcaacttcttgtcgactaaaccatttggcgtattccaactcggaaatgctcgcttggatcttcaacaaaaaaaaacagtggcaatatgttgcggaaaataataatagaaaaaaattaaaatttgttcgtaaaacttccaagaaaaaagccccaaaaatgcttccacatgtttttacacaacacacacttcgtcacccatgttagcagtcgcgacaaatggaaccatcagcgacccggcgggcaatggccacgtctgcgaaccgtccagcggccgaacatcccaacactcaatgccaacttcttcggcgacctctcgtcggactgtttggtcaagacgctcgcccggctgaaaagaaaagccaaatatagcattcatcaacaacaagaagagacatgatgaatttaaaaaaaacgacagggtaaattattggccggtgatcccatgaaaatcccatggagccccgatcatatggttctataatcttaatcgaaggattacattaatattataatttttcaattttgtaatttacaagttggaaaaaatcatttttaaaatgatgcccccaccgaccgaacaaaaaccggcaatgcacgtgtacacttggccagcactgcgtttatgcctcaccaacagagtgtgctcatttgactcgtcacgaagcaaagtgatcgccacgggcgaaatctaaaatttaggaccaattttgcaataaaaattatttttcaaaattctttcaaaacaaatttctttcaaattttataataatcgagaaatttttttctattttttccataaaataaatatacaaatttaaaaaaattaggggggggggtgcaccgcctgcccacaggggacaaaaactatttttctgtttaaattttgggaccattttttaaaaaccaattcagcaaaaaaaaaaaaaaacatgacgacacttattgacactgcgggataaaagaaatttccggtttcaaaaaatcacaaaattttcgattttttttaaaggcaaccccacatttgggtagaaatcttgctggcaatgtgtgcacgttgcggacgctttggacgccctcattcggagcagctgtgcgcactggggacagtgcaaaaagaggcggtaccaacgcgtgatgatgatacactgaagcaagcaagcaaatacaataagtacatttttggtatgggaaatttaatgtaaaaaaaattcaagggaaattgaaaagggtcctcccgcccgaatcatatttagaataaggaaattttgtaaaaa

SEQ ID NO: 16510 - DNA, 2960 bp, Heterodera glycines
cgtccagtcggccaaacacaatgccataaaaatgaaacctaaatgccacacaaatgccaacgaaatggcgccaaattcaaaattggccaacctttggccctccaccgattgtgtgcatcgcatttgtccatttctgttcctgttgctgttcgccctgttactgctccaacaacacatgcacacggaacagttggagcagcgactgtcccggttggaacagcggtgcaaaaatgttgttgaactgctcgaagaaccggtaaattgattgaaatattattttgcttttttaatacaggggaggggtaactgggtgccgtaaaaattcccgaaaattctgcctctaaaatttgcagattaggaaactgctcggttaaaaaaaatatagactttaggaagatatttatacttaattaaaggatttttatgaaaaatctataattagtgggatgccataacatttgggccaaattttaaatttctctaggtgctgaaaaagcattaactaattaatttgtttttatatgaaattatatttttacattaaattttaaattgtgtaaaaaattttaaaaatagggttttctaaaaataaaattaaaatagaattttgaaaaaatttgatctactttttgagatccctcaggaaaaaaccaaaaaaaaaaaaaaaaaaatcaaataattcaataattaattaccaactagagacgcgatttgactttttgccattgtaaaaaaaatttcttgtcaagtttttaataattaaaattaataaaatttgaataataatttttttttggtccaaataatttaatttaattttaaatatatttgttttttaattactttaaattatatttttaattattttccttctttttttattatttaattaatccaattaaatttggcttgtattttgttttgttttttttgttaattggtaatgtatttcattaatcggcacaaaaaaaggtgccaattaaatttctatttggcccccgcggggattaaccggtgtcagaaaatgggcacggatttgcataatcggaaattggaggttttttgggggataatctccccgttgcaaaatccattttttctgctggtgaatgagatgaatgaatggggaacgcaaaagaaaatgagaaaattgagaatctggaatggaaaatgtaaattttttaaaaattaattattttaattaataaaaaaacattttagatttaatttttaataattttttaaaaataacattttcatgtgactgaatatttataagcatgatttgttatttgttaatgaattgtttggtttttcaacgaatggttttgtttaatataaaaatccgtttatctttgtttaccttttaaattcacttcaatttattatttattaaaatattttatgttttaacattcattttttatgtaaaaatgtttttttttatataaaaaagtttcaaataaatgttttttatataaatggtttaattttactaatttcactaatgctactaggtaaaaaatttttaatgaaatttttgacaaaaaaatcctttgattccaattttttatctaattaatgaattaattacatatttatttaaatttttttggaaattgatatttcattaataaaaatagaaaaaaactgctttatccgtagaattcaaattatacacatattttgtgcaaaatgtaaattgccctactttatccctccgacccaatcaatttttgtctgtttgtttatcccatcccaagccatccttatcctctcatttttgtgtcccccctccccattgtgtcagtacaaaaaaaaattttttgctttgcctttggcaatccttttttaaataactaattaattgcatagagactcatcaaaaaatggtctgagatttttggccccaaaactattcccgattttcaattgaccattattttgccaatgctttttcttcaataaatttctctctctgaaaacggtaatttgaaatggtttaaagccttattaaacccgtggacacaacaaaaacattagaactcattagaattttacaaattaattgccgattaaattttagaatggctttttaattgtttaaaaacttttggcttacattttgtaaaattataatttatttattttttttttattacatttttaaattgtattaattttagtcggatgacgtcttcaccattgaaaatgctcaacagttgaggcgaacattgcgttcactgtacgacgatcggagacggcaaagggacggcggcggcacacggcaccaccaaaatcggcaccaccaccacaatcagcagcagaggacagcggcggcaacaacaacggcatgcatgtgccctcatggtaattatggcaattaaaatattggctaaatgatttcagggggtgtggggaactcagctgcccatcggaaataaaaaatgaatttgttttttaaatgtgtgcgttttttgaaaaaatttttgactcaaaaagtttatgcgactaattacaattaaataaatttaaaaaataacaaataaaacaatgtttaaatatgggaaaaggttttttagatcaagcaattttttatgaaaattacgaaaaaatgaaattgtcaaaagattcatgttgtatatattgtgtattatttaaatatttttctcatttgtcaatgcttaatttcaatttcgccttacctttcacttttacaacatttatttcacaggcattattccatggttttaattctttcccccattttccgcttttttaaacatttcctccaaaaattcttcgaattttttttatttttatcgggatatattttcatttgtttgtcattcattcgctatgtcaattgccaagtgtaaaatcatttaatgaattggcactttctgtctgcaatcataatttgtcaactatttaagaattaatttatttaaaaatatttt

SEQ ID NO: 16511 - DNA, 2932 bp, Heterodera glycines
ttttttgttttttggattggaaatcaacctttttcaccccccccgccctcccctccactattttcttgagccgaagccgccttcttcaactttttgtaaaaatagctaaaaaaaaaaggataatttttgtgttcgggaaatccttaatctcggttttattgggtctctctttcggttttgattcttggggtcaagtctcagtaagttctcggtcattaacggcacttgtactgatatggcttgctctcaaatatatttatataaaaaaaatcctttgaatcatcttcagcatatatcagggtatattactcgtctggtgtctctcgtaatctcgtattctcgtgtttttagaccgtctcgttctcgtgtcttgtattttggaacgagacacgagatttttatgcattggtaagtgggggcgggggggggggggggtgagagaaaatattttctcatacgtaaagaatttttttgtgttgaatttacatggaattttggtcttcccttgagaaaattataaaaattttcaatctttacacaatcacgactcttttaacaagaaatatgaaaaaaatattacaatatagaatatatatatatataattttttgttcatttctgccgatttgcaccaaaattattttgattttaaagtatttttatcataaaatagtgctttttattgataaatattaatcgagaaatgccgtatttttgtgtcatttctcgttggccaatttgtcaaaatattcgggccttgcgaattataaatattttattttttctttctaaaattattgttactaccgaattagccaggctctaatgcagtttacgcgtccaatcgacttttaggcgtccaatcaatgaccaacctcggtttcttaatttttacttaaattataaaatttataaaatgtttgtttttttattttatttatgtttattaatttattttagtgtttttttctttggaaaaatggacgaataaaaaaaataaacataacaaaacattaccatcatcatcatgatttgtgcagaatcagccaataatgggaaataatcatatgatagtgcccaaacagtaattaattcataatttattgaattttattggtgttttatgaatttcatcatcattatcttgtaaatcatccttacggaaaataatcttgtgattttttgcattttttatttttatgattaaaaataattaaatgggccggaaattgtttgaaattgcaaaattagttgttaaaatttgcatcatccacacttaatccatgacgaaattagtaagggcaaacaaataaaatggcatatttaagctgagaattttgtaataattttaacttaatgaaattcaaaaaaactaataattatttttttttaattttaaaataaaatttttaaaattcagaccattcatttaattataagaaaatattacagcaaaacattttatgattttgacaatatttatttccataagcataaataatcactatttagcaaaatcaagtttaaaataaataaataattcaattaataatttaattgttcaccttaaatgtcaacattttacattccttcaattctcttttacggatttatttggcattttgccaatattttgctttgttcggcaccaaatccaatgaacaattttgcaattaataaaggttatgaaaatgtgatttttataaattaaatttctaatttaaaggctcaccattttttggccaatcgccaaaatttcactttcaattaaaatcggaggaacaaaaaaatcattcaaaaacgatgtcaatttcacgaattgcatcatcccattcttcaatagaaattggtaaatttaaatgaaaaactaaaaaataaattatttttctaaaaattagcgcctaaaaagtcggtcgaagcaattgaaaatcaaataataaaacgaaaatcagaaataaatttggaaaatgaattggatggacaaagcgccacaaattcaaacatttcgccaaatttcaaatgtcctctcaacgaatatttggccgctgttgttgattataacggcttttatttcaatgttccggcgaaaacaatcgcaaaacttgcaatgaatttgatttttgctgttctgtcatcccaaaattggtccgccaaacagcaacagaattctgatcagccaatttttgatggcattttgacatttgaccatttttcggtgattcgtcaaaatgaatttgaatttggcgccgaagaattggcgggaaatttgaaaattgaatttaacaaaatggtggaaatggtcaaagacccacgggaaaggacacttccgccagaacagagaccaaaacagcagataatttggctcaaagatgtgctgtttatgagtccagagcaaatcaaagtttgtcattaattgcttaattacccatttaattacccaattaaataaatatttattaaataattcaggataaaagaagcacaacaaccggcaaagacttggtgtggttcgtcggtttgctgctctaccgaatgttgttcaacaacaaacaccccatggacaattgggagccaaagcgccgtttggacatggaattcatggccaagatgggcttctccaagttgaagcagttcaattgcatgtacaaaacggacgattttgtgacgggagactttggcatcgttccactgaagccgaaaagtcggtggatttggatgccggagagtgggcgagacgaaactggggaaatggcactggtggaggaacggattggcatggaacaggtggctgccaattaaaatgtctaaatggtgtaattaattaatgattattatttaggattatatcggtaaattgagaagcattgttagtgaatttgtgcagaacaatcaaaaatgcatcaattattaagatttgctggtgatgaagaga

SEQ ID NO: 16512 - DNA, 1641 bp, Heterodera glycines
aacaacgattggaagcgagcaacttttcagtgttgcgcgtgatgtgtttgactatcgtcgatctagtttaaaggctgaacatgctgaaatgctcatttttttgaacaaatcaattccgaaaattcagttttattgatttatcactttgattttttattttttctttaataaacgtattgccgctcaaaatttgtgcattaaaaatatttttgtgagttttaattaaattttcgaattactcccgctcccgcccgggactcccgttaaaaatagacgggatttgaacgggatcgggatttttacgggaatcccgttcgggactcccgtcccggaaaattttgaactcccgatcccgctcccggaaatttttttttaccgggctctaatatcaacaatgttggatttagatgactcagaaaaaatttttagtggaaaaacgagctggcaccgaaacgaagtggaccccatttcacggtcctaataagtttcaaaaatgggtttaagtgcaaaaaaactccaacattgtataaaaatggcttgctatctatcgaatgtatgaatttctccttgaaaattgtggcaattaattttcgggattttgacgcgggatttacgacacacaaaattagcaattagcaccggcaacattaagtgccgatttgctgctgttcttttctcttttcagcttcattctctcctcctttttgcgccgaatttttccttttcctctctttctcttccgtctctcctccttcctcaatgctatttccctcctcttcccttgtttctccatttttgctgttgtccatcttcatctcgtttcccatcaaaatttgctgttcttgttgtactgcttgaacttcttggttttgctgctgttgttgggtaatcatcggttttactggtcccataaaaaagaggtaaaaaagagattttgagcgattttgaggtgctcttgggggtttagggggcgatgaacacgaatatcgacatccatatcgacctatttcgaaacccggacccgaattcgagcaatttttttttttgcatttttcactcggaatttgcgtcaaccttctttattgtatcgtaaaattaccaattttataatatgaaaaaataatttctcaaaagattttataagctttagttgattcttattttaaggagttgctaattagtttctccggtttttttatttagacatatgcttaatttttacaaaaattcacttttaaatgattactttcagcctcagaaaagcataaatctgatccattcatttttcgcttttcactttttggttgaggattaggttgcttttcccaaagtgccgttgtgcgagcaaagaaaatgccgtccgttcctattcactggcagagaagggcattaagccactcaaattaacccaaggaaaatcaaatggacagattaatcaatggcaattaatctgagagaagagaaccaaaatgggtcaagtgctgagtagagacgaagcgagaataccctacttctcgagcctcggggatgagtctctgattaagacaaaacattctattttttggaaatgatttcaccccacctcagggctatacccctacactcataattttgtcacttcggcatagcaccaaaatttta

SEQ ID NO: 16513 - DNA, 1323 bp, Heterodera glycines
  unsure (1)..(1323): unsure at all n locations
atttatatatantttgagaggtttttcttcataaaatgcatttgatcaatgatttgaattatatcggtcggtcattctcaattaattaattcatttcttcttctgcggctgatcactgtatttgttcttttgtccgtcactcattttgtcagcagacgacgcccctttttcgctgctttgtcctgcttcgtcttcttcttccggtggcggagacaatggccttaattatgcgaaatttgaattatttaacaaaactaaatgttttttttaattgctcacccaatgcaatcagtactgaaaagccaaatggacagacacattgttaaaattgttgtcccaatttccgtcttcccaatgaaccgccgcggtctcccaaataattttgcatcgtttcattatccaacttttgtccaattcattttcgttttctttggtcaatgtcagcttttggaaaacaacaatcagtgatttgccaaaaatgttggaacacaccagggatggcactgaattccgatttccgaaatttttgataaaattcggaatttttcagaaattttcgatttataacttttttggggtcaggtttcagaaaataactcagaatgccatccacagaccgggtacacccctaaaacgtcgccgtctcgtataaaaactaattttctgaatttccagataaataaaaaacgacttttttacatttccttgaattttcttaataatttttttcgaatttatctattttttttgatttaggctagataactaaattttaaataattttttaaattaaaataaaaatttgcggctacgttttgtcccccccccccccccccggaccacacctccttgaaactgttgacccaatagaagtccttcaaatttctgcaaaaacgaaatcgcttgggttggccagcttttctcggagagtgcaaccatttggacaatgcttggccagcagaaattgttgaatttggcccatcaaaatcagcatcaatcgcagcgggcaacagatcaaatgaatcgattgaattcaattggttgagatcagtgagaattgtcggtgaaatgagactacgcaaattgtccaaatgatcaccacaggaaaagcccaaacagcgaatgtttgtcgaaaaaatgggccaaatttcacgaacaaaaacatccaaaattggctgctcttccatggtgtgtgatgatggaatccgcaagtgtaaataggtgcctcttttgtcgaaaatttgatgatttgaacgaagaaaagcgatgacggagtgatcgatgtacctaaaaatgggataaatgcttttattgccataaatc

SEQ ID NO: 16514 - DNA, 1291 bp, Heterodera glycines
tgattaattgaatgtttgaacaattttcatgcattctttgaccttacattttgggtgaccataaaaatataatacatactattaattccttcatattatttttttataattagatagcccaaagatttctctattatgagttaaaattcaaaaaattttattgaatttaaaaaaaaagttatggtcaaaaatgttgagtctaaatttttcgagctttttgcttacaactttttgtaaatttttgcgaaatttttaaaaaacttataaataacataatagaggataagcagaactactttccatttttaaatttaataaacttgattaagtttaagctaagttagcaaataaaatttaaataataattaaatttaaagtagcagcagctcacatttttgtaaaacatttttccagcaaagggcaaagcgggagaagtacaagaagtacggtagtaccaccacgcgcctccccccaccaaaaaaaaaaatccagcgccccaaaaaagagaaaattggataaagagtggaaaatttgttatattcagaaaaggaaaagcacgtctatcattggcaaacttgcaaaaatgaaaaatcacgtagccagacaaattgccaagaagttggttacgatcgtgcaaaaagagcttttaacattggtggagattggaaatgcaaatgtgcacaaaccaaaaccgacaaagggaagaacattggtaaaataatttattaaaaagtgccagaaattttgataaaattcaaccaaatttggggggtgggggcggcatcggcactttgcaatgacagccaaacaagcagggcacaggcactaaccaggcggtgccataacaactcgtacaaaaggctactcgtacataggcttaggctaagcctttgctttcggcttaggcttaggcctaagcttagtatcatttaggcttattttattgtacgagttgcttttttacgggttgctattgactcaacggaggaaagatttttttaaataccttttttttctaaaaccaattttgttagaatctgcaaaatgtaaaattctccccagcggcacctaacggtatcgcagaactaaaaaaaatccataaatttttttcaactgtaagtgatcactgatcatttttggcgaaaaacggtgctaggacgaagtccgaatatggcaacttattaaatttaattaaaaaataataatattttgtaaaaagttaattcttcatttttatattttaaaaagttggatacactttatctttttaatctgggaatttatttttaaa

SEQ ID NO: 16515 - DNA, 2353 bp, Heterodera glycines
catttaaattattttatttacgttatttccctctctctgtctcccgcactatttctctcattttattgtgtctgtgctgcctttgtaaggtcagacacatctttcctccccgactttgtgacccccgctcatttccaacattcattctgtcttcctgttaatttcccactttttcctccaattgtcctccgccctgatttgaagcaattttgcaaaatgtccttactttggacccaaaaatcttattttttggccttgatgttcttattttgaaaaattttcgatccgagccctgattttcagaccacttcgaactgtattcgaaaaacgggtcaaaaattgcacttttttgcgaggatcttttttttacgtttttttcacaccttaaaatgggtcaaatcaaaaaacaaatatgtttgggcacatctacaaactcttggctttctaatgacaccagggttgttttggtccgggtccggaaagtgccctgaaaagggaggacaagcacttttggtcggcatttcttccaaaaaaaaaggaaaagggaattaaaattatgattcatttccaaaaatataagccttctccctaattaaaccatcttttattattttatgcattttttattgttaataaagttttcatctcaactttttttgcccttttcccacctctttctttccccgcagttttgcccattttagcggctatagcagaatttagcgttcatttgttcatatttttctaaattcattataaatttttagttaaatttaaaatgtcatcattaaacactttttcatcagcggacgaattttctcctctccaacgtaaataattaaaacacaataataaacatttttttaatttcaaatttgttaaaattaattttttaataatttcatttttagcaatttttccaaatctgagcacatcggaggaaatgagtgttctgattgcccgaattgctgagctgaatcgagccaaaacaatggagccatctgttgccagttttgaagtgtttggacaagacggatacggtagggaattttgtataattgagtggatacagtatgaaaattatacaataaaagaaatggttttgaaattttaaaatcaaagaaattattttgaaatttattaataaaaaagattattttgaaatttattaataaaagaaagcgaaaaatttggccctattgctgcagttcacaggacaataataaaagaaatggcctaaaattatttgaacacttgaaactatagcattttatagaagcaccacccaaattaacattctttgtatcatttatagctccaagagtccttttattctgtaaaattcataaaatttgttttgttcaaaaaaagtaatggccaaaaatatttagaaaataacttttttatttaaaatagagccaaaattattattttaaattttatttcataaattttattttgaggaatgaatgatgatcagttcagtctggaagaagaagaaggaaaagaacagcaagaagacaggaaaactccgacaaaagatggtaatatacaaatattagaagacattttcagaataatttgctaacttaacgacaatttaaaaaataattgaaaattgcttcaaatttcagtttcggaagatcatttgaaagcaattttggagagaattggtgaattggagaagcagcaacaacagcagacaaaaggcgagggcaatttaacgaaaatgaaaaaatatttaatcgaattaaatgtttccattttaaatttaaaaattaatccgatttttaagctactgcggggcaattgtcaaagattttggaaaaaattggtgaaatggaaaaacagaacgaaaacacggacaaaggcgagggaattttagcgaagaataaattatcacttattaaaaattctttttttttgaataagtttcttatgaattaagaatttcatttaaataaataaataattaattgttttctattttaagccgctgaggaacggttcttacaatcgcaaaatgatcagaagaaaattttggaaaaagtcagtgaattggagaagcagcaacaacagcagacaaaaggcgaggagaaattaacgaaaatgaaaaaatatttaatcgaattaaatgtttccattttaaatttaaaaattaatccgatttttaagctactgcggggcaattgtcaaagattttggaaaaaattggtgaaatggaaaaacagaacgaaaacacggacaaaggcgagggaattttagcgaagaataaattatcacttattaaaaattcttttttttaaataagtttcttatgaattaagaatttcatttaaataaattataacat

SEQ ID NO: 16516 - DNA, 1229 bp, Heterodera glycines
aaaaaaagtccccatttgcggttaaaaagggcgagaaatgtcaatgggagcaatattttcggcatgtagtgctggaatttcagaattctcgaaaactggcatctttgtgagaactgaaaacggtacgggagaattacaaaataagtccccatttgcgcttaaaagggcgagaaatgtcaattggagcaatattttcggcatgtagtgctggaatttcagaattctcgaaaactggcatctttgtgagaactgaaaacggtacgggagaattacaaaataagtccccatttgcgcttaaaagggcgagaaatgtcaattggagcaatattttcggcatgtagtgctggaatttcagaattctcgaaaactggcatctttgtgagaattgaaaacggtacgggagaattacaaaataagtccccatttgcgcttaaaagggcgagaaatgtcaattggagcaatattttcggcatgtagtgctggaatttcaaaattctcgaaaactggcatctttgtgagaattgaaaacggtacgggagaattacaaaataagtccccatttgcgcttaaaagggcgagaaatgtcaattggagcaatattttcggcatgtagtgctggaatttcagaattctcgaaaactggcatctttgtgagaattgaaaacggtacgggagaattacaaaataagtccccatttgcgcttaaaagggcgagaaatgtcaattggagcaatattttcggcatgtagtgctggaatttcaaaattctcgaaaactggcatctttgtgagaattgaaaacggtacgggagaattacaaaataagtccccatttgcgcttaaaagggcgagaaatgtcaattggagcaatattttcggcatgtagtgctggaatttcaaaattctcgaaaactggcatctttgtgagaactgaaaacggtacgggagaattacaaaataagtccccatttgcgcttaaaagggcgagaaatgtcaattggagcaatattttcggcatgtagtgctggaatttcaaaattctcgaaaactggcatctttgtgagaattgaaaacggtacgggagaattacaaaataagtccccatttgcgcttaaaagggcgagaaatgtcaattggagcaatattttcggcatgtagtgctggaatttcagaattctcgaaaactggcatcttagtgagaactgaaaacggtacgggagaattacaaaa

SEQ ID NO: 16517 - DNA, 1586 bp, Heterodera glycines
ttttaaggcaaaatttgaattttagcgaagaaaattccgaaaaataagtgaatcttggagagcaagaaaaagatttacgtcaaaaagcattgaaatgcttttgattagaattgtactagtgaaattgctaaaaaatgagatttttgaaaaattaacttatttttgacgcagttttttttttgttgaatttttgttgaatttttggcctttttgagattttggtggttttttgtcgcatatacatgcacatcagggatgtgccgaatcggaatcgtaatcgtaatcggaatcgcaattaatcggattttgggccataatcggaatcggataatcgtaatcggattttgccttgaaatccgattattacacccctaagaattgacctttgaaggaatttttttagcgagaataccaatgaattttgaaaaaaatgttttctgaaacgaatgttttaatcttattttaacataatgactgaaattaaatttttctcacaaagcagtgccggattaattctccccgatataatcaagttttttgttatttagcaaaaatgtcaaagtctttgaagggttgttaatggtgtcagtttaagaacatagcagccaattcacctatttttgaatcccggacccgaattcgaaccaaaagtcgaaattttgaagaaaaaatttgttgggacattaaagcagaaaagaaccatgaatgaattattactaagttgcaattttcctatcaggtgcgttggtcatccaccttccaaatgcttgatcgttttttgcaaaacaaaacagttgttgggcttctgtatgcagaagacatttcgtttccgaatctaagctatcaaaaaaatatttctcagccccagctacatcgactgaaagcgaacggcttttctacaccgctgggttgattgtgacagatctgagaaaacgtttattgcctcagaatgtggacaaacttttatttttatgattttgattatgaataaaattttgggaaaaaattattttaaaaaaatcggaatcgtaatcggaatcgcaattaatcggatttttggccataatcgtaatcggttttaaaaccgtatcggatttttggccataatcggaatcggcgatttaatcggaatcggattttgtctggctcggcacatccctgatatatatgcttgcctttatatgcattaattcttcatcagtaggattatccaaatctattttttacttaaagaatttattattattattttactaaataatgatgcaattattcaaaatggtgaatgatcaccagtaggattattcaaatctattttttacttaatataatttttatataaaattaaatattgtgcaattatttaaatggtgattgctttaatcggttgtgtgggaatttttacattcaaaaagccttttttgcggcggcattttttcaaaaaaactttatatagaataatgatcaggttcttgtggaccttgaccagaaagaacgcattagaaacgaaggagctgataaagtgaaaatttttttcaaaaaattttcaaacgcaacggaagaatggcccgagcataaaagggtta

SEQ ID NO: 16518 - DNA, 1704 bp, Heterodera glycines
gcaacggcgatgcttcgatgaagtcgtaccaatgcgccaactgccccgggcacccaaacggccatccattcgtctacgtgccgaccgcccatcctcgccaatcgttttggacttcgactcaagatcagcaacttaccgatcacgcgcatcaagcctgacaatcgacacgccattcgggaagtcgcaaccgttcaaattggcagacgaggattgaagaaaggaagaagactgatgagcccaccgtctcgcgcggggaatgttcgaattgggcataattttccataattcccccaattctcggccaatcaaacaatttattgcctttcccatgaccctcatttcattcgccccattttcccccgtcatttcattgtaaaattcgccaaaggtgggcctcccactcatttcttcgccccaattctgcacatttctgcaaaatcgtatagttccacgtcgaaatgccactcaccattacgcccgccaatcccattcacatgtatttcattgtcgccaaccgtcaattcatcgatatttaagcccctttcaatcatcccaccttatcagcacaatttatggggaggcaaaaatcatgccaccattgccttctcttctccccccaattcattcgatcattttatgtaaaattgtaaattgtacaatttccccccattcattcattcatttttcgctcatttatatgggcgaggtttaattacccaagtttgagatccggataaatttgttgtttttattcgcttttgaatttgggcacattttgcctatcgaccactcgccaaccccgaccccacgaacaaactttggactagtgtgttcgaagtaaaagttaacctcggacgcccacgccgcgttcgaacaaaatggaccaaacgttttccggcggcgatacgattccacaaaacttaaaaatttggacttttttaaagatttttatgaaaaaaaaatcagttatcaaagcagaaagaaaacacaaaaaattttccggcggcacctatcggcaccgccggacctctcccctcgcccattactcaaatttttttggaaaaagcacgccgcaaaaaattattaaaagtctgatttcttaatccaaatgtactgaatattacgatttgcttatttgtttcccaaattgttaaaatcgataatgggagacgaaaagcataataatttgatactttttgatcgaataattgtaaaaaaaactgatttaaagcaattttgcaaaattttcttatttttgacccggttgttattctacaaattagagtagtacgggaccgggaatttggccaacaccgggactgggacttgccgcgactgaaaagtgggaccgggagctcgtttctcgtccgtgactgggaaccgggaccaaccgggaattttttcaagaaaaaatccaaaaaaaatcaatttttgatttatttcaagcaagaatattacaaaatttatttatttttcttttgttttttattctataacacccaaaattaaagcaagttaaatataatatatatttaatcaatattttcaaatcaaatttattcaattattttcaaaaattaatccttttttttttgactcaaatgatcgaacattgttagaaattcagaattttaatcttagtgtgtaactaacgatttggaaaaccgaaaaaatttgtcaaaggcttcagaaatttcggtattt

SEQ ID NO: 16519 - DNA, 2236 bp, Heterodera glycines
aaagtctaaagttcaaattttcaatttcgcattttttcgtctaaaaaaacattaaatgatgttttatcaaagcaatgatgattttcacttcggtttccgtgtatttaaaacaaagtttgaaaaaaatgtgaaattcgaacatttttactgaaaatgaatttttgactttgtgttcgaatcctggttcggggctcgaattaggccaaaatgaatgccagaaaaggatttcccgccacttaaaggcccaaaaaaatttatatcaagaaaatttgactttttaaatattcggcccgacatttacggccctaaaatatttccagttgaaggatgtgacgcaactctctcgcaatttccacacatttctttgtgaaccgttgcgttttgccgcacttcaaactcctgtagcccttcttcattttggcgaacttggcgtgggaaaacgacatgtagcacgaacaattgcggacgaggcgaagtttgaactggtccgaatggtcgctttggacgacaacttgtgccaacactcaacaacacgccgaaaaatgtatttgtccgccgcttttggtaaaatttggctgtgtttgggattttagcactaacaaataattgcgcaaggggcagaatttttatggactcggtccaaattcggacaaatcaatttttgttataatgaaacttaattgctctcaaaaaaacttttaaattcagaaaaatagctattaatacgggttggtgcattcaaataattaaaaagtttttgcataatctttaattttacttttttgcgattgttgctctttctcgaatttctcatttttgatctaaacatgacttatatgatcttttattgcaaaatttttttgaaaattttttttcaaaaaaatggggggacaaactaagtattaccaaattaccttcaattcatccaaaaaataaacgaaatcgaaaacaaaactagaatttcttttgattaatcttaaaatcttgtttttccaatttcctgaaaaatcctttttctattgcataatttcatttaatttttgttagagaggccccgtttgcccttcccagtgttttgctgattgtacacgttgagaagctgtcgcccatacgatttagcgctgcaattgacgacgcaaaagacaaaaaggcttcctcttcattggcacgtcaacggagaagaaagctgtggaggtgttcgccaacatcgacgagtcattgtgcaggaaaatggagattccactatcacttgaaccgagacaccatcgcctttttgagtaggaattttaatgcaacttgttgaaaaaagcgtattttttccttttaaagaaattcgcgcaacggtgaaccgtactggagcacaggccgttttggacagactgccgtttgcgttcatcagttttacaaggcactcggtgggtgatgaaattcgtgagacttgttcaacttgattgtccctaattcctttagttgaactaatgagtgaggtggaaaagtcatgagacattcccgttttacggagcattggatcgtctgtgagttaataatccatttagttagatatcggtctgccgacttcggcttgccgaagtaggcaagctgaagtcggcaagccgaaatcggcaagccggtcggattttttaaattaattatataatccttttgcaatccctagtaaccattttacacccataaatttcatccaatgatggaagatcgaattcaccgccccccgcttccgcgttgctccatccttgtcctcttcctcctccactccctccacttttcccgccaaactcgtcaaattctcctcttcctcctcctaggcccgctccgttttcccctcctacccaacctccgttttgctctcccccatttcatcttcctcctcctccattcccgtcactctatccgtttcctcctcctccgcttccgccacttcctcctcctaccgctccattcccaccacgctctccgtttcctcctcctccgcttccatcacttcctcctcctccgcttccactctctccgtttcctcctcttgctcctccattcccgccactcccttcgcttcctccccctccgcttccgcttcctcctccgcctcctccgcttcctcctccgcttccgcctcctccgttttgccctccaccgcttcctgcccctcctcctccaccgtctcgtcccccaccaattcctcctccacttcctccccctcctcctccgcttcctcctc

SEQ ID NO: 16520 - DNA, 1668 bp, Heterodera glycines
cactctcctcctctcccactctctcctcttcttcatctctctcctcctcttcctcgctctcctcttcctcgttctgatcatctccaccatcatcgctgttcatcctctctcccgtcctcaaatacttatgccacgcactattcaaactgtataatgcttccttacgctaaaattttttttgttatactaattaaaaataagatttttttataaaactcaaaaagcttgtattttagtgaaaaccctcttttaattgtaaattcaaaatttactatttgaattttttctcaaaaatataaaaatctatataattgatgtgtcaaaaataattaaaaagatggcaacccaccaaaaaacacacatccaataataaccattcgttgcggttgcccaggtgttcttgcatttttggcaaccacggcgtttcgaagttcaaatacgagaagcgcgccaggacgaagcggaaggtcttatggcaggtcggacatcgtcgtcggaaattagtcggctccaactgtttttgtaaaatgttatattttcatgtataatttgagctgggaccagtgtaaatgttgatcggaacaattaatacttgataaacttattttttacatttgaacaacttattattaaatatatttttagaaaattgataaaattccttaataaatgtttaattccttattaaaaacaaaagcataaataataaaaatattttaataatactttaaaatgtgactttacagaatgttataatgcaattttactttttttattaaaatattttttatgcaaatatattcatttattttttattaaactatttaaagtcatgataagtttatctaaataatttcacaattagttttattttacagcttggatttaaaaattattatatttaataagatatacattatgaatttcaatttattattcaaaaataattgtgttgatttcgaatttatattatatatactttaatataacacgtattaaaacctataataaaataattttttttcatgtactatttttaatttcaatatttaaatccatttttatattctgattgtaaaaaaatgatcgcttcgaaagacgttctagatttcatcgcagagatccttgttttatttaggttatactcaattattattttatattcattttttttaaaacaaaaaatacatttgttttttattattttttcatgataattttttacacacattgaattataattaatatttatttatttcaaaaatgcaagtattgaaataaaaaagaacttattaatagcattatttaatttttttattcgtttaattaattatatcatattttgcaattttatatttcgaaaacttttttaaatatttgtaattatattgtgcgttaattttgggtgttattcacatattaaatttctaatggcattgatgtccgtattagcagctttgttaatcaattaaatttatgttgcgcatattttattatttaatgccttttgtttttaaaattaattaacattttattaagaaattttgcattattcaaaaaatatataaaacggaaagtgtgataatgaattatttcgaattctattatttttaaaagaattattacaaacgtgatattattcatttagattcttattgtcagaatgaa

SEQ ID NO: 16521 - DNA, 1314 bp, Heterodera glycines
acaagcttaaatttgtcattgtaagtttttgaaccggcttaaaactcgaaaaatttggcatttctaacttttttaaatgaacagatcctgaattttggcgaaaatctgaaaatccggactccaataattgcctcaaaataatcactacagcgaaaattgacaaacaactttcgtttaaccgagtatcatctttatcaaagtacacatacaaaacatacagacatatacatcgccggtccaaaacgccggttcccgggccgggttgcattttagaaaacgacgcggtctctcaaaaaccggtcaaaccggatttttccaaaaatcaccggttccgttttccgagtccggtaaaaaccgggcccggctcggtctctactaatgatgatcaaacctaatcctgaatttaagcctaaattgcttccgttacatttttttgccattatgtacaacaaaagggcaatgccgcggataatggcacgcggcgtggcggtgaagcagtgcaaattcgacattggcggaggtggtgaatataaatggggatgagagcattcattggtcattattaatagacggaatgcgaacttttgggcacgaattccggaatttttgaaatttggatggcatccagtcccattccttttttgtacgtgccatgcaaccaaccaaaattattagaaaaacaattaaattttgtgccatttatgcgtttgtcttggttttgcctttcctttatatttgaaggattattaaattttgaaaatttatctttcaaaacttcccattaaatgttttttttgttcattttttgctttttccccattttaacagacattcccttcgcttctcccttttcgttcccttctgagccgtcgtcgtcttcgaccagtaacagcagcagcaacgagaacaaccaaagcaacgaaatcaccgccagtggcggcgctctttccgaggctccggcgatcgatggtttttaattttcaaaaaacccccaaaattttaattaattaatttcgttcctttttttgatgagcttgactacgaaattggcaccaaagtgttcgtccatcgtgcgcttggcaaagtattatttgtccaaccggcggccgacgacattcggcaaacgacgggtgccattggtcggtttgtagaggatttattggcggggtccataaaaaccagaaaaaaatcttcggagggatgaattcgaagacttttttttttgccccttcccccgggcgacggttttttgttgcttttactccatgttttttcatttcaaaaaattctggagaatatgggatgggggggggg

SEQ ID NO: 16522 - DNA, 1403 bp, Heterodera glycines
  unsure (1)..(1403): unsure at all n locations
gggggggggggaaatttgggggtataaatcccaaccccggccccgaataaccaaaaaaaaaatctaattttttttaaattttattttaaattcgtattatggacaaatccaattgagcatatactgtcaatacttcagtttttgaaacctccccactttgaacgattagcacagtgtccgctcaatgtgcccttttcgtctgtccaatttcggcacttttcaggcccttctcacagtcagttcatttcggacggccaaaatgctgctggcgttggccacggcgtcacttcggtggccgcgtcgtctcttccgccgatggcattggccgttttgccgggtaaatttctcaaaaaaggccaatcaaattacctaatttttttctctcaaccgaaatttaaaaaatgaagttcattttataacataaattctagggtttttagtaaaaaaaaaaaaaatttttttttgaattttttttctaaatgagaatctttctgaaagacgatttttttcaaattttcaaaatgttcataaaattattagaaatattttttgaattttaaaaactaaaaaaaatcattttaatttcggtttaacggaaagttctaataaaaatgaaaatgaatagagtccctaattctgttcggtttaacggcatttcaattttcttaattttttgaagggattgccaatgacgtggagtgtttcccgtgccgcgtgtgctgttcgccggaccaaccccagcgcgtgttcctcacccgggcggggctggagaaacacgcggcggagcagcacccgcaaaagctggacgaactcagcggcatggcccagcacattcaggtggaggggacggaccgtttaattttcctttcaatttcttcaaaaagtaaaaatttttagtgccaaaatgttttttggcagcaccgtttacctcaatttgcgattttagtattttttttattaaaagttcatttttagaatgtgtgggccaatcgacgatggcaccagcaccgcggccatggcggagcaccgccgatgccaccgccaccgctaattgccgtccccagcacaacgccggtggtgggcgactgttacgaaacgatggcgaatggcactggcggcgcactgccgcagtcagagaattgcgacacggtcactcaccaggtcagcagaatggcacgaaaaattgatacatttgcctggcgagagcgtggccaggggaaatctccgccaattaaatttttcacggcgttccaaatgggcgatttgggcgaaaactattcaaaaggcaattttttgtaaagaaaatttggggtcgaagtgctagtaaaagaaggttttcgaatcccctccaaaattttttccatttactggtttgngtggcgaatttttcatttaatttcaaa

SEQ ID NO: 16523 - DNA, 3082 bp, Heterodera glycines
ccccccccccgcccttcaaaattttgaaaaataaataaaataataggagactcagaattttgaaaatttttctgtaacctttatactactattacaaaaatggcggattttacgaaacgtcccagcacgtttttcatctaccgtattttcccttgttcaattgaattttttttcatctaccgtattttcccttgtttaattgaatttttttcatctaccgtattttcccttgttcaattgaattttttttcatctaccgtattttcccttgttcaattgaattttttttcatctaccgtattttcccttgttcaattgaatttttttcatctaccgtattttcccttgttcaattgaattttttttcatctaccgtattttcccttgttcaattgaattttttttcatctaccgtattttcccttgttcaattgaatttttttcatctaccgtattttcccttgttcaattgaattttttttcatctaccgtattttcccttgttcaattgaattttttttcatctaccgtattttcccttgttcaattgaattttttttcatctaccgtattttcccttgttcaattgaattttttttcatctaccgtattttcccttgttcaattgaattttttttcatctaccgtattttcccttgttcaattgaattttttttcatctaccgtattttcccttgttcaattgaattttttttcatctaccgtattttcccttgttcaattgaatttttttttcatctaccgtattttcccttgttcaattgaattttttttcatctaccgtattttcccttgttcaattgaattttttttcatctaccgtattttcccttgttcaattgaattttttttcatctaccgtattttcccttgttcaattgaattttttttttcatctaccgtattgtccttgctcgccttcctttcgtccttgcttcttcttctgctgctgctggtggtggtccaccattttggccaccttcgcttgcagttcattttgctcctccataagctcatgatgcttcaactttgattgaagtaatttctaaaatctaagatttaaaaaaaaacctatttttcgataaattgaacccaaatgataacctaaggcgttagctaaaaaaagatcaatggaacatttttaacagataattctttatattaggactcaatttttggctctaaaaaccgccaaaataagaaggctttatgctctaaaaaccccaaaaaataggtgctaataagaatctattttttggcaattttaaaaatacatcgacccaaaaatttataaaaataaaccccataagaaatgaaaaatgttctcaaaaatctaaaaaaaaatttacaccacgaaatttgtgaggcgttttggagcatattttccatttttagagcctatttttgggggtttttagagcctaaagcctaccgattttggcggtttttagagcctaaaaatattcgccctagtcataaaaccaattgagtgaaattaattaagattgatgaaacgaatatttattgaaatgtgaaaaagatggttttaaaatttgtaaaatttcccaaccaaataattttaaatgataataaataacccacattcttcaactgcgtaatcatgcacaattgttctgtgttgctcaattcctctttcattttcgaaatattttcacggaatttctattaaacaaataataaataactaatttaaaaaacataatttatttgtataaaaattttttgcaatttaaaatattctaaaaattactttctgctgcggatcggcttcaatttgtccttgaatttccacgatttgcacgccgtcgtcgatcacttctactgaatttgctattgtgtagatcaatttaaatgaaatttaagtaatgtagtcgtaaaatccggcattttaactctttttttcgacaaaaaattggcataactttgcttaaaagcaatcaaatttacatttatggtataattcgataagcaagctttttctctattagccttagcctgcaaaatttgaactaaacactagcaaatataacataagttagtgcagaaatattagttgttatttgcttacaattttttttatattgaccaattttttttttgaaattttacaggctaatagagaaaaggtgggctatcggatgatacaaattttgattgttttaagctaattgtaagttattgctgctctctttctcttatatttattagaaactcagtttttctgaatttcaaatttatgcaatattttcctaccgtatcccaaatttaaaattattttcctaccgtttctgctttgttcaaacgcctcggaaacattcgtttgctccatgcattccaattccaattccacaattctcgccttcaaaacgcgcaattcttctgatgcatttgcttttcgtttagccatttaaaccaaatttactctaataaaaacaattatggtaatacatttcgtttaataaaactttttttttttaacgatcaactaattaaaagcaggtaattgtgggtttttctaccccccataaaaataatcgactcagaaagtttattttttaaaactcagaaaaatagttgctaaaaattcgaaaaaggccaaaatagttgaaaataattgctaaaaagtcgctctaaatcgaaaactattcggagaaaatgctatttttgggtttctctcgccacaactaagccgcaaaaaaaaaatagtttaaaaactaaaaacccggtctctaattattatttatttaaaaataatatttgagaaaagaaattaattggacagcgatgacttttcaaacctttaaaagcaatcgaatgatatcgagttaaatttttatgtttatgaaatttattgaatgacacgaaaaacatttttggatgtaatttaaaacataaaaaagttaaaaatgagaaaaaaaatattttatttcaatatgagttaaggttaggcatgggaaattaaataacggcaaaatgatggaggagaaaaaaaccatcattatttatataaattaataatccctttttttcattaattagg

SEQ ID NO: 16524 - DNA, 1238 bp, Heterodera glycines
tcttttcttggcccattttggtggagtgggggcgcggtgcggagcggtccgtggccacaaatgcatttggcaaaaagcccccaaggcatttaagcgggataaaaagtggggaggagattaatattattattaatattaatgttatccgctttttaataatttaatcagattttgaaaagatttgatgatcagccagagaaatctttttcaggaatttgatgtcaaatgacgattttttgaggggggggggatttgaatattgtaagatattttttgaaaaaaccacttggaaattttggtgaatttaattgaaaagtaatttttcgggaagaattgtattttttgaaaatcaattgaaattttggctaattttaataagtattttaattattaattatttttcaaaaattccaaattattctcagtttaatttgttattttttcatatttcggcgtggtctactcagttttcgggctccgatgctgactaattaggaaccaataagtatttaaatagaaaatcaactattttacatttcacaaattcaaatttggacaaaaatgagttaaaatgccgtaaaaaatgtgaatttgagtgtcttttaaagttaatgccccgagaaaaaaaaacaaaaaatcgcatccaatttgggacttcccaattttccggtaatatcaaatttcatcccttaggcaaaggcacatttttttccttctctttttttgcaaaattttaaaatattttataaacattttaaatatatttttaacaaaaaaaaatgatgccaaaaaggaaaagttatccataaagtaaaaagcattcgaatccaacgtaaatattgcggccatttttcaatgtaactaatcgactgtaaacgcgatggacaagtgccaaaaatgggactagttttagtggcattattttattttattttttatgaaatttgcccatttttattttttcaaaaattgtaaaaataaaattaattttaaaaaggcaaaaaaaaggtttttgaaaaaataatgggcattttttgagcgtaaaaattttctctgtaatttccctgaggagcttttccgtgttgtgttctccccgcccatgcaaataaggtaattgagataagaaaatggctttttaattaaaaaagctgaattgcgaataaaatttaagtgaattttacacagaaaaaatgaaaaatttattttttaaattaaaataaatttatttatttaaatgt

SEQ ID NO: 16525 - DNA, 2161 bp, Heterodera glycines
  unsure (1)..(2161): unsure at all n locations
ataatttcagggtttatccagtttttggggtaaaatgccaaanatagtcgctagttaaaagttagcaaaatttcacacataaaaaaataaaattcaccgtcttcggcnccgaaaaggggagcccatcccaagcagaggcggcggtgtggcaactgaagtggacaacgagtctcgtcctgttagatggagcacaatgctggggaagtccagggagcctttgaagaaaaaaaagcaaatttaaaaatgagaacaaattcgaaaataatttgaaaaattctcaagaaaaaaatagtaaagaattgaaaaaatatataatgaaattaatgatatatttgtcgaataaaaaagaaaatttttatttatctttattagaaaacctcattgacatacattaaaagacttttattcatataaaaatttgattttgaaaatctaatacccaaattttgtgattttaaaaattgtgtaaaaatcaattttgagttttttaatgaaaaaatttttctgattgtgaaaaaaagtttttatcgataaagtttttgtaaaacgagccgagcgactgaaaaggagtacattttttgtcactaatgagcttcatcttttgtgtataataaatgctaataagagataacaaaataggtaaaacatttaatgagaataaaattgtttatttggttgactttgccaaaaaatgaccgactatttttttttgtcggaaacagtacgagtctagacgtattacgaattgaatttcgtccgttcaaaataatatatttattatgttaaatattaaaaaagatttttttcttgtttaaatattaaaaataattttaattaaaatagaaaatgaaaataaaaaaaataatattaatataaattaataacatccaaagtttattattgttatatatgtgaccattttgcccaccttgatgttgctgctgctggtgctgatggtggtggtggtggttgttcatcattaccattgtgttgttgctgctgtttgttaccaggacggcactttccgggtcgtcgagcggcaccgaattggacaattggaggcccctcttcaccaacaacacttgccgatggagaggctctgctgttgaaaaggacaacatttatcaatgccattattcaattgattcaatttaaaaccattaaatgcaaatccatgtgaaatataaaaattattcgatatgcttataattttgcactcgattaaacctctaaaaacacctaataatttaataataaaaatatagaaaagtaaaatattgcagaaatataaaagcttagaaaactcgataattaaatttaaatattattatttaagagcattatttaataatggacggaaaacccactttttggcatgccgccaatgccaacagcgacggattggcgccgtttggcgtgcatttgaatgcgactgccaaccgcaaacattggactttttatttcctggaaagaaagaaaaaatagatttgcttaatgctaaatcaaatttaaaaattgagcaaaacgcaaaattaggcgaaatatattttcttcggaatcattgatttcaatggcactgccaacttggcgttttgcccacacacacacaaaaagaaaatatattatggcccaagaaaaagagcggaagtaaaagtcacggaagacatgcttccgtagccaattttataaaaatttaagaagatatttagaaaaagaaggaattaaataaaacaatttccgtaagaaatggttgaaaacgagagaatggatttaaataaaattttaaaaaataacagtaaaaataaattaaaatttttacacaatttttattaaatttaagggcacaataaaataaattatttaaaaaaatatgcgcaacaaaaagcgaaaaatattcgcacattcattttttaacattcacaaaaatattcacacaatattattttaacataaattttggggcccttaattatgtatggttgtgctgcctaaaaattgaaaaaaaaaactcctgaaaacttgttctcgggggttttgggtccttgatcacgaatctgacatcttttttaaccaattccgacttcctaacttaaatttgaattaaaaataattataaaacgagaaatttgaactttcgactnttggtttaagtccgggtcat

SEQ ID NO: 16526 - DNA, 898 bp, Heterodera glycines
  unsure (1)..(898): unsure at all n locations
ccccccccccctccaccctcgggcgagcaaaatttttgatgttaatgtaatcaaggcaataataataaaataatcaggcacgtagccaggggggcgaaaggagggggagaaattcccctccccgaaatggtaaatgaaaaatttttcaagaaaaaatggacaattttttgaaattttgcataattttctttttctcattaaaatttccaaaaaaaaatttccctgcggcggctaaaaaaaatacacccctatgaaatgaacccaaaaaatttcataaaaatatttaaatttattttaaaaattatttatctcaaaactgtttggcgtaattttggaataaaaattatttttactcaattttttatttgacaagacacttttaactagctagcgccaagacaaaactatccctaatagaaaaacaatgtttaaaattgaggaggaaaattagggaaggaaatcaagctgggtttaaaaaatgagtgcgagatttttcagatttttttttgttattattgttatggacgaatccgttacgggataattatttgccgtaagctggacaccacacccattaagggcatatccgtctgtttgatgtgtgccgtcttcgtccaccgcaatgctcgtccgtccgtcattaaaatttgtatatttgtcaaaagcaattagagaaatacagctcaaaagatgctgcaaatttttgataatggaaggaagtttggccaacagcagaggacataaagaaaatggcaatattatatttatacattataaaaaataaaattatactgatttttaatgatttatttcagcaatttttagtaaattaaggatgctttttgagccanaatgactgaaattttttggcgatttgaccnntgcaggcnnatgcaag

SEQ ID NO: 16527 - DNA, 2189 bp, Heterodera glycines
cccacaaccaccaccgcatccgccacctccaccgcatcctcctccgcaacctcctcctcctccgcaacctcctccgcctccgcaacctcctccgcctccgcaacctcctcctcctccgcaacctcctccgcctccgcaacctcctcctcctccgcaacctcctcctcctccgcaacctcctccgcctccgcaacctcctccgcctccgcaacctccgcctccaccgcatcctcctccctgacttccgcctgaaacattaacatagttggccgccaaagattgattgcgtattacttacctccacagtttactatgattggacctccaccaccacccccgcatcctcccccgcctcctccacatccgcctccgcaacctcctccgcctcctccacatccgcctccgcaacctcctccgccacctcctccgcaacatggcggaggacagggaggggggcagcaacagctgctgcctccgacgagcccaccgaagaggaaagcatgggaaagagggaacaaagcaagcgaaacgagaaagatgcgctgcatgtttaataaatgcctaaaatgggaatggaaattgtcctaataaagtggaagcgctgttttgagttcagctgaattgggaacttggaaggattgaatgatgacatttgccaattggacaccgcttttataaggcgatcggtgatggcgcgcggataaatcagattagaagccgcccattgttcgctgccgaggaacaggctaatctggcaaacttgttcgactggcaaatgtcggccaaattagggcctttcctgttgaccaaaacgacccccggggccggatattttgccctgaagcgttttgcccccctcagaatgaatggtttttgcttattatctttcttttgtcgtggaaggctgacgaagtgattgtgtctgcttttatccattgtcagtcaaaacaatcgcggagagtcggaaaaagggcgcttctcccatcgatcatcggccgcgggtgggtggcctgtttaggcgtcggtgatcgccaagcagttcagactgattgccgtcatctgctcactgactgatcactatgtgcaaattgatggcctggagctcacaaaccaaacaaagcgcggattagcggggcagcaaaaccatcgcacgttgagggccattaagcaatgggaggaagcgaagaaacccgttgggaggggagagggggcagacacaccgaaatgggagaaaaacggtggggacagacgctgagagaagctgatcagaggagggaggagagattgctcacctcacagtcagacaacattttcagttcgaacaatcatttaaatcaaatattgagttaattgcaacaaacaataaaatcaatttgcataagtaacttttagtaaataattgtcatttaattccaattatttccttcattgctttacccttaattatgtaattacccctccgccacccattgtgatagtccatccctccaataagtgatcaatctgatacctaaacccgtttccaatcacctttttccattccccagatatttccgtctaattatctctgccgacccttcctcggagaacattactgctgttaatgggaaaagttaaaaaaaactattattaatcagaaatgccagaaaatttcaatgtgcgaaaggggcgggcgagatcggaattcggcacgggaattacggcatttttgcaccatgtcatgatgggaaggattttttcgaacttttttcgttatttatcttattgatacaaaactgtctgatgttgcatatttgtctcattggtttgtgtgtgagattgtcactgtttcaatacccatgccaaggatgaaatattggaggaaatgatcagcgaatcggaatcggacagcggatatatattacttatccagctaattaagatataatttgaatttatcactcgtttatttttcctgcttttgctttttttttgttttgttttctcctcattttttattcatttaatttatataaattaaataatggtaaaattcctttctgctgcatttgggagagcctattctcattttctcatttcgctactgataaaaaagaatggtcaccatatttaaacaaatgtttttctttacctttggctctttaaaaatttttttaaaaaataataaaagcgaaaaattaataaataat

SEQ ID NO: 16528 - DNA, 2672 bp, Heterodera glycines
caatcacctttttccattccccagatatttccgtctaattatctctgccgacccttcctcggagaacattactgctgttaatgggaaaagtaaaaaaaaactattattaatcagaaatgccagaaaatttcaatgtgcgaaaggggcggaagagatcggaattcggcacgggaattacggcatttttgagccatgtcatgatgggaaggattttttcgaacttttttcgttatttatcttattgatacaaaaactgtctgatgttgcatatttgtctcattggtctgtgtgtgagattgtcactatttcaacacccatgccaaggatgaaatattggaggaaatgatcagcgaatcggaatcggacagcggatatatattacttatccagctaattaagatatcatttgaatttatcactcgtttatttttcctgcttttgctttttttgttttgttttctcctcattttttattcatttaatttatataaattaaataatgttaaattcctttctgctgcatttgagagagcctattctcattttctcatttcgctactgataaaaaaagaatgctcaccatatataaacaaatgttttcattaacttttgctctttaaaatattttataaaaaataataaaagcgaaaaataataaataatcacatgaacaaaaaatgaatatatttattttaaaaaaaataatactgtttactagagaccggacaaatgaggtcggagggatccgaccgaatcccggtccggatccatcttttgggtccaaaagtggagggaacggcggtgtcgaaagcgccgcttaaagaatttgttatgagaattagaaaatgacaatgttattttttatttattttttgtatttgaatgttatcttcattagaaaatggaagttattcgaaaaattataatgactccaatcccgcgggattggcgaaatggtcgggagagattccgactcggtggttaggtattttatcatttttagtaaaaataaacctacaaattcattaattatcaattacctaaaatataactgaaattgaatagtaaagaaattcttaattctaattgatcttttaaatatttattatttatttaacattttggaatttaaccttggtgcctaaaaaccaaaggaataaatctttttggtctaaaaagaagtcttttatcggtaataaaatcattttttgcctgggaaattttaaggatcttttaattttctggatttgtgactaaattttgaatatttttaagggattttgtgtatgcgaaggagaaaaattgttttaatgaataattagaattttaaaattctacaaatgtaaggaaataagcaaaaaaatattagtcaaaactctaaaacgtttttatttactaagattagataaatcagaagatttcatgaaaaaaagtacggacgggcacctgtattcaacataattgctgctggctgccttatcagtcgccggtcaatttccattttggtccataaatgggcatcgccccccccccctccgttttccttctacgtatgcactcacaaactgctggtttatttatgctcatatcaattaggtactttgaatttactccattattttttaagttcaattattttttggctttttcaccgaatgccccccaatttcaaatccgtcccctctccgacaacgaccttttatgggtctttggatcagcccaactgccgcagctgcaggtcgacattgccaccagtgacttttgctgggccaatgccttttttggccgatttgccaatcgcccctttggtcaaagaacggaccaaaattcagtgcaccgcttggccttccatttatctctgtgctttgttcactttcgtggcatctgtccaattcactctgttaacagcgtcaatgtggccatatttgatgacggtgaggcaacaaaaagggccaccgaatgttaatgagttaattagtgagaaaatgattgacagtgtacgcaatcacttggaaagtgatttgattaccgtttatttcagctggacacttctctctctgaaggttttttgggccttttgatcgcgttgttttccctttcgctgatcgtcgcctcggctttgttcggcgtttggtccaatcgcatccgtcgctttaaaccgccgctgtaaaaataatttaataaaattcataattgtaaaatgctccccttttagcatattttgcaacttttgtttattctgtggcaattttctgtatttttccgtttcgcttttcccctcccattggattcgtttcgttctcatcgcttcgcgaattgctgctggcattggattgggttttaaataatcaaactaatttatcgtaatttattttatacttagcccaaattgggcttctcaaatcctacggcatttcgttgactgtgccaagcgatcgccaaagagcgaccgcttttatcaccggagggagcgcaatgggcacaatttttgggccacgtaataattcaatagccatttgtatgtccactgattgcttttgcccagttttgcaattgctgttcactttcatcgaatccaatcggtggtccgtccgttttgtcattaataatttctccgttcgcctttctttagaagcgctccgccgctcttcgcttcatttgtcagtgttctt

SEQ ID NO: 16529 - DNA, 2914 bp, Heterodera glycines
ataagataattcgctaatttttaatattaaagcaatcgtcaaagtttgacgaaagaatgtcaaagcagagttcacaggtgttcatacgaggaatgttataattagagacgcatacaagccgtatagaacagacccacggtggatgcctaagtattaatagtggtaaatttggataagataattagctaacttttaatattaaagcaattgacaaagtttgacgaaagaatgtcaaagcagagttcacaggtgttcatacgaggaatgttataattagagacgcatacaagccgtatagaacaacccacggtggatgcctcagtattaatagtggtaaatttggataagataattcgctaatttttaatattaaagcaattgacaaagtttgacgaaagaatgtcaaagcagagttcacaggtgttcatacgaggaatgttataattagagacgcatacaagccgtatagaacagacccacggtggatgcctcggtattaatagtggtaaatttggataagataattcgctaatttttaatattaaagcaattgacaaagtttgacgaaagaatgtcaaagcagagttcacaggtgttcatacgaggaatgttataattagagacgcatacaagccgtatagaacagacccacggtggatgtctcagtattaatagtggtaaatttggataagataattcgctaatttttaatattaaagcaattgacaaagtttgacgaaagaatgtcaaagcagagaaaatttttgattgtatttctttccacttatttttcgtattttcatgtgcttatcagatgcaaatcaaatacgacggttgtccaacgtgtcctttggctaagattttgttgaattttatcccgcagatttaaagaaacaaaaaacaaatttcaaagtgtattcattccaaaatcagagtaaacgcttatcgttcacaatattattccatcatatccttttcctccatccgttccttctccccgtcattttttgtgtgaatttccttcctcccaaaagcactctttgggcccattccctcatttttgcgctcctccgctcattttgctctcctgccatttcttttccatccctccgccttataatttgcgtgctcaatttgagttcgttccatttttgcacacgttggcattccgccagttcgagttcaattagctgaatgccaaagtttttttctgtgaatgtctgttgtgcccttccctctcttttcgttcattctctcaccgtgagctgttcgcttactgtcgccctcaattcgccactcattgcgctttcatccgctgcgaatgctcgcgctttttccacctttatccgcaagtgataaaagtgtcatcgctttttctcaattttttaattctttttttttcttgaactcacttcaattatgcataacatttgggtgggagtgtcgcaaatatcggcgaacagatgcagaaactttgcgaggtgtgcaatcagcgtgaaccgtttccacgtgggtctgtttgaacacctgagaactctgctttgacattctttcgtcaaactttgtcaattgctttaatattaaaaattaacgaattatcttatccaaatttaccactattaataccgaggcatccaccgtgggtctgttctatacggcttgtatgcgtctctaattataacattccttgtatgaacagctgtgaattctgctttgacattctttcgtcaaactttgtcaattgctttaatattaaaaattagcgaattatcttatccaaatttaccactattaatactgaggcatccaccgtgggtctgttctatacggcttgtatgcgtctctaattataacattcctcgtatggaacacctgtgaactctgctttgacattctttcgtcaaactttgtcagttgcttttaatattaaaaattagcgaattatcttatccaaatttaccactattaataccgaggcatccaccgtgggtctgttctatacggcttgtatgcgtctctaattataacattccttgtatgaacacctgtgaactccgctttgacattctttcgtcaaactttgtcaattgctttaatattaaaaattagcgaattatcttatccaaatttaccactattaataccgaggcatccaccgtgggtctgttctatacggcttgtatacgtctctaattataacattcctcgtatgaacaccagtgaactctgctttgacattctttcgtcaaactttgtcagttgcttttaatattagaattagcgaattatcttatccaaatttaccactattaataccgaggcatccaccgtgggtctgttctatacggcttgtatgcgtctctaattataacattcctcgtatgaacacctgtgaactctgctttgacacacgttggacaaccgtcgtatttgatttgcatctgataagcacatgaaaatacgaaaaataagtggaaagaaatacaatcaaaaattttttcttcgttaaatgttgttgtaactgcgactttgtcaagcgggacccacgcgtttcggcgcccgcgtttcggcgctcgcgtttcggcgcccgcgtttcggcgccagctcgtttcggcgcccgcgtttcggcgccaaacaaaaatataaaaattcaaatatttggttaaaatcaacaaaaataaaacttttttagttaatcaatttcatcgaatatggcttcacaaattgaaacaaaaaaacaaaaactgaagcttccccacggtggacatctttacacattcgataaaatgagtaaagatgaaacgacaaaattttggaggtgcgaattcaaggatagcgtcaacaatgtaaaggccgcatttggacgactaaacataacttcatcgtcttgcacgcacacacttgtccgcaaatt

SEQ ID NO: 16530 - DNA, 3183 bp, Heterodera glycines
tgccatgaatttgtcccgaactgctcggctgtcctcctactgtccactgctggtgcttcaactgttcctcctggtcacgctgtagtcgtgccagctctccaagcagtgcatgcagttgcgcgttctggcgcacactttgtacatggacagcctcctggggacaaatcggggattgggttgaaacacggggacggggggccgggggagacgggggacgccatttgtgcagcttttgaccgggctgctgatgctgctgttggatgtgccgtttgattttacaaattcgcatcgtttttttgtggtaggccctaagggtattggcaatttatgtagctatcttcaaaaaatgatcagggcaaaatttaggtgatcaaagtagggctggcttttcatacattttatgtgggaccgaatttttggtgggtttggaagggggagggggtcatttgtaaactttgggcctcagttatttttggcagccaaaattggaaaattagtaaatttacggtcatttttttttggcattttgtgttgtgccctacagagacagccgacgctgacccaatttgttgtacccaaattttgttataaaattccaaaaaagctatttcgtggagaaattttggattttttagcctcatggtttcagatttgaaaaaaaaatgtttccggtctttcattgggatgtaatttggactattttgaatgatggaaaatttctaggaaagcaaatgaacccaattagtaagtacaaatgactgaaattgacacccaccaataccaccaaattccgattagcagcaatttggggttgatcagtttaataatggctgggcgggtggtgttcatttaccaacaaaggtcatccatccagcaatccattcattcattgacacggaattcgcccaccattttttagcaatcattcattcatgcatacattgaatggtggttgtggtgggtggcatttaataatacatatgatcagcgtaattagtcaatcaaacaattgattattgattgattgttttttgacattttattatttttatagaccgtatatagcgggtgtcgaccgttttatttgctaattaatcaacgattacggtattgttacagaattacttcgaatttagccagcttagttgttaatattttgttacaatgaacatatgtataaaatgatcacggaaaaatgttaatagaaaggcaatttgagaaaaaattaattactgagttatacactaccgtaatactccacaaaaatacagtaagcagatgttaatgaatgtgcttttgagtaattaataattttatcatctcttacaaaggtcaaattgcactcacattcatataatattactttactgactgttacaccaaagagactttcacgtttagtgcgcaacaactcattagataatgatctctgatcagtcggtcggtcggtaattaattttggatatccactttctgcctcccttattacgctttaatgatcaattaactcacaattttgcaaagtttaatccattccggtaaattgcattccgttaattaccatgattgcttgccaacatgcattgacaagcaacagacgcaaatgcgtgtaatcgagaggcgaatacaccgcgcgcaaccacccgcacgctgccgtcgctcgagttagcgcacgcgctctcgcgcaagcaatcgcgcgcaaatattcaccaatcgccgctgccgtgcaaacgcggcgcctgtctcgccgtgttgccgccgctcgctagcggccaacgtggcaaaagtgcacaccaaattttaccgcagaacacatcttctatatgattgcgggacgatgtagattatctgtgtgatacagcaataatatgtatatatgttttgaataaatgcaaaatgtaaaatatgatttaaaaaaaacaaatatctaaaaatgctagcaaaaaatcgattgatcaaagcatttttgatcaatcgataaaaggggagagagagatgaagcgttggcaagaggaaatgaatgatcaatttgaaaggctgaatttttattttaccggaaaatcataattgataaatttatgattattattggaacaattttaataccaattaaccagctttagaaaatccgaattgatccaatcaatcgacggtgatccgttcaatcacttagatttaaaagtaaaagccaattcctctcaccaaatcacttcaccaacactatgcaaatttaaaaaagaaaaataataatatctagtaaaagataattgtatgattagagaatggacagctgcgggatggaccggggactatgacaattgttggcactttttgcgagattcccgagtttcaccagtcccggaccgtagcggggttggccgcgagactggggcataaaactcatttaaattggacccaaatttcgaattaatatttgcattaattaccccctaattagtgtccgagctctctctaatcactttactgatatggatatcaacaatatgtagcagcaatatgtggtggtggtatggaaatgaagtaggattttgatatgagtgatatgggcataatacatgacgacatattttaactttggcggtggtagtgatgataggtgataataatgataataagcaattagggttaattagttaattgaaaaaatggtagcactgttaacaaatcaattgacaaaaaaagaaaaattccttctggctcttcagtggtttattggtggtgatatggtggtgatgctgcgcaatgctttttgatgatgcctgcggcattgtgtggtgaggttgtgaacaaaacaaataaaacaaaaaaatgaaattacggtaaaattattattattattacggtaggaatgccaaaacgaaaaaaatgaattaagtgagcgatttatttggggaggaatggacgagaagggcgacaagtgaatattatgcagtggttggcaaggcaaacaaaagtgtacacaaaattgggctgggaattggacagtctcatcagagacaaaaagggtggcgggactgagtaaaaaattttaaagcttaggagcgacggagtgccaataaatatatgaattttcaattaaaaaaatttggcattttatattgtgggaaaattaaacaggggtttcaagaaacgaagtgttaaaagtgaaccgaaactaattaa

SEQ ID NO: 16531 - DNA, 1550 bp, Heterodera glycines
ttaattttaaattaaattgtcgaaatctttcaaacatctgtcttaacgctaataaatgttcattaaagtcggaggatttagtaaaaattaaaatatcatcaacataggcaatcacattatcatgaagaccagttaatacctgagccattgctcttgaaaatgctgcggtagcattttttaatccgaatggcatatgagtcatttgatatacattatcttctgttataactccacattttctggatgcctcgggacttaattttatttgtaaatatccactagataaatccaaagaggagtaaaaatggcaatttgcaactctttccatgattgcgtccatacggggaagtgggtaatgatcaggaacagtaatatcatttaattgtctaaagtctaaacatggtcgaattcccccgtcctttttctgtactatgacaaaaggagtgacccaaggagtatctgactcaaccattactccagactttaaaagctgatcgatatgtttttgcagctctgccctatacctataaggagttctgcgaggtttggcagacatgggctcatttgttgtggtaactatttcatgttcaccctctgtaaatgaccctaagtcatattgggaatgactgaaaatgtcatgaaattcttcacatagtattttcaatttttctaagtctgaacccgttacagaacttttggaaaaatctattttgaaattggggtcaatcactatgtccatcattggtgacatactcatcactttttcagagctatcagtcattacaccattactgatttgtctaacctcatcagcataagctaaatgctggcctttataaagttgaaatggcatagcagacgggttaattataaacattttcactgtccctcgaaagggcgccgcaattacaggaattagaccaaaggaaatattgttaagtctttcatcgagtgaatggataaaaataggcttattcaggtctattgaggtgtctatatttgcctggacaatcatacccctgtttggagggaggataattgagttacttgcttgaattctcaaattattaataaggcaattattctgttgaattcctaatggagtgatatagtcaccaatttggaactttttatttggataatcaaaagtgaaggctggcaatttaccaagaatatcgcagccaataagtgccttataaaaatgagttttgaatttaaaatcatcaacaaaatgaataataccttcaactgaataattcccaattgaaaaaatgaccgtgcccttttctttaagtgtgaaagtgtggcctgaagcactaattacactgactgaagttgggtataatgtacaaccccagagttttgccattaatttcggtgctacactaatactggcccctgtgtcaattagggatttttcttgcgatgagttaatttttggaatcaataatcgaacaattaggggatattgcttcccagaatttaactgaatttttctaattttggaaaatctatcatctgagagtgaagctttgaaattttctaacttt

SEQ ID NO: 16532 - DNA, 1670 bp, Heterodera glycines
tgattcccgctttgagggattaatgataacaccaccatttgatcgatcagatcggcaccaatgatcaaatcaaacccttccttctcaaagaaagcattattaataaataaaagtggtgcctcgcccaaaatgacccctccttttgagaagagaacccacgccacagtcttgccctcgggtgcattatcagcagctttctccgggtccatcccgaaaggtcttaatttaacgcagacttccatcatattaaattcaggtactcgtaatgagccgagaattcgtaaaggagcaatagaagtctgtgaagcgctatcaattactgatactaattcaattccattcaccttaattcgagtgattgagagatctaagcatactgaagtaaaaccaattttctcttgatttggataaactctgagcattaagactgattcacaaattgttgcattttttctttctctccgaagagagttcaagtcattagtagatgaggctatcctattaacaggaacaaattgaatgtccggggtctcatcagcggaaggtgatgtaataggattacagacaatattttgagattgggactgtacaacattctgagctagtctagcacctcgatttcctaggagtaattgacctaaacgtccctctcccaggtatatctgtaaagcaaatacactaaacctgataaggacatcacagatagtgattagtgagataattgttatgcttactttccaaatgtaagaccagtcgccaaagagttccctttttaactcttctttagttttttcccatgtaccagaaatagatgaagaaattttcgtgtccctttgatgaatctgataagtaatatcgctaactttgactaaattattgatgaaggcatgcaaatttatatcggtgatattaaacataacaatgtgatgaaaagcgtgtgttggaatttggggaattaggtttaggttccacttaatattatcgtccctgagaatatttagctttgaaattcgagccgtgatttggtcaatgactaaaacatctccgtcgagttggagaataatttccctattttctaagcagtccgtcttacgggagtaaggtacaataatcatggattgtggatttaaaaatgctgttatttcatcagtatgagtcttaaatgcaattggtataaattcaaaacaattattttcggaattagtaggaacgaagtgataatcctttggttttaattgtgtacatggccaaactttaataagtgaagcaccaaccctttttgcaattaatttatagttagtgaacagcatgcgagccaaagcagttgggtcagtaagcaatgccgtttcggcccaacgatgcgtctctcccatgagctcacacgtggaggccgcaacatgacgaaaagcataactcatagtttcagacacttcagtgtccaaataagtcaattgtgatgcgaattgagaattagtaacaagactatccaatgctctttttcttttggtctgacgaccattctttacaataaaataggctaagttttgttctgttaatttcagagtactattacagctacgcactgtcgatttccctggtgcgtcagttaaagctaattgagtttcatctgctagccaagtattgttaagaacacgcccattgaagaccca

SEQ ID NO: 16533 - DNA, 1483 bp, Heterodera glycines
cggaaatttctttttttttaattttatttttcaaattacaaaaacgttttgccaattcaaaaagatttattttcgggtgccaaataattaatttttataattttctattttattttcaaatgaaataaactattttcagctcaatgtcccaaaaaactgttgatgatactagcagttggtggtactattttatccgtacggatgaaccccatgtcaaatgtaatagcggtgaatgggagcgagtctatgacagaaaaaagggacaaattcattgaaatgccatttggaaaaaaacacgatgataagtttaaggaaaaagaagaagcagagaaaaagaaaagagacgctgaaataaacggaaagcagcgagagagcagcagccgaagttttcaagcatgggttttcctcctcttgtcaaacagagcaacagtcatcacgcaaacgtcaacattcgccaataataaattttccaattttcagtaatttttattaatattgctaccttcaacctttttagaaaaatttgaatcgggaagtgaaaacgaggcgttattggaacataaaatttcggaaaagattgcgcttgattatcagccattttcagtggtcgaggacgaaggattacaaggcttttgaattttcttgcccctggctacaaacaaaagtaagatgtaattttgcgacaaaactactatttaacttaattaaggacacgaaagcacttttccgactgattaattcccagcatttatcaaaaattattcgcaaaactcaagtcaagtataacaaaatctgaccatttttcattaaatcgacggttggacttcaaggaatgaagcgcagtcattgatttcactaacagttcatttcattgatgaattattcgagccaaaattttatattttggaggcaagaacccgttcatgggcggcacacggccgaaaactacgttgaaattttaaatgtaataaaagattaagtttttagaattaaatcaatttttaggattctttggaactctggcattgagcggcacaaaatccacttatttatgcgcgatgctcaaagtacaatgcaggcaaccacgcgtgtttaaatgttgacggttttgattgcttagcccataagattcaattggttgtaaatagtcgctataattatacgcagtttaatttttagtctgttaatgtgggctgagaacgattgatggttttcggacaatcagggagagtgcaaaaaaataacgcgaaagataagaaaaagtcaaatttgcaaggaccggctcaaggaattacaaaaattcaacgaatttccgctgcggatgttgattaaagtaactaattccgaagattatttgttttaaatctaattttaggacgttgaagtcagatggaacagcacatattttaatgttaaaaagtttgcttgaaaaccgaagggtgttgtcgattttaagccaaagaagtaaacttacccaaattca

SEQ ID NO: 16534 - DNA, 1923 bp, Heterodera glycines
aataaagaataatagccttagataattatatctaataattaaataattcataaatgacaagatacggtgaggacaaacccaaccgtagtaggccaactcgtactgccccaactcgtactggtaccccgactcgtattaagtttcccaactcgtactaagactcccgactcgtactaaattacccaactcgtactatttttcccaattcgtactaattttcccaactcatactgtgcaaccaaaagaaaattttatcacaattttcactattttcattgaattagcttattaattatattttttgtctttttacaactaatgtatttgttttttttatcaccccgggggggggttatttttcaaccttctcagaaatggggggattattggatacgggtggataaatgaagggggattatttttcgacagattccgggcttaattagggcgaggatttcaaagtttttactcattttttctggggctttaactcgacgagaaatgcacgaaaaatacatgtttggtttgaaaatttccgttttatcgcccttattcgaccttagaaatccttattttgggtgttcgcccttaaaaatccatatttttgattattgcccataaaataagtttttgcccttattttggcgttttgtccaaatttattaacaaaaatgcataaaaacgaaaaatacacccctaagaatcggcactaaatttttaaaaatagacccataacaaatgaaaaatttcttaaaaattcaatctccaaaattttttgggccgataatcgtatgatcttatttgtaactgcaatcagtgaacaaaattgcttgccttaatctataattattttcatatagaaagagcaattataaaaattatacccctaaatttggaactttttcgtccttattttcgcccttatttcgcgattttaacgcccttatttggtgataagtggagacgggtggattatttttcaaactcctcagaaaggggggatacttggagatggagggattaatgaagacggggtgataaaaaataaaaagagcaatacggtagattataatatggtgagatagagaagaacaagcttccccgagaggaagattaatggatcaattgagacaacaattgatcctatatgatcgagcaaagtggggagctggagagggcagggtcggtagttcagctggtagaacactggtccggaaagccagagacgccggttaaaatccggcccgccccatagtttttccctcaaaggcttccccgctcgttcatatatttcaatggcatgctttattcaacagaatttgctcaaaatcagtaattttttaaggtaattctgattccattttttttcgttttaatcgtcgccgccggtaaaaaatttgatttttttgtgagaattagtagattttacacaaaaaagccaattttttatgaaaaaaaaattttggggtccggcggtactgatagactggaaaggaccaattacatctgaataaatttgagtcaataatataactaaatgttgttgacaaaatccaacaacttgtatcattcgaaagcctttcaaaggatctattagcctaagaataatttcttcagttttcattgaaaaagggcaattattaagtcaattttttgaaatcttagaggaatttttggcatggcggagccgataggcgccgccggggaaaaatttttttgggattttaatgaattttgttaaagaaattgtttaaaatttcaataatttttccccttttcccccttcgctggcgaccaactcccacaaagggtcatcattaacagtgtaaaaatactaaaaacccgagaccgggaaccgagaccgggaagcgaaaacccgagaaatttcccgagtcgggaaacgagactctcgcacagccctag

SEQ ID NO: 16535 - DNA, 2762 bp, Heterodera glycines
caaactggtgccgctagcaggggctaactgcagccagaaatccggtcaacgaacgaccagcgagcacggaattcgagaagctaacggcaaactggtgccgttagtagggggctgccagtgaaacatttcggtcgacgaacagagcaggcggaaacgaaaaatgcaacgattcgagttcgaggacgggagcgaaagcaacatggacctagcgaatgagggccatcccaacggcgcacagcacgacgaaaatgtgcaggacggggatggtcccgtcgcttcaacgaacgaagagcaacaaaaaattgccagagtaaacgaagcaacgagaggaagcaacatggcgacaggcgtggcgacaaatcagcaagggatgctacccttcccatcacgcaatttgcggagtgtatccatcccggtacggacagcgcgggacagaatctagagagcatccgggactctcgctactcgaattgcggaggctcgagaagtgatcgaccaagaccttaccgaaggggaggcagcgtaccaagcggcgcgacttttggccatggagaggggactccaggaagcaatccaaatttttcaaggacatttcgagattggaatggcagcaacgggagcagaacccgcaggtcaccaggacttcttctacgacatactgacagcgccactgccggcggcgacgaaagagttgcagttgcgaaaccatccaacaccagctgaactgcttcaaattgcggacgagcacatcggagacttaaggacgatgcgacgggcactcgaggatgaagaagaagcaatcgcgcggtctcgattgagcgggtcattcgggaccaacaacagccatccggtgggggacgacccacctccactggaaaatcggaacatggaagaatgggagagatccttccaagtggcggccaaacgatggaaaaacgacggacaaggtgtaccgcaacacaacagaagaccaatgggacgagtcgcgatacccgtcatgtcgtatttggacgggatttttcagcggcgtgccaaagtgccgtccgtcgccagcatgagagtgacgaacacagcgcgagaatggatcaatcgaaatcgagacgagatgggggcgttccccccagcaacagcccatcggccggcactgatgcaaccaaaaatcgaaaagcatcaggctcacgtgaacgacgactatcgggagcgtcagacataccccattcgacggcatgctcgagacgagggagaacatgatcggaagcacgggagggacgaaatcacgggaatgacaacattcgagactcggctgcaaccggcgattttttccgaaaagcccgaggattggacgacattttgggcctatttcaagcgagctgtggacgacaaacccattcccgggttcgagaagcagcttcatctcctgcgctgcttaaaggagggatcgccagcccggcgggctgtcgaagtctaccctccctccgacggcaactacccggtggtcgtgcaacttttgaaagagcgattcggcgacacggacgatttacagcgggcaattcgggcccggcttcttcatttggcaccggcaaaggacaatgtgaacagcctgacgacgatgatcgacgagtttgagcggtgcgtgtgccaactcgagcagctcggagcgaacgtggacgacgactcatttggcccattgctggaggcaaaattgccggtgcgactgctcacggaattgcggatcagagaaagcatgatgggctcgaaatggtcagtgcgcgatttcaggagagcgttgtcggcacaagtgcgatgaatgcggatctgtgagtcacgactggagtatatgaaagacccgggagatcgcaatgatttcaagaatttttatatgtgcacgacagtatgatatggtactttgggtataatttcctctaagcagcactagcttaacttcggaacttttagtacatactctctgaatgagctgagaaataatatatatttattcaaggtcatgaaaaattcaagaatttttatatgtgcacgacagtatgatatggtactttgggtataatttcctctaagcagcacaagcttaacttcggaacttttagtacatactctctgaatgagctgagaaataatatatattttttcaaggtcatgaaaatttcaagaatttttatatgtgcacgacagtatgatatggtactttgggtataatttcctctaagcagcactagcttaacttcggaacttttagtacatactctctgaatgagctgagaaataatatatattttttcaaggtcatgaaaatttcaagaatttttatatgtgcacgacagtatgatatggtactttgggtataatttcctctaagcagcactagcttaacttcggaacttttagtgcatactctctgaatgagctgagaaataatatatattttttcaaggtcatgaaaaattcaagaatattcatatgtgcacgacagtatgatatggtactttgggtataatttcctctaagcagcacaagcttaacttcggaacttttagtacatactctctgaatgagctgagaaataatatatattttttaaaggtcatgaaaatttcaagaatttttatatgtgcacgacagtatgatatggaactttgggtataatttcctctaagcagcactagcttaacttcggaacttttagtgcatactctctgaatgagctgaaaaaaatatatattttttccaggtcatgaaaaattcaa

SEQ ID NO: 16536 - DNA, 2847 bp, Heterodera glycines
  unsure (1)..(2847): unsure at all n locations
cgcccccgaccccgaaccccgacatttttggccattttcggggaaaaccccgaaccccgacgcttcataccccgacaaccccgaaccccgacccttaaccccgatcggggttaaatatacacccctaagaatggcattttcgtgggagaaaatgcaaaaaagttagacgaaatttgaattttttttaaccatttgctaaatttttattaaataaagaagatttgctcaatttttgacatttggaagttcgataccgtttgacgttttcttctttaattattttctttgtgacaaattgtttttttttaaattaaatactcatagaaatcgaccaatcttggcatattttgacaaaatacatatcgaagaaaaacaaaaatttaccgaaattcataaatttttttggtgaaaaatcttagaaaatagagcttaattccaaaatttagcgctgcctatcggcatcacagggcccaaaaagtcataaaccttattaaaaaaattggctcaaaatcgcaaaaatttagcatattttggacaaaatctgttaacagatctaaccaaattttcaaaattttcccgtgcatatctaggagacattgggattttaagaagaaatattctggcgttttgtcgtgcgtacaaatctcagtttgaaattatttaaattttgcaggtttcatattcgccaaataaacaagcggtgaatttgtttgattctgatgaagaaatggggaaagaaaaagaaatgtttttaaaaatcgtgcttgatttaaaaatgcttaattatttattcaaaatacataaaaatcttggcatttcaactgatcaataaatgaaatttcacagaaacacacgaattctgaaccgtgtgccatttgcgccacgggaattttttcccaggacattttcgcatcgggcacttgcgcaacgggcaataattccgttgattgaataattaataatttttcaaaaggtttgattgacgatcaatttatagacgcaattactttcaatctcataattttccgacagaaaattgcatttttcggcattttctcctaattcgttttactgccggagagttaccggtaagaattttggttctcgggaaattttccgtccaaattgctgactttcttttgaaaatttcgaagtcggaattgtgagaccccaaaaatgttgaaaaaggacaaatttttgaaaaattggcagaatttgttacgggatattgtcccaaaaataattttttatttattgcgcatagacacagaaatagatatttaggcattagtagacacaaaaatgccgaaatagtcagacattttttttgaccattttaaaaaagtcttagcgaaaaataaataaatttatcaaaaagcgagctattgccataagttttgagttaaacaacaataaacattttacaagagccacacatacagtatacaacaatcaattatttaaaattctatttgtagagactaaaagtattggcgtattatgctttggcgtcactcgattttgttttgtcattagtttaattgcttttttaagttccttttggaatgccagacgataatcagtgctgaaatatgacttatgttgcattttttaaagtattttaataataactactatatgcgacattccgtcagtgaacaatccgtcattagacaatcagccagtgaaggacaatccgtcagtaacagacaattcgtcagtggacaatttgtcagttcaaattttgttttttgagcaattacaaaaaatcttgcgattgcaattgttagattaaatatttaaacaattggatgcagttttacatgctgacggattgtccatcaatgacgaattgattgtccactgacggattgtccgggattttcaagaaaattttcgtctcaattttgaaaattttacaaaacaaaatagaaaatttatttttattttttgataagttagctaaatttacaagaaaagccacggatttttgcatgccagatgtgattatacctcgtaaaatataaaatgggtccaatggaagctgagccaatgttcagcagaattgcagcgaaaacattgaagaaccaagcagtgatcggtgaggaaatgtacggtttgatcagaaagaaataacacaggctgacattcacggcgacaatccaaaagagggcacgaaatgtgcgaccaatgatcgaatttgcggacggtaaccctagggaaagcattataatttttgaattaaattcattattaaattattttcaaaataaaaagtaattaatgaatccaaaatttcaaatttaaaaaaaaaatgtgtgcaaatatgcacaaaaatgtacatattttcctacttggacttctttttctgcattttttgaggctttatttaaggaaatttttcttgatgcttaaaataaaattcaaaatttcacaattgtaatttttccgggtcttttgggttgagaggcagggataaaaccgaataaggataccggagtcaattcaaatcactttaatcacaacacaaaatttaaaagagaaaaagaacaaacaaatttggttgaagtcaatcaaaaagcaaagactgagaagaataaaaagaaccattcttaaatgaaaaaaataacgccataacaaaagaaaatacattaagccaagaaatatttaaataattatagtcaatttaattatcaaaatacaacatccctcaacaatcaaaaaaaaaggcgtccccgcctttcagcctttttgaaccgaaaggggtgtccaacaggtagttcaacggcgggtggggcgaaactcgcggtggcgcctattgtttggatcgctgtggtcannatttca

SEQ ID NO: 16537 - DNA, 2156 bp, Heterodera glycines
  unsure (1)..(2156): unsure at all n locations
attttggcccttcttgcatacttattagaattcgtctttttaaaagcattgataaagtgcctatttttctgtaaaaataaatccagacccaaaaaacctagttccaaaaaatgcctaggcctctgcccttgtgctaaaagtttataaatttcataattattatttttttttattttaggcgaatcaaaaatacgcagatgaatgaggagggatcaagagaaagaggaagtagcgcgaatgattgctatgatggaaaaattaatttttaaactgaccattttctggcattttgcttttgtgccatttatgcataaaatcgaattggaatacggaattttttcatttttttatgctgctcgagaccgagaatcccacctttctcctgtcgagacttgtctcccaaagcagcatttcatcttatcatcaataaacttattgaattttaaccttcggcgtctatcgccggggagcagctcgtccccgcccccctcgccggaacgaaaatttcatgattcttattatgaattcaaaggaattaaagtgggccaaaaatcgcaaaatgcttatttcgaaaaaaatttctcaaattgatcatggacaattaaaaacaaagcatttgaatattttaagaagcgtgttttgaataaattttgtaaaaatgaggcttttttaactgccaaatgaggcttttgaaaatttaatctgggagccctggaaataacactttttcatttttcaaaggaacaatgccgaccaaatttgcgagtgagtggggatgccagaattattcgtccgatgtttgcggcaaacacgcggacaaatatggcttttctttttacaaaaaagatgaatgctattgcgcaattggtcattccaactacaatattacgtcactgttgaaaaaattggaattgcccgccggtcgtttgaattaaataattttttatttaattaatatttttgcattatttatttttacaattttgaacaaaataaatatggtaatttttatatgactcccgaaggatgcgttattggaaaatgctgtagtggtactactgtattttaaagtaagatactgtagcataacataaatttttaaacataaatggtcaaaattctataaaaatgaattcatcttttgcattttccattgacgcattttctgtcaaaatattattttaaaaaataaacacttttctaggatagttttctgatcacaaaatgatgcaaaaagtgctaacatgcatgtgcaaatttgggcgattcacaaaaaattacaaaaatcaaaatctgaaatttccaatcattttttattcaataaaaacattgaccagtttaacatgttttgtcgtgtgaattgtagataaatgccgagtcattctcgcgcgatttatttattgattttatttatgatttaaatgataaaaaaaaacataggaaaagtgagacttttgatttttgcacatttttgtgaactgccaaatttgcactttttgtgaatcgaccaaccactgatgcaaaaatctaattttccattttgatttccattaacaaggcggtggcgttggtttttttaacgcccattaatttgattatttggtaaattcatataattttttatatatttctaattttttaatcattttttgttttttagacttccaatcggtgtttaaatggtgaattttggagtaagaatgaagaaaaaaagcaaaaattacgtaaaaataaattcaaaaaataaataaattatttcatattttatgtccaactttcattgttattatgattttttttgtatatgtaagtgcttaaatttaatatattttttataaatataaataaacagcgcaaataaaaaaatgtaaaattaattttaaaaaagtccgagatttagatttaaatcaggccggaatttattttgacaaatatttttatcaaatatttaatacaatttttacaattcaaattctttctttcttttggcgttgctgcttctctcacaatttcagagttgttcacttgcaattttgcaagttgagctgcaganaggctgcgtttctttaagcagaaatttttcattggacaacgccttgttacagtaacacacctgggatatacggtcattaggtataacaanatcaaatatcatc

SEQ ID NO: 16538 - DNA, 933 bp, Heterodera glycines
gggggcaaaatgtcgggggccggggacctcggggggcgacatctcgggggtcggggcggggaataggcccaaaaaagtcggggagctcgggtcggggagcaaccctattttgaggtaaaaattcttcaaatgtatcgtcttcacgtgtataatatctttgcaaaaagaaaattaacacaactaagagcccaaagatttggcaatttaaaaaggtagctaagaaatgtgccaaaaattattgtttaaggaagttttttcaagacagaaatgaaaaatacaccccctaattatcgatttcaaaaaaccaaaaatacacccctaaaaatcgacttaaaaaagaaaaatacacccctaaaaatcgacttaaaaaagaaaaatacacccctaaaaatcgacttaaaaaaccaaaaatacacccctaaaaatcgacttaaaaaaccaaaaatacacccctaaaaatcgacttaaaaaaccaaaaatacacccctaaaaatcgacttaaaaaagaaaaatacacccctaaaaatcgacttaaaaaaccaaaaatacacccctaaaaatcgacttaaaaaaccaaaaatacacccctaaaaatcgacttaaaaaaccaaaaatacacccctaaaaatcgacttaaaaaaccaaaaatacacccctaaaaatcgacttaaaaaagaaaaatacacccctaaaaatcgacttaaaaaaccaaaaatacacccctaaaaatcgacttaaaaaaccaaaaatacacccctaaaaatcgacttaaaaaagaaaaatacacccctaaaaatcgacttaaaaaaccaaaaatacacccctaaaaatcgacttaaaaaagaaaaatacacccctaaaaatcgacttaaaaaagaaaaatacacccctaaaaatcgacttaaaaaagaaaaatacacccctaaaaatcga

SEQ ID NO: 16539 - DNA, 1054 bp, Heterodera glycines
ccctttcttctccaaaattttttttaaaaaacccccctaaaaaatttatctcaaacgtaaatcttaatttctataatattcaatcatttaatccaaaaatcattaattatttaaaatgacttaacatcatttcatcttaaaattttcattaatttaatttatctttaatttttctattttattcaataacaaacaaaataaaaatttaattttgtattattttcaattgaaatcacttaaaattaaattttttttaatttttttaaatttgtttgaatttctaaatttcccggttggtcctggttcccggtaagaaaaatcgaggtcccggtcccggcttctcaggtcccggaagtcccggtcccggttttgcccaaaattcccggtaccgcttcactctagtttttagtgcctattttccatttttagagcctatttttggggttttttagagcctagagcctgccaattttggcagtttttagagcctaaaaatcccatccctaattctcacatgtatttcaacccaaaattgatttacaaaaatcgtgtactaattttcggcttttgttcactttaggcgtgaataaatcacctcttcagttataatttataaacttaaaaaaacataaagttttttataagaaaattgcaagaaaaatttttaaaaaatttctgatattttttataattttttttgaaatcattaattcttttaaaaattaaaaaaaagattcctggatttttgtccgggaaatccagacaggtccaacatggaatccaggtcctggcttttttcaaaataccaagctctacttagaatctatagaagttttttatttatttctgagctaaaggcaattgaatgtatgaaaaaaaagttgaatttcgtattttctcgttgtaatttctttcttaatgccagtattttctctcttatctttgtaaaattttctaaactttcagctttcgtttgatacaaagaatatatgtagacatttaccaagcaataaaaaagataggatttaagaaattgaggatggtcactgattgg

SEQ ID NO: 16540 - DNA, 3035 bp, Heterodera glycines
ttccgaaaatttagtcaaattttgaaccgttaataatttgatttccgatcaactttttaccgtcggatccaatcgaaaaatcttagtcgacccatcagccccttttaatgcatcccgccagcccctaaaaatttatttttcagcattttttgatttttggaaattctttgaatttaattgaaatttttttgatttttcaaaatcccgcaatcccgcacgggatcccgcaaattttaaatgcggaatttgcgggattaataccgcgggatcccgtcccgcaaaaaattttgagttccagtcccgcagcaggatccgcaaatttgaaattggtctctactgattggacgccgaaaatgcaatagagcctatcaaaacgaatgtcagaaccgtgatcacgacttttaaaattactttttctaaaattttgtaaattactaaaaaaccttttttcaaacaatattttaagatttaaataattaaaatgttaaattttattttaattagcatgcacttttctcttcaaatcaaattcaaagtttttttgaatagcattgaaatagcagccatctttagcatttcccggctgttccatcaaactccgcgtcaactttctgtttgcactgtcgcattttgtccaaaaaagcagagagcaattcgttctcgttggtttcccccttccgtttgtctcgtcgacaaccaaccaattaattaattaattatcaattcaaattcaaattattcgctgctgccatttcctccgtttcgtttttctcggaaggatcggcaaaggcagcaaaaaaagtgccagaaaaaaaagctgaactgaaaagcgcagcagcacagcaaagagagtgcaaatgcacaagtgtggatgtgctctgtgcgagtgttgttgccaattaaaattggcaataaacgaaatggcaaacgcaaaatgctaaattggggcaggcagagggggggggggggggcaactccgtccgaacaaagcttaattaatgaatggaatgtaatagtacaaggtattccatttattatacctatgtgtccagtagtgcaaggcattgaaatgtgttggcagagtgccaattgagcattggcaattggagagagtgtcaaaagtgcaaattgcccggggtgtgcccggcggcgcttccctttgaccttcccgccattcacacatttcttctaaccatttctgctgcctatgtcacagttgttggcaggtggatcgactggaagcacgagaaaaagaagtagaagaagaagcgggtgtcatcaaaaagaaaagggagatgagagagagccgggaatggaattaacgcgagagtgagaggaggagagagaggcagaaagagagagagagaaagagagaggaggagagagagggagggggaggagagagagggggaaagagaaatggcctggaagaaagacatagagaaagcgagagagaatgagattagaagctggaagtgagaaagagatggagaagagaatgcgagcgagggaaaagaggaaggggaagagagagaggaagagtagagagagagagagatgaaaaaagtggaaatgtttcgattttctctatgtaattttcccattgcctccatcgcttaattttgtgttctgatcgtctgtgcgcgtgcgcgcacatttatcaaaaatcacctctttttccctacaccccaaccagcagcccttccattgtttaaatgagtgcacattcatgtgaaagaatgaatgaatgtcttcatattctcgtgccatccacccgaggcgcgggggagcgaaacgttgccaatgaatgaaaggaaattgattatgctcacttctgagcaattatttaattattttaattgccataaagccaaacatttcccactctcatttctctcgacctttggcccttttttctgcatatttctcccatttctctcccatttttttactctctcactttttcggcatatttctcccatttctctcccattttttcactctatcactttttcggcatatttcttccatttctctcccatttttttactctctcactttttcggcatatttctcccatttctctcccatttttttactctctcactttttcggcatatttctcccatttctctcccatttttttactctctcactttttcggcatatttctcccatttctctcccatttttttactctctcactttttcggcatatttctcccatttctctcccattttttcactctatcactttttcggcatatttctcccatttctctcccatttttttactctctcactttttcggcatatttctcccatttctctcccatttttttactctctcactttttcggcatatttctcccatttctctcccatttttttactctctcactttttcggcatatttctcccatttctctcccattttttcactctatcactttttcggcatatttctcccattttcgccacttcttttctttcatcatttaatttttacggtatatacataacctttcaataactgctctctcacgttattaaaacctgtcgcctctcccccatttgtggtgtgcaacaatcattcattttgtccctcatttcctcccaccgctcatttcgtctaattagtgtctcgtggcacagaatttgttcccaaatgcgtctcgattgctttgcaattttacatatattccatttaattaattattatctttatttttgcgttacttcctccccaaattgttaaactctttccacccataaatgccattatttttattccttaaaaattgccaaatttataacggcaccgctggcccattttctatggcactaacttgtcgcattcatcttacatgttttatttgatacggcacagaattccgatttccgacaattttggggtcggaattccgattttcaaaattcgggccgcggaattccgatttccgaacaatttttgggcctcggaatttctattcctaaaaaaattttgtgccttcgaatgccatgtgtatgctcct

SEQ ID NO: 16541 - DNA, 1947 bp, Heterodera glycines
agtttgtgaaaagcgtttgattgacatcaccgaataaatgaaatggtacggatcaaaatcgccaattttggcataaattttgtcctggacaagaatgtttgttatgagcaaccacgtcccgctggtggaccatatcggacgggtacgcatgattccactgttccaagcaccccaccgaaagttgaacgaaataaccaaaatataaggaaaaaattttaaaaaatttttattcttcacccttattcataatataagcctaagaggaccttgttaacgtgtaaataaaattaggtgcgtttcagagcactttctgaaaaaatattcatgaattaattttgcaaaaaattggaaaagtacgcaaaattgcaatgtctaaaatttttaaagaaacattatgggacagttaaataattatatgaataagcattcttctcagctgttaccctgcaaaacctggtgcgcttctgagcactactcgaaaaatgagtaaattaattttcactaaaaagttaagcctaaactttttggcctgtttaaaaaggaattaaaaatttttaaaaattttaatcatcttcctttttgatagaaaaagcatcagagagccttattaacatgtaaataaaatttatcagattcagatcgccatgaaggagtaatctgatcatgttggtccaaaagatttatttgttcagcatcaaaagttagcttacaaattagaggaaatttttctgatttttttctctatataaatagatttttggttaaatttaagaaaaatttgaaaaattttcttaataaacttagttaaaaaataaaatttgtccttggagatttctacaaaaaggcctaattttcatcaaaaaatttgctcaaaatcgtaaacttagtcattttttggaaaaggtacgcagcaaaaaaagctgatctggacaatgcctttaattggtggcagggctgcaagaatacaaaaacgaaacgaaaaagggcatttgatacgaaaacgaaatacgaaacgaaaaataaaattttgaaaaccgaaaaacgaagatttaaaaattttaaactctaaaacgaaaacgaaacgatttcgtgcagccctgctgttggggatactacaatatatttcattttctatattagccagatttacttgacttacccttttgatttggcataagacacaattccagcccaatcggagcctccattttgtggcggtaaactgccaaactcgccgatgatcagcgaacgaccagccttggccaggtcgtcaatatccgatttgtccacccaacggctcttctgctggttatagcctcccggataaaggtgtaatgatgggattattttagtgtccgcaattttggcaccaccaataccttgaaatagggaagcatcgatcattaatcaaaaaaataataatgatgccagagagttcgtgattactaataattattgtttctcatatgaagggtgggcaattttatccatataaaatcgcaaattatacgcataaaatcaaccaaaaattgaaaagaatgcacataaatttatcaagttcagtgtaaaatatctcaaaactcttctcattaaatttaagctaaaaatctctaaaaaaaactaaatattaaaagtagccgtttaagagaagatttttttaatatccaactatgctaataaaatatgcctgaaatgcaaaaatatgcacaaatatgcaaaaggtttcaaaagtgccgacagacttaaatcagttgggaattattaaaggtacttttcggttttgtgcctacacctcaaaattttaaaaaatgaacaaagggcgcgctgaaggcattttttacaattactattctcatagcataaattaacggagcggtaaaggtcctctgccctcccaattttgcacataaattacataatgtgaaagcgtctgcttaactcctattt

SEQ ID NO: 16542 - DNA, 1556 bp, Heterodera glycines
aattaatctttcataacacaaaatatgaatgtattcttttattagcaagagatttgccccctccttcccaccttaaagtgccgcccgtccatcccgatctcggcaccgtcatagaaccatttcacatcgatgtccttgtcgttcacttcgcattcaaaagtggcattttccttttcgttggcatgctgcgagttcaacggcacaacaaatgtgtcacgggtctcctccaccacatacacttggtatttgctggaaatttttgtgccataatttaaatgaaaattaatttttaaaaataataataattttggctcctggcaaatgcgtcagtggaaaaggtgtcaataatacagtatttttaaaataaagttactgtagcattaagtattgtattattacaaaaggacaaaattgtctaataattttgttctgaattttatcaattaagtttttaaaagtcaaaatacctaattgaaactttcccaaatccctaaaaaaacaagttgtgatttcggtaatattactatcgtatctcaatttaaagaaatcctgattcactgacgcattttccactgacccattttccgttcgagatttttatttaatcgaaaaattgaatttcaataatttcttttgccatgtctttaaatttttgtcaccatcaaaaaaaagaagaggcactgaaattttttttttgaaatttcagtcaaattaaaaagaaaataagcgaagtgcagaatttggcatcgattttttggcaccattccaaaattcggtgcaaaattttttggtggtagctgtttttggctcaccgtcgttcagattcataaatattttttcagaaagggctctgaaacgcaccaaattttatttaccttttaaataaggcactctgatgctttttctatcaataagggaggtgaataaaattttcaaaatgttttaattgctttttaaatatggcaaaaaatttaggcttaacttttttagtgaaaattcgatcactcatattttttgctaattgagcagaagcgtaccaaactttgcagggatactccccggtaaaggactaacttacactgaaatgagcgccgagttagctggctttaaaatttttttcgaaaatctgagtctttcgtttttatttatttttttgcaaaattaattcataaatattttttcagaaagggctctgaaacgcatcaaattttatttaccttttaaataaggcactctgatgctttttctatcaacaagggaggtgaataaaatttaaaaaatttttaattgctttttaaatatgccaaaaaatttaggcttaactttttacggcctttttggagttacggattacggattacgggttacggatttttgggatttttccgtattttgatccgtaactggctttttagattatttttcgagacgatttcttgcaagattattttttataaaatgaatttttttttctatagttatataaaggctacccatatttcgatttaatctccaggaggggtaatttgtagtattattaacatacataaaggggg

SEQ ID NO: 16543 - DNA, 1162 bp, Heterodera glycines
caatggggactcaactcaccagcattccaatcactggggacttaactcaccagcattccaatcactgggactcaacccaccagcattccaatcactgggactcaacccaccagcattccaatcactgggactcaactcaccagcattccaatcactgggactcaacccaccagcattccaatcactgggactcaactcaccagcattccaatcactgggactcaacccaacagcatttcaatcactgggactcaacccaccagcattccaataactgggactcaacccaccaacatttcaatcactgggactcaattctcctgcatttcaatcactggcactcaacccaccaacatttcaatcaatgggactcaactcaccagcattccaatcactgggactcaacccaacagcatttcaatcactgggactcaacccaccagcattccaatcactgggactcaactcaccagcattccaatcactgggactcaacccaacagcatttcaatcactgggactcaacccaccagcattccaataactgggactcaacccaccaacatttcaatcaatgggactcaaccgtacggggccttcggccccctcaccaaatttttgcgccaaaggtactcactcggccgcttcgcggcctcgtaactggagtcttcggctctattccagtcaccagaattcaatctcaccaattcttcgaaacccaataaccggaaatgaatgataaaaccgaacattttcctcgtcttttcttatttcttgtggcatccttatggcacaacattcttggcattttcatcagctcttcttgtttattggcattttcttaaggcataacattaacattttcattgtctcttctattttcttgtggcattttttatgccacaacatttcttatcacatcatctcttcttgtttgttgacatttgcttatggcacaacattcttagcattttcgtcgtcttttcttgtttcttgtggcatttccctattgcacaacattcttggcattttcatcatctcttcttgtttcttgtggcatttccttttgcacaacatgacacacaatagtgtctcacactaaagtcacagaacaaaccactaatgtttttcaaaagcatgacacacaatagtgtctcacact

SEQ ID NO: 16544 - DNA, 1641 bp, Heterodera glycines
gcagtattacccaaaatttagcgaagtaattattagcaaatgtctctgtcgtcgtcatcatcaaagttggcgaatttggcggatcggatgaaagtgttgctgagcacggccaatggggcggacattcactttttggtgggagaggaaaaaaaggcaagaaaaattagaaaaaaaagaaaattcatttttatttgcattttaattttagctttttcgagcccataggcacattttgacgttgagttcggatgcatttgaagcaatgtttcgttatgacacgaaaaatgcaaaaagcgaaggtggaaaaagcattttttcaatctttttttagatttttcataatttttaggcccttccgctgatcagtcaaatcccgtggaagtcccagacgttgaagcagcagcgttcaaagtgatgctcagcttcatttacgcggacgatttcagcggattgaacggagacaacgcaatggcagtgctttacgcgggtcggaaaaacggaaacttaaagaattactatttatccaaaaattttaaaaaacatatcggaaaatcttaaaaaaaattttttacaaggcggtatcttggaatcaatgagatcaattttcatacctaaggtcaattgtttttccgtcgacgtctttttttgttgctttctcacctttgctcacgttttttcaaaaagagagggtggaaaattttgaaaaggttttcccccaaaaatttcttcaatttttgggtcatttaaaattttgaaatcaatgcaatttccttttttacatttcagccaagaaatactgcgtcgctgggctgatcggtcgatgtttgcagaaaattccaattccgaagctgcccaatgttttcttggcctatgcccaggcgcgtcttttgcacttggaggtgggaaaaacgactttattaaattttctttttaagccacatatttaaattcacgaatttacaaaaaaaaaaattcccttttcctagcgccacccatcgtcacccccccccccccccccccgacttccaccattttttttaatcagaaaaaatcatttctaagagtcaccatacattaaaaaggtggcgggggggggggggtcagccaaaatttttgcgaaggggggtcggccgccgatgacctttttttgcttttcaaaaaccgtttttttccggcgcgtttttccaaaaaaaaaaatttaccggaacaagggggcccgcggtcgtgtcccgacatttgcggtccgacatttgcgggggaaagctttggatgtgcttcgttaatagattttcaccaaaaatggccagtttttgtgattttgagccaatttttttacgtttctgccgccggcggcgcctatcggcacttttttaaaattatccaatttttcaaatactaaaatgtgattctaagccaatttgttttgcgatttttcttagatataattcccaaccctagtaattatttttaaattgcattttcccgtacagaatcggcatggaatgcaaatcagtataaaaacattgaccggcaaaacagtcacactccgtgatgcccttccaagcaacaccatcgaggaaatcaaagccaaaatcgagcgcattgaaggcattccgattcgtcagcagagactgattttcg

SEQ ID NO: 16545 - DNA, 2865 bp, Heterodera glycines
tttgaacaaaatattttttaattaaaataatatcttcttcctaagtatttttattaatttaagatttttctactaatctcttccaattaattaaatttttaaactgtttagccaactgcctgatgagaagggcacgttcaaatgagacgaatgaaacaattggaatgccgtggaacaaatagaaaatacctaagaaatttctagaattaaattgtgataaaatgttaattttgaaaaatgttgtagaaaattaaaggaatatctagcatttatgtgatagaatgttaattccgaataatgttttcttaaatcgattaccgactcgagagtggtaattgagctagagcaattaagactaattagtgttggagccagaaaccaaattttgggcctttttacataataaattgtattaggtatttattaaataaaaataaaaacaaaattggttttgggttaattcttccggttaaatcggcgatttttttttaaattaaaaaatatttctcattttagccagattttcaataaaataaaataaagtccgtaaatcattgatttgcaaaaaaaggtctgcacgcttctttcaacatcaataaaatgaggataactcctcaaaccattgtttttatttcataattgcaagttttaaaattgagaaatgccccaaaaaaataaaaaattattttttttttacttttttgcattcaagcgactgccaattgttagttgtcgatgagggctaattttaaaaatgtggctttaaaaagcttttttgggggtttttttagattttctgaggtatttttggtttctttttaaaatctcagtaattggctttttgtcaaaatctgaaagcaaaggcataaaatttccaaaaattttccaactgctgaaccacaaattcgtttgaaaatactcatttgataataaaatttttataaaatgaaaaaacacaacggaaggaattggaagaatttagtggaaaaaattctgtacgcataaggaagtcgagatggcaatgccaaatttaatgaacaaattaatggatttaacagctgatcatgtggaagcaaagtgccatttttgaggccggaaaatagcaaatggcgaaagaaaatgttgcgcggaagtttagcggacggttggcacaaatcaacccgtggccggtcaccattgtggacaatggcggaatcttgaaagaaaaacaaattaatttttaaaaattaaataaaaataaaaacagggcaaataggtaatttctctatgtttttacaaatctgccaaaaatttcataatcaatcaacggcggtgaatgtcggcatggcactgccggacctctcttttctattttttttttaaattcgcaacaaaaaagaaaccaaaaatccaaaataattgtttgttttttatagaaatatcagatttttaatgttaaaatgaaattttcgaaaacattttgaattatgaaaacttgcactaaggattaacaaaattaaattaaaatatactctaaaaaagcgaaatttgtataaatatttagccaaataaaacctcgtgaatatgtttataaaaaaaattaaaaaaccaaaatagtgcaaaaattaaatggaaaatatcaaattttttttaatagtgaaaattttctcaaaaaatgtttattaatcagcttaattaatctgaaaacttcgttctatttggaattgaactgctgtattattcgacggggttttttatgcgataaaaaatgcaaaaaaaatatgtaaaaacaataaatccagtgcttagatcctcaataataattgaaatttgtactcattaaaaattttttaatataatgtttataaataagttttatcatttaagtaaaatttacatgaaataaaatggtaattaataaattctgaagaattaaaaacaaaataatttcatccaattaaaagaagtataatttaaaaagaatcgtaatatagaaattttttctagattttcatcaaaatatatttctttaaatctataagtagaattttgaaagaaatgtaaatcgcattataaaaaaacaagtagaatttcttagtgaagctatgtaataaataagcataaatatggaaaataaaaccaattaataaaaggatttttaatcattttaatggctttattcagaaatatgaaaattaaaataatattttcaatattatttttcataaatgcaattgataacatttatgctggaaaaataaacgaagaaaaaagttttgacgaaatatttggccaaagatgggacgaaaaattggaggaaaacggagagaatgaaaatgatcaaaatggaagaataattggacaaacggatggccaaaatgagacaaattatgacgagaatattgcacaaagattatttgcagaacaatttgatcaaatttttgatgataattcggaagtgcatgacgagcagagtgtactattgtccacaaattgtgatgaattggaacaagcgccagtaaaatttgtgatcattttataatttttgaaaataaaagaaaatagaaattgtggaaaaatttgataaaattaaagaaaaagttaagcaaatgggaaagaaatattcaaagaaagaatgggtgaaaattgaaagaaaaattgcaaaaaaattgggtacaaatagagaaaaaatttacaaatggaaaagagaattgggattgaatatcataaacagatattcggatgaagaaaaacgtaaaatattaaaacaatttgaccaaatatatgcaaaataaaaaataaattaaatgaaaaattggagggaaaaggaaaaatatgtcaaaaaataatagcaaaacatatgggaacaagcctaagcagcattta

SEQ ID NO: 16546 - DNA, 3950 bp, Heterodera glycines
  unsure (1)..(3950): unsure at all n locations
caagtttttcaacggtccccaaaaatgcatttttaaatcggtctgattatttggtgatgtccgggaaaataattattccgattattcagaaatgcggtcaattaattagagagacatttacggatcactttctttgccttacaatttttgctcgagagtttcggcntaaattcatggcacatcaaaatcagctgatcatattttgttttagggctgaccgcgttagggtattggattttcccaaacgaattgagtaaatntaatatagtgaagaaagttgaatntatttacacgaaatgaaaaagtcatttnaattcggctgatcggcctgcaggcgtgattcttcgtttttcttttgtttctgatcaattcgcaacttccgttttgtactatttggatttaacaagtgaattttatacctttttatttttgaaaactgaatataaaaattaaaaatgttttatataaattttggaattatttaagacttttccccttgaacataaaaaatatctagtcactcatttgattaaaatgggttttccgcttttattcgtacaaagttttgcttaatcaaaaaataaattgaaaaattgtgccatcgtcacaatgctctctaacacatccgtacatttctctctttctctgttcaacaatgtctcgttttctttccgctctctgtccgttccgcgtctgtgccaccgcctgcgccactcaacggaagttgggcggtgcctgttgctgaaaaaggggcaggaaatgatttgttccaaatttaactgatcaggttcggaatattcgggattggattaacagtgcaacatttcgattattcacgtttcttgataagttagaaaatatgtgatgcgaaaaagggacagacactaggctgatcagtgatcactgaaagcatttcataactgactgatcagagaaaagccaaaagaaagtacgatttatcgttaaagccagtgatcatattttttgagtctaagaatgaagataacgggggattattaatctgatcattatacaaaggagggggatataatcagtgatcatcttcctaatgatcggtttatcctcacaaagaaagggatgatcaatctgatcacctccagaaatgctaatcgtttaacagttataagctccaatagataattagctaggaagtgatcagttgaatgccctgatcagaattggcacgatctaaccgacctgtgccgcctgttgctgctgctgtggcgcggcattgaccggcgccgtcggttgctgatagtcagccgcctcctccggaaactccaactcccaaatgcgcttcagatgtttgcccttcacgtcacgcggcgtgccaaagttggtcatcagctgaacagacagaagagagttaattgaggggatggcaccaacaatttggcaaaaataggaaatcgaaattgtggccataaaatgccaaaatatggacaagaatcagagaactcttatattaaaaattcaaaaaggactgaaatttttaaaacacatatttttccctgagttttttattccttttaaattaaatttatttggaattaattaaaacctgaaaaatgcaaaaattgctcatatatttttggcatttaattaaaggtgaaaatgtgatacaatttatgaatttggagggaatcatgcaacgattaacaaatttgccttagcttttggatgatgatttacttatataattaataaactgaacagttactgactgtactgcttgaacttggtgcctatcagggatggcattccgaggccccaaatttttcggaaatcagaattccgagccatccctggtgcctatgatgaccaataaatggctgtcaaaaatgatattttaacaaaaaaaatgaatggcaccgaaaaaataaaaaataaaattaattaataaaaaagtttcgaatttttatctgttactgttttgttttattagtagaaatttttaatttatgacttttaaatacgtcttcaaaaattcttttttttcaaaaaattttaaaacgttttttttcgaccacctcaaattaatagcactgattcttagaaaaaatacctatannaaaattttcgaattataaaataaatgatggcaaaaaacatttataatatatacctatatcggtcggtctacgtcagttggtccccagcatatttttccactataacttttttctttgtcacccaaatccaataaacttggtatcactcgaaagcttaacatgtttatatttttttaagctattgcttcgagaccgcaaaatccgaaaatggcctataagaaaccaagattctttattttatttttttagttgaccaaattctataaatttggcatcaatcaaaatctctactagtattgagtatttactaatagaacctaagcgattgaggaacacacccaaaattggtccattaaaaattgcaaaatttaattgtgttttggacacaaaatttaaagagtacgcttggcaaaaaaacgcacatcaaaaccttgttaaacgcatttttaacttttgaactcacatcgttcactgtctccatgcccgcggtgttctgctccgggttctcaatgacaacaagcgactgtgcgtcgaccaccatttcgccgcgttcgttgaccatcacctgaacaaaacaacattttttttggcgccgagcagaaaaacgggaaatcttggccatttccgccaaattttgaccatttagagtcaaaattttgaattttttatctctctctctctttctctctctctctctctctttctacctgctctttctctctatctttcacctcccctctctctccataaaattataatttgaattttgacaatttaattaaaataattaaaaaatggtaaaatgtctgacaaaatgtaaggctcagattcttgaaaaaatcacgacgagttaccaacctcatccggtctcggactccgactgcgcctatctccaaaatctgcttcaaaataaactttttcaagccctgatagcctaaacattctgtttattaggaacattatttctgttcaagcgtcacatcctgctgttggggaggaggaggaggacacagtttattcaatgacgaagaaacaaaaataaaatataaatttctaaagtaagaaaattggccaggaaatggtgaaacgaaaataataataacaattattattattattatcaaaatacttagaaatgaacgaactttgcatttcgacatgcagcaggggtttgcactgacaagccataaacagaaaaaaaaatcggatgggaatatatataattcgggtggttccccacacccaaaaattgaactttgactattctcaattgtctgcattcccataaaaatttagtttaattcaacaaattaaattgcttttaatcacattatttatggacatcaattagtgtaaattaatgggtgggtgacaattaaaactttgtcctctttgctcctgatctcctctttttttgtttttttcattcttcaatcacccactcggaattcactttcatttctgctgaccgttttctgtttcaattaaaaatggcattgactgaaaatgtcaattttaattatttatttaaccaattgccatcggcaccaaaagtgccacaatcaaagacaattcgccgacgcggagacgggcagcgaacgaataccagggcgggtaatactcagctggacagaaagaaaaataaaaattatatgaaaatttaaataattcaattcaattatcctaattataggcacttacattttacaggcagttttacattaaaatagctatgtaaaaaataattaattaataatagctaattagtaattagttgtccataataggcacttatttattataatcataatcaatctattctttattcatatgaggaaaagattttcgtaaaacaat

SEQ ID NO: 16547 - DNA, 1494 bp, Heterodera glycines
ctaactgataaatagatcagatgaagacaaaattgattttctagataaaatacgggccggactcgtacatgggttcttatggacacttaacttgcaacccctatttttttcgacttatacgggtttttacgggctacggattttacgggttagccggttaattcgtaccccgtataagtacccagccaaacataatccttactcttattcgtatatgtaattctttatagggtttacgggtttttccaacagataaaaatttgcatatgcatatttctgcctgaatataatccgaatttcgtaaggtcctcaagccaccgtatcagcacaaatcaagagggaaacacaaaagaatgggtcagacatataatcagatcatcgatcagagagggcacattgattgtaaatccaaaaaagtgatcagagaccttttgattatcagatagaatgatggcattatgaaatttcctgacacataaacgaagtaaatgctgcaattcgccatttaagctacggcatttccgtcgtccatcagttggaacgcggtgatttgggaccggacggcagcaccggcggacgggcgcagggcgcggcgccgagtggggacgaagcggcgattattgtgcacggagtcagcaacaaaataacgcgcttcaatgtgaaattttgtcaaaaatattaatgaaccctcaaaaggcaccattattaattaaataacccagggaacactcattaatatcaattaccaattaaatgatcaattttatcccgagggcatagtattaaaaggtccttatggcactaattatcaattaaacactcccaagggcattatcaatgcgttgcgcgcccgtggcatcgaagcgtacggcaccacgtggggagacggcggcacgacgccggtgggccttgtggagctgaaatgtgcctatgtgaagcagataaggcgggaaagcaattaatgtaattggttttgattaaaccattctcattctcagaagtatgattatcgcggtgagggaatatacgggcaaaaaggtggacgtaattgcctattccatgggctcaccattggcgcggaaggtaattaattaattgatggattggaaatttgaaatttaaattttaagtgctggaatttgttggccttttccaattttttgcttaatcatttgccaatttcaggcaattttgggcggcatttgcgtggacacgcgcgagttgctcggcgtgccgttgacggaacacgtcgatacatttctaagcgtggcgggggtaacaaaaaattaaattgtttcattaaaatgggtatttgttaattaactctccccctaattttggccaataatggcgccgctctgtgcgttttgcccgcccttctgccgcttggcacgtgcaaccgcaaaaacgggttgcactgcgagtccgagtttctggcggatgtgaactcgcgcaggaattacgagggcgccgccacgttcagcatattctcga

SEQ ID NO: 16548 - DNA, 1659 bp, Heterodera glycines
  unsure (1)..(1659): unsure at all n locations
acagtacaccatccactcacccacccagattggctaccgtatctgctcccgtctgtcctccccaattgtgggcggcacgggcttcgtgaagaaattggagatgagccacgacgaagtgttggacaaaaccatggaaatgcaaatcaatttcatcaaacggcacaagccaaaatgaaagaggaaaaagcaaacagaaaaagtgcaaatttattttaaaataacaataatcaacttaaacatttaaaaggtcaattaataaaatttgaattaaattttaaaacacaaaataattgctaaaaatgccgaacaaaaactggaagaaaaagccaaaaggttgtttaaaacaggctattttttagagaacgacctgaccgggcccggtttttaccgggcccggaaaccggttgcttctgaaaatatcagaccggtccggtcgggcacttttggaaaatccggtctctactatttttctctaaaagacttacaaaacgacaattttttttgtcaaaattgtttaaattatttcattatcctaatctcttatttttctgatgcattaattcataaataattttttttggctacaagtaaaaaatgtgctaacggaatatgtttttttatgccatactccaaaattatgtttttttaatgtgataaattttcagattgaaatatatgtattcaataagatattcaattcaatctcaacgattcttggcatttaaaattattttctggcatttttccggtccaccaaaagtgcaaaaacgaccaattcgtaaacggcgataattgtcaggccaaagtaaagtccgagaactccgccgacgtccgctaaaagtaaaattggcaaataaacaaaaattaataataaataattttattatttctctttttaatttttatttttaatttgctttgctttaatttaaatcaaaaatttgtcaaattcattatgattgacaagataaagctcaaagaaaacattttacagagaaactcagggtttcatggcatttttaaccataacttttaataacaatgaccagcttaacagagaaacccaagttcatggcatttttggccataattttatttgttgtaactttttcttgaacagttggtcatttttaatgatgataataaatgaatattttaattatttattggggtgtttgtttaattgacaatttgccctcacataaaagttcccaaagtgtgtagtcgtcccggtagacaatgcgttggaaagtcgtcccgcggtaattcaccgtcagaagggccatgttcgagctgaaaaccaacaatgaatgctcctcattgagaagcattcattcaatttttaaacaatttttattttgctttttgcctcataaaatcctccaaaagtcgcgcgccgctgttttgagccaaaaatttggcaaatcgttccatccattcgttgctctgacggcctttgggtcgccttgccaacacggaccaattctgaaatttgaacagcaaatttaattgctttttgattgataattgattgattaattaattaattggcttaattacgatggaattgtttccgtccaataattgccgcaccatttccattttcctctccnaacattctccgctgnttttttgtctcccccatttccttcgttttgc

SEQ ID NO: 16549 - DNA, 2712 bp, Heterodera glycines
  unsure (1)..(2712): unsure at all n locations
aaaaaagttttgtattnnatgcgataccagttagaatttttgccgtttttgtttgtnccgcaacttattttttcgcaatatttgaatcgggaaaaattgtgcgcaacaagccgtccgaggacaaacaatccaccgagcgaaaagattggcaatgttgtgcagtgtgataagcgatagtgcctattaataattaattaaaaattttgattagaaataatcctgttaaccttcggccgcccagaactttaagatcttcgagttgatggggccngaagtatttggcaaaaattcatgcaatggaattgatcggtttgcggctttcgccgctttctgatgttttcccgttttttgatgcacagaaattgcggttttcccaatggaaaggagattaatatcatcgttgcagacgacacaaagggcaaattcttcgccttttcgacttttctttatatgccggaattcttttgcgtagctttccaaataaacatgtttacgttttggtggcattttgtgaatttcactcaaaaaatgaaataaaatgtaatttttttttaaaatcaaattaattcaaatattcgcttcagaaaaaaatgaaaaatcaaaatagtcattcaaatttttcattttttattttcaaatccaaaaataagcacaaaataagcacgtaacgctgaaataagcatgaatcttagaaataagcacatttttactttctaagatccgacccctcaaaataagcacaaatcttagaaataagcacacttgggaactctgatttacacacaagcgcgatatgaacaatataggaatatcacatatatacaaatagctaaggcctaagagattcagaacaactagaaaatctccacattatgcaatataaagtcatcatcatagatcgatcctcccattatgctttcttctccaattcgatcaggtgtttcactccgtcgtacatctgcttcaccgcttcgaactccgtgagaccaagacgggccttgtttctgatgtcataaacgccgccagcgctaaataaaggacaattgtttcaaaaacaacaataaacaattacctctcggaatgttcgccgtgaatcccgcggatttgcaatttcaggccgtcgcagatggacttgaattcgggttttgcgctgattttcggaagtcggatatgcacactcgcgcgaacagtcgttcccaagttggtaggacagaaagtcagccagccaagacggtcgtcacgcgaaaacggaactttcgattcgatggccttgactccctttatgagacgctccagcacttgtccaacattgccgccattttgcatcgaaatgatgcggagatgcttaattaaaaattatatcaagatggaataaaaaacaaacaaacatacatcttcctcgttgacccacaccaaaaaggttttcttggcgttatggaaaattccgcgtccggtgggccaataacggcacatgccctggagcggatagtaggtgcctcccaactcggcatctaaaacataatgttacaaagaaaataattagcggttgcctaccgctcttcagctgctcgaagaccgctgtgacctttgattccatatcgacgcaattctcctccgttgccggttgcttgctgctcggtccaaagccaccatgatagtcgttgatgatcgggtcgaacaatggtttgaagagtgtgtaagcctcggctgaatgaatgtttaatggttgatgattgattggctatttaactgaccatctggcgcatacacgccgacaccactgtccaagttggcaacccccgactggatgacgtccaaaaaagtcgctccgagcttggtacgcttgtccttgcatgcatcgacgacgtccttggtgaggtacttcttcaacaacgatttgcaatcagccgccgcctgaaagttagtccaaaattagagtagttaacacacacattgtgtgcacctgaagcttcttgtagccagcctcaattttgtcaattacttcctgagggacagccattttggtttatttcaaataatatgtatgtctgaaaataaaaatatgcatttaaagagaggataaagttggtgtaagtaaattgagatgattaaattggaatttaaaaaaaaattatgaatgaatgaaggacgtatacgaacgtatgaatttatatactaaaatttctctagagactcactttggctatgggtcaactccactgtgcagagaaaagcatagtactatctcgtcattttctttttctttgtaatttctctcactttggcataatatctcttcattttttaataaaaacaggatgccttttcggcaatcattaagaaggcgctatgtaatttcgacactgggtaaattcgacactgagtattttcgacactaagtaatttcgacactacattttcgacatagagaaatttcgacactgaactatttcaaaaactcactgttttcctgcattttcggcactggaccatttcgacattgagtaaattcgacactatagagaattttttagaaagtaatatggaaaatttgaaaatgttagtacatatttatgataaattttcctgttattttctaattcgtaatcttaaaaacggtagcatggtataactattggttaaatcaatgttagacaaatcaaatccagtgttagaaaaaatgattcataatcccaaatagcataatttagg

SEQ ID NO: 16550 - DNA, 916 bp, Heterodera glycines
tacttttgaccgattgtgtacgggaccccgtgttaggattgacgaagttttcaccgtgattcacagtgtagtgttggtatctattttcgaataatatacgccatcctatccattactctaccaccggggaaggttaggaatccccccatacgctctccacacgtcactcgtggatgacgctcgcctcggcaagatgtgttcagtaggtgaattcggattgatttgattgacacttaacgctttttgggattcactgaggagtatttctcgcctaaaatgacatgtttcaatcaaaaattggcacattgtttggatggggagtaaaaagcaattttaccaatgcttgtccatccgatgccatggcattgtcatcgcatagtgaaaagaccgccaaaattctcccaatttgaaaaatgccaatgtccttttgcgggtcttgaaatgttcgtccacgtaaaagtcaaatcactggctgatcagtgcaatgccaaggccaagttgtgaaggcgcaagcaaatcgaacacacaaagctaacaatcagcagagatgaagctgaaaaaaagggaaaacaaaatatttaaaatttaaattaaaaattgacattttaattttacattgcttttcctcacggtcgcacttcttgcacatctatgtaacatgggtgccactttttgggtcaatttaatatctatgagttacaaaaatctcaacctataaaacaaaaaaatttttacttttggtgtaaaattctcgcgcccaaatttggcaattgtaggtcaatacacaatacccatgtcctctcattgctttaaagcaatcatccactgtgttgtaatcaattgttacatttgaacacttaatgatggccatatgcttgcgatatagaccagaactaattgtagaaaaaaagttttg

SEQ ID NO: 16551 - DNA, 2699 bp, Heterodera glycines
cggcacacagggcacaattcgacctccaacattctgtgtgacaacactttcagctttgtcacttcacaatttgttgtaaggtgcccgcatggctcggaagtgagccagccactgagggccatcgtgtttggcttagaagagtcagattgtgaatgcgacggagaagcggatgccatttctatttgggaataacgacaacaacaacaacaacaaggtgagaaagctgattatcagggcttcttttttatgtaagaaaaatcgcgaaatatgtacataaaatgcgtaaaaaaaatcccgaatatgtaagaaatatgtacaaaaaaccaaaatatgtaaataaaattttttaataatttttttttggaaaaaaattctttgtaaagcgttaaataggtacaaaaatggcataaaactgacctaaatagatttataattcatattttatattttaaaaagttttggaccattcccgtatttgccctcaaaatcacaaccctgctgtcctaaaaaatctccatttcagcagcaattccatgtggatgtcactgatgttatatggaaaagaaaatttgacccaatttaaaataatttttattaccacgactgttttctactgatttcgcaattcactcccaaaatccattcattctctcttttcattctgagtaacgtcatcatcattcattattccaaagtgttcatttgaacagttttacacaatttatacatttttgctaagctaatttaaaaaagaacgaaatctttcttatttaatttgcctcaacaaatgtcagaccgccgaaaagaagtggaaaaaaagatggaaaaagcaatgtaaaattcaaaaatgccaattttcaatttcactttaatttttgttttcctttttttcagtttcatctccggcgacggttggctcaaagtgttcgatttgctgccgccttcccaacttggacttgaaattgcgacgatcagccaccgttttaacacatacgtggacgaccatttcaagacgcgcaaatgggcgctgaaatttattcaaattcgacgcgaatttggaaagaaagggaagaagaaattggaattggccgctttggatggagaaaaattgccaattccgaaaaagccgatgccaaagaaagtggtcggatttgaagccatttcgataaggtgggatggaagaatttcgttgttttcaaatgtaaatgccattttcacagattcatcgaccaaaatgccctcacttttctgcaccgttttcgtcgtcttttcgccgcctctccaattgtttttgccatcggttcgacgagtgatcgcattttgatcttgattttggaattgatttggccaatgttcgcgaaaaacattgattccatgcatttgatggcggatactttcttccgtttgcgtctattcgaatcgtcatttctcaacaaatgtccttcacttcgcattgtcaaattttgtgacgatgacaatttcttcatcaaatttccggccgatgaccatgccgcggcatcggatggacaagtggtggccaaatggcttttcactgccctccctgacaatgtgccgccgaagatgttgaaatgctcgttggacaaggatgatggctttttggagtcggacattgaagacttaaaagaggtgaattcggattgatttgattgacacttaacgctttttgggattcactgaggagtatttctcgcctaaaatgacatgtttcaatcaaaaacgtcctatttgttagcattttattatggccaagtgccatgccaatctttgggtttttgtgccgttccccaatcataaagtttcgttcattgtcatcatttccaatcttttaggcttttgccgaagcttcttccgccgtcaatttcatttttgtcgtccgatttccgccgtcttttgccaagtccgttgtgccattttcgctgatcaacgaattgactcgcgaacaattggcattgaaaagcactcccaatagccgtctttttgtgttcgtccgttctccaattgagcgtgtcgcgagcgaatggacaaaatgggaaaatgaggcgattggctgggattttcttgctcaatcgaatcgaattgacatttatatgtatcatgaggatcaaattggcgatgggtgagcgaatgattgattatttaaaaaacgaattcaaatttattgtttttttatttttaggattctcaacacaatgatcggcccaattaatcggaagaagaagaagtgaatgaaggaattgctgcgaagtgatccgatgatgaatttgggaattgacgtgttcttaaaaattgtcctttttttcttggatcaacttggattatgttacaccattatgatacctatttgtcgtttctgaagtgaaaaaaatttgtgcacaaaaaaactcattcaagaggtgtcgtatgataccaagattatttctgcttaaaacatttgaacacgcggcctttctttttgtggacataaatgcctgaatccaaacctaaatcaaaagggtattagtgcagtttgtccccccccctttttttcgaaaattttttttatgttttcaaaagtcatgaagacatgtttccaagggttttcctggtcgctgatcacgatccggcacccatttcgaacaattccgaaccccggacccgaactcgaacaaaaaatcgaaaattcaaatctttcgattttc

SEQ ID NO: 16552 - DNA, 1703 bp, Heterodera glycines
ctccctggcacggaaacgtgcgcacgtaactgagccctcccaataataaatagaaaatggtcattaatagagctggactttttaaatcatgcagttttaaaattttaaagtttaaataaggacatcttttaaacaaaaattttatcaagattattatattttagagaaccaatttatgggctatttttcaattcttaggggtctatatttcggtatttcattcatacacaataatttccaaaaatagccaaaatatgctctaaaactcaaaaaaggcgaaaatatatgcatcttctttaaaaattgaatgcctatcttagtgactaataattttttaagcaagcctaagcttaggcctagcctaaaagttttagccctaagcctgacctaatcaattgtacgagtcgcctttgtaacaatgtacgagttgtcatgacaccaccaaatcattgcatgaaaaaatgacatagaatcagcatcatcgcttctaacaatccctgtaacccacgtaatgatcaatttaatttaaggatttaattcgatgctatattatgttgtttcacttctaagccagatctactgtaatgggcccattcttcaagctgttcaggaggcacacctctttccagactcgaaatattttgttgacatgccactcaagcaggacccaggtttgcctaaactaacgctcgctcacttatacttttgacaaatattagtgagcactctacgggatttttacgaattgggcgattcggtaaaagaagtttcggttctggaggcctttgtcgaggcgcatttcgaagcaccgggccaagaattgattgaggtgtacccggacgactgggctccctatccaaacgggtttcagcacatcgacgattatcgattgaaacgttgggctctccacttgcacaggttaactgataaccccctgaaatatgatttttattcttttacccaaaaccttctcatttttaagttggcgaggggtggtgatttcgggatatcccttgcacttattgcttcccttttctttacagaatttggcgcgacctttgcagacgagtaaccggctgatttcaactttccattttaatttttaattcatctgaaggtcaaagacgacgttcggattcaccaagaacgctattccctcctctatgttccacattcattcattatcccgggcggacggtttcgcgagttttattattgggacacgtaaatgagaaaaattgagtaaataataatatattgcattttagattttggattctcaaagggttgttgttttcggagatgtatgacactgcgaagggagtcattctgaatctgatttttatggtggacaagtgagcgctcactttttgtttgatgtttaactgctatattctgcatctctcacaagcagccatggctttgtccccaatggcgggcgagtttattacctgtcgcggtcccaacctccgctgctcactccgatggtttatgaatacttcttggcaaccggcgacctcgactttgttgaacaggtttacacttaattgtcagccaagtttgaatctttactccctaggtacttcccacattagagaaggagcaacacttttggaatctgaacagggctcgttcgtttctacaccccgagacaaaggaggaaatgttccaatattaccaatatcgggcgaacatgaaagtga

SEQ ID NO: 16553 - DNA, 962 bp, Heterodera glycines
atttttcactttaattttcaagtatgtattttaaaggcaattttgataagaaaaatgaatattacgggcgctatcaaaaaatgaaattggccatcaaacggttgcattggaatgaaactgatgggatttggtatgactacgacttggagagagaagtacgtactcatcccctggctgaaatactcattaagcttggcacactttcaggctcattccaatacctattacgtgtccaatgcattgccgttatattcaaaatgttacgacgacgaggatgacgtcacgccgtacaaagttttcgagtatctgaaggtgtctagagatgtttgcatttatgaaaacagcaacaatcggccaatttatgtagcgtgaaggtgtgctcaacttcaccagaggcatcccaacttcgttggcgatgggcagcatccagcaatgggacaaggagaacgcatggccaccgatggtgcacatggtctgcaatgcaatctgacttcaaatcaattctaatccatgattttcaaggtagttgaagcatttcgaacaagcggtgatctaagtcttatgaaagccgcggaacaaatggcaactcaatggttggtcgtcaattataaagtgagtttttacaaaataatgattgtaaaactatgaatgtttaaacattcctttagggttatgtatcaacctatgcgatgttcgagaagtacaacgtttccatgatcaatgaagagggcgttggtggttcaggaggtgaatatgaggttcaggtaggtaaatggcatttcacaattaggttttaattttctggttattttagaagggatttggttggacaaatggtgttattttggatttgttggacaagtacgggtccaaaatctccgtctccggtgcggctgtccccaacggcgttcgttttcttcctctcgctttgattgtgcttttgttcatgaccgtagttgaaa

SEQ ID NO: 16554 - DNA, 2076 bp, Heterodera glycines
tttagttttggtcatttaaatgattagtaaagaaacattttataattttttcgaataaggaaaatttttaaatctaaaatttttatatagaaaaaaaattagaatttggcgagcaatttttgagaaaatttttcatttcttaggagtgtattttttgaaaatttttcgggtcatttcttaggggtgtattttcgctattttattgcatttttagtggaatttttcggtaaaaaacgccaaaaagggcaccaaaacggcaaattgtcaaaaaaggcatttaaggcacgaaaatcccgaaaaaggcaaaaaaggcctaataaaagtcaacatagaagcttcaaaccaagtggaaatgtaattattaaaaatcaaatacaacaaataataatataataacatattttcctcttggggccaattttcttcgcatttagtgcgagtaatttaaacagtaaaattcaggacaaacacaaatgaataatttaagagtaacaaatattaatatgtattcaacgttattctcgatccccacattattagctatttttgaataccgctaacaatgacattttatgagggaaagtaataaattgctttaatttatattaaaatttatttttttattgttagatatttttcggtaaaattttccaccaccgttagtttaattagttaaaattttctttttattcaaccaaactaaatttgataagtttgtttcagtctataatatattctgtatgatttggattattttcatacttttcttacaatgttattaattaattttgtaaaatttctaattattttaaaatattgttcatttaaccgatctttaatcaattttctgttctatgagattgtatgaagtttctttttttattgacttgttaaatacttgaattagtttttaataaataaatttctaaattaaatagttatgtcgttttcatggaacaatttgaatgatgattaagttctgttgcatcgaatcatttttaaaaattttcctcaaatacaagtgttttttgtcttcaattttttgaattcaaattctttccgtaatttacttattccttttttaattttagtttgttttaaagaaaccattttaggtaaaattaattttattctttcgtgctattacgtttatattccaaattaaaacaataatttgccacgggttttcaattgtatcacagattcaattttttttttaatatgtcaatttaaattttattattatttaaaatatctatttgaatttaatttattttgtcgaatgggtaaaatttttttcattatttaaatttaattaatttttgtatattgccaaggacgtccttggaaatgagcatatggaaaagttttaaaaattcaaagaaatttgagaaatctttgtgatttttaacaatattttgattaaattatggcattatgtcaataaaaatgtaattttttctcatggttgagaatttttgaaatttgatggcataaagtcactatttttcttaaattcttaaagagaatgaaacctaaacaattttaatcttaaattgtttttttaaatattatttcaaaggtgctcctttttatttttgtgaattttgaatattttatttataaaattttgatttaatctttatttgttgtttatcttgaaatgacttttattgtgtttattttatttttcatattatttttactggtttttttattgtattattgtaattttttcttccctttttggtgttaatattttttcttgtgtaactttttgatttatattattttacaaaatttcaaaaaacttcgttatgttgcaagaagttatgacaaaaaaaaaatgttcagaaaaaacttgatttaaggatagtgtgcaaataataaataaacccaagcctattgcaaggactaattacggtatatccactgtaataaacctcccatgacacccattcattaatctctcttctgcttcccccccccccttgttttctttccgttttccattcctgattgcttccccctgattttttgctcccatcgcttaatcctcccttctcctcccttttg

SEQ ID NO: 16555 - DNA, 1669 bp, Heterodera glycines
tttttttttaaaaaaaaatattttttttaaaaaaaaaaaaaaaaaattttttttttaaaaattttttaaaaaaaaataaaaattttttttttacaaaaatgaggaaaagaccaaaacaaatttttttttggttttgactgtttttttaaaaaggatgcaatttcctttttagggattttaacttttttaaaaaaaataaaaaaattttttcactcaaaaatatttaacataaataagataaaaattaggttaaggttaaaattaacacatccaaatgtatagcaagagcacgatgagccaacaaaaaaaaagaaaattaaaagaacgaaaaaaaaaaaataaaatgaaaaattaaattataaataaattatataagatgagttacaaaaatagtcaacaaaattatattcttttaataaataaaatttcaaattgacagcggcaataattaacttaaattcaaatgaaaattgtttggtccaagaaacaaagattagaagcgattgaaaagaattaattgaataaaaaataataaatgaaaatgaaattcaaactttaaaattatttcaaattgaattaacaataaaattaaaataaatcttgtaaatgaatatttttaatgaagacaaaaatattaaataaggaaaataaattttgatcaactgaatatatacaatatattattaaccaattttattgattttgttcaacaaaaaataataataataataataatatgagaattatatatttttttaactacttcaactctttttttcagaagcaattaattgattttctttttagaattttaactcctctgtataacttttgattttaaaaattccaaaaaatttcatttagtttcaaaaaacttatgtacaaaaattttctacataagatttacgccataaaaacattaaaaaaactatcaataaataataataatttatattttacggaacataagcaataagagaaaaacgaaaggacgtttgttcaatcgaccacacttcaccataattacaataaaatatcgtaattttctttgtttttaacttaaaactcaattcatactttattaaaataatttcttaaaaagtcttaacaaggactacaaacatttaacaattgaattctttaaatgcattttattattgtaataaattactatttttaaacaaataagaaaatatcacataaattgtgagaaataatattattcaaaatcaataatgtacaatattaattcacaaaaaaggtaaataacaattatactcgtttcacttatcgaccggaactattaatatatgtgaattaaaaatttaaagcgtcaattttaacgaataacttaaataaataaagcacttttaactaatgggtaattaaaatatctctaaatatataaattgtaaggtccaaaaatttattaaaatattattcttactaatattatcattcgcgcggaaatggactaaaaaataattatgtattttgtttatatagctaataaaaaaatatttaatagtcaaaatgctaatcgtaatatttgaaaaaaataacagaattccttcacacagttttttttttaattaacagattacaggacatgagagaagggattatgtctgaagaaaacacaattaatgaactgatgcttataatataa

SEQ ID NO: 16556 - DNA, 2048 bp, Heterodera glycines
aaatctcagtccggaaacagagttaattttaaaaatattatttaattttttcttgcaattgaattaattctggctaaagcagacgtaattttgtctaattttgggcataaaattaaattttaaatattttttgttttagttaaatccacaaatgtcgggttccctaagtgtcggatacccaagtgtcgttcggtccccaaatgtcgggtccccaaatgtcgggtgcccaaatggcgggtccccaagttgcaaatccccaaaaagtcgggtagcccagcaaaaaatctattggcttcgttcatacaaaccgagaggagtcgattggtttttatttagccattttgggcttcggcccatatgaccgatgttttccctaatcataatagcaaaatgaatttaattactatgttcgtttcagcaattttgtgcttcatcaaaaggttcggatcgaccaatgtggtcgcgagtgaaactgatcgcctcgcctcatataacttcgaattgtttcgcaaagacttggccactattcgctacatgcttctggatgacatcgaacttttccagagagtgcctcgatgtaagttgttgaggccgcatttttccgcgttttgcgaccgcggtgaaattaggccacgttctacatcaattttcaaaaatttaaatgatattttttccaaaatatatgtaattaattagttgttgtacagggaccgggaatttgttattttcaagtaaaattataaaaattaataatttaacgcaaaattaaattataatatatttaatcaatatttcaaaccaaatttatttcaaatatttcaaacaataatcattttggactaaatgatcgaatattattagaaatccagatttacatttcaaatcacttttttctgcgcgcttttttcaaaaaacttttgggaaagaagggggtccgggaaaattcaaaatattttaatttctgtagagggattgaaccatgggaagaagattatcgatatcgaaaccgggaaataaattttaaaatccgggaattgggaccgggacctcggatgtccgggaatcgcccggtaccggacccgtacaactctagtaattaggcttcagatttcctaattttttttaaagattacagtaatttttattttttcttcgaaatttattgtatttctttcaggaaaggtactagggaattgcccataaacataaaaattgttatattttgttcattacaattgaaaaattttcttgtattttgtcatttataatctatatatatatatttgctaaatttgagtgaatagcaacacgtacaataaaaaaattacaaaagaaagcctaagcttagacccaagaaaacctagccaaacctaaagcttttagacctaacaccctaaattttacgcatttaataatattttggtgttttttcgtaatatttttaaaaatatttattatttttcaaatcccaatcctagataattaaaataaaaattttatatttgcatgattctttcccattaatttttagacttagactgcatttccgcgttctatgaggaggaagatgaatggacacaaagattctgggaaaaatgaagaaatccttcatttgaccgttggaaattttcattaaaatttggattttttaaaaatcttaaaaaattatgcacaaaaatatgaactgaaaatttttgaatatttttgtttaaacttttttttcaattttgggtaatgctctgaatttatttcattttcttttcccctggcggaattttaactaatttttattaagaagatttctagaattatcgaaaaaaaatttcatgtaaacatattgcataattgaagcattttatgcaggaatctcggatttgctgataaaattttacttactctgaaggcctctggtttccaaaactttttcagagcaactaaatagaaattatttttcgggtttgaaatcctttgcatccagccaccaccattgaaaataagtggctggcttggttaaaacaatttttcaaatcgaataaaaacctgagggg

SEQ ID NO: 16557 - DNA, 1390 bp, Heterodera glycines
atatatatttttgctaaatttgagtgaatagcaacaccttttataaaaaaattacaaaagaaagcctaagcttaaacccaagaaacctatccaaacctaaagcttagacctaacaccctaaattttacgcatttaatattaaaattttatatttgcatgattctttcccattaatttttagacttagactgcatttccgcgttctatgaggaggaagatgaatggacacaaagattctgggaaaaatgaagaaattcttcatttgaccgttggaaattctcattaaaatttggattttttaaaaatcttaaaaaattatgcacaaaaatatgaactgaaaatttttgaatatttttgtttaaacttttttttaactttacattcagaaaattcatggtaattaataaattaattacataaagacttaaatgatacaaaattataaattgtcaattttggtaatgctctgaatttatttcattttcttttcccctggcggaattttaactaatttttattaagaagatttctagaattatcgaaaaaaatttcatgtaaacatattgcataattgaagcattttatgcaggaatctcggatttgctgataaaattttacttactctgaaggcctctggtttccaaaactttttcagagcaactaaattgaaattatttttcgggtttgaaatccattgcatccagccaccaccattgaaaataagtggctggcttggttaaaacaatttttcaaatcgaataaaagcctggggggaacgcatctcggtgatcggagatcgtcggggaggacaggtcgaggataggggacgaggaaaagggaactcgggagagattaacaaccatatttttatataattaataaaacattaaaagttttagtgtccaaaattcaaaaaatggtgggatgaacaatttggagagtggctgagggtgaattcattttacactcatttgaattgtcagaaaaggggattaaatttggcaaacaaaaattttttctatccgtttttaggaccagtgatcaatccgtcagtaagtggacaatccaatccgtcagtggacaatccgtcagtaactaacccataagcaaatttatttttaaaatacccagatttatttaaaataatgtgaaaattatttaagtcgctaaaaatgtgaattaataatttgtgttattttataaaaatgtgaaatgatcttaaaagaaataaatgattatttatcgagatgctcaattaaataaattataaagtaattagaaatgttaagaatttataaaaaattatttttattaaatttaacaattatttttgcaaaatttttgatcattgctcaaaaaaaatttgctgacgaattgtccgctgacggat

SEQ ID NO: 16558 - DNA, 1908 bp, Heterodera glycines
cggaagtcggaattccgacaccaaaaatgtcggaagtcggaattccgtgccatccctggtgtacaagtaatacagcaaaatttgggcgcaaatttctaatttttaaaccaacagtgtcgttaattaattgggctgattggctgtttaaattgtgtataaattacacctgccgatcgggaagaatgtcaattttgtgaaactgattcgaaagtaattaggcaataaaatggaatggtgatttttatagttaaaattgctatatttgtgcaatttttgacaaatttgacagtggtattaattagggatagatgggtccgggcatttgagcaaaaaccgggtccgggtattgccgggtccagaaaaaccgggtcgggtcccagtttttcaaccgggtcgggtatcgggtctaaccatgtattgaaaaattcctaaaaaaaatccattttttcaaaaaaattttcatgaaaataaaagcttatactttcaaaaaagcatgaaaaatataatgtttttcaaataacgctttattaattgcccaatgttttattgttattacttttttgcggtgcgctttttccaaaaaagtttttgtttacagactttatttgttttttaagtgttacaacaaaagaaattatatacaaaaatggtcaaacgaattaaaatgtagaaattttttaaaaaaatgcaaaattaattagttaaatcattcgcatggttcgctggcgccaagcggtgaagagccatcagttgaatacagctcaaaattggacttcaaatgaaccgcgtgggccacaaaattcacttcgggcttcaaaatacgctaaaaagaaaataaatttatttaaatataataattatttgagcccgaaaccgagatttgctttacgccgaaatttttaaaataacaaattattagtaaaaaaaattgaaaaaatatttggaaaaaaatacactaattaataaatttatataaaattgaatgaaatttaattaactaattaattaattaatatttcaaaatggtaattaattaaatatttttcataaaagaaattcattataataaaaaatttgctcttacaattggtaggccaccaacgcctggtggcaaatccaatttgcatccctttgccaattttttgtttgccgactgaaattttcaaaaaaattttttaaatttcttaaaattttcaaaaattcgaacctcgggcactttgtccttcaccaggccggtcagtgagtcgagcccatcttgggtcatgccactttttatgtcagtgccaatgtcggtgagcaccaaagtgggcagtgttaggttggctttgatcaaatcgcctgaaaaattttattttaaaaattaaaaattaatctaattttaaaatattatattataatttttatttgaattttgtttaaataattaaaaattttattagaattaattttattcaaaaaaatttactaaagtgaaatttaatttaaattttataaattttattagaattttgtttaaataaatttttatttaaattattgaatgaattcccaaataaaaaaatttacgacttatattttaaaacattttttctttaattattttattatttttttaattatatttcttaataaataatttgttctaattaccctccgttttgacgtcaatttgtgccactgatgttgctttaaatgtgcccaacttcttcttgtttgtgtgaccataaaattccaatttggcaatatgctccaggataattgtagctgaaaaaatgatgaaaaattaattaaagaaaaaaaatgttgtaaaaaaaattcttcaaatatttaaaatcccattaaattttctataaatttaaattgcggggagaaatttcgaattaatttctaatttataaacaatgaaaa

SEQ ID NO: 16559 - DNA, 706 bp, Heterodera glycines
ttccagtttttaagatcatgaggataatcctggccaggggactcacgactggctaacttaaatctggcagatactactttttcggaaattttcagcgccggaaagaaaacatagaaattcttagccgtttttcgctgaaaaggactaattttttttttcattttggagtcacatttccaaaaatatgaaaaaatggggggggaggtgtgggaacccggcgatgcttgggggaaaatgtaggaaattttaatttttttttttttgcccaaggcactgtttttttttgaaatttggattagtgtaatggattaaaaatccgtgccaaatttttgaaaattccaggaatttttttttgtttgccatgaccccgaatcctagatatgctctctttttaaatttccacctatgcatgtggtaaagcattgagttgatggtgtactcgttgagcacaatgtcagccattttgcagccttttccaatgcagggctaggaaaaatagaatttttcaaaaaaaaattcaaaaaattcaccggaatttccacgggcatcggcgagaacggcgtacagccccagccgcataagctaaagtcgcctgaaaaaagaaaatttacaaaaaaaaatttgtcgaaatttttacaccttttaaactcaatgtgtaatcattgtcagtggctgaactgccggtcaattggagctcaggaaaagg

SEQ ID NO: 16560 - DNA, 2173 bp, Heterodera glycines
tccaattccaattggagtttcatgtcgtctccaagagacttagaattgagagccgggccaattgattatgtaaatctctgattaaattttcatttttcccatacttgtcctttaataaggacaccgagagatcataattatccctggagaagggcaaaagtccttgaatgacctttttggcttcacccctcaacagggaatccaaataactcattttttgtacgtaatccaaatcagcatcagcatgtattgtcgattcgaataatggccaaaagtcatcccaattactgccatcgaactcctttaggtttaattttggcaaggcaatgtttcggcgtgccgttcctccgggcccatcttgaagaagacgatcaatgttccctttcagcgtgcgggtatcggccaatttatgatttgctcttcgcaacaaattttgcagatcgtttgcgttgactgatgcacgatactggcgttgaaactccgttttttcatcgccgtgaagcgtagaagcctcttgattgtacaatgcccttgctgcctttatttcgtccacttgcgtctgaatctcgtccgcaacttctttccattccctttgatcacaaattaaattatgtctctgttgagaggttaacaccccttgcggaagaatgggcaatggcttgtccagatataactcaattgcatatttagctgtttctatgcgttcgacataaatgtccgacattatgatccctttttaagtttaattcagattttatttgatttgactaaatagtcacgatttgattcgtaaaaatgtatcaacttgataattcggaagcccttggttaatgatatgaattaaacaataaaatgttgaataacaaattgtaaatgcactaattaaacttcaaaaaattgaaattgtttagtcaaaactgactaagcaacgctctccccaaaaaaaattaaattagtaagttcaaaactgacagcaactcaacaaaaataaatattaaatgcgtaatcaaaatttaatatcaatagacaaatacttgatcaggactgatcaaaattaatcagaataaatgtgtgaagtcaaattggttcacaaaaaaaataggttcaaaactgaccgaaaaggatgtgcaaacaaaaagaaaaaattaaaattctatgattggacgtatcggaccgtacaataggttttggggtttagggttagtaactgatagctgcggtcgtccctgtggggacaggtcgccactaacgcaaaccgcttggaatgggacttaagcggcggttgcctgcgcaactgtgaatgaatgggccgttgggagataggatgttaagaccagattgttagccgattaaacaatcgactaattgacacgcgagggatagccggttaaataaccggctaattggccagttggctgtgcttgacctgatccaacggcgtcaattggtcctcgactggtgtgtgcagcgatcagttggcgacagcgattggtgaacaccggacccggtgatgctcggacagaggcgaagagaggtccgagtggtgatcagttggtcaacggagaacggtccaagtggtgatcaattggtcagcagagaaaggtccaagcggcgatcaacggagtgaagaatggagagcaacaaaaaaagggggagaaaacaattattttggaaatgaataacacagtggacaaaaatgccaaacgatggagcgagactgatcgggcaaaggaccgatcaaatgattaaccgggatttcaagcactagtgcttgatgtgaggggataatgtgctaaacagcaatcggcgaatggaaaccacaagcgatccaaatcgcttttaccgtaccaagtgtcttacggtaccgttcttggtcccagggttgggaattccctgcttacagtttttaggcccttttctaaaagacgattccctcccgggatttaatttagaaagggaaccccgaatctgatgtttattcaggattagaaaaagccgactttttccccttgtttgacaatttgacggagcaaattttattgtcagttgagatgagcgaagcaaaaattatatgaatgaaaacggggaaaagaaaatcgtccatcggtgggggagggggcggatcgaagggtcgcaacagtttaaacgatgtgaaatgtcttccgtccatcgt

SEQ ID NO: 16561 - DNA, 1106 bp, Heterodera glycines
tcgatagccctaagtgttttctattatcatgcaaaatttcaaaaaatttaattaagtttcaagaaaattatgaccaaaatgtttaaaaaaaaaacttggttttttgagtttctcaggtcttaacttttttgaaacctaacgattttttttgaaattttgctggataatagaaaacacttaggttattgaataataccaagattataaaatttaattcattttgagttatcaataattttctgtcaaaaattttaatcgggtttttgggcatttaagaaaaatttccttaaaattaaaaaaaatgttaattatatacgaaaaacgcgaaatacagtgtaaaatttcgtatttcttaatatttgctcaatatttcgactttttcaatattttggtcaattgcagcttttttttaatatttatttaattttcggaatttttaataaatataattcgcaaccttagttatggggttttctttttctggtttattgtggtaccttttcttcggtttataagtctttttttatagttttttttgttttgttaatttttgttaatttttttactttttttttagctaaattaattgttttttaagacaatacaccttcttttttttacgaaattttttgaaattttgtagactgatagagaacacttaggactatcgaatacatgaagaaatacaaatttggttgcttttgagctaatttataaataatttttcatcaaatttattgatggttttttaaataacgactccgccccgaatgaatgatatctttgtcgaaacagctgatttgtgagcatttaaattctttgctcgattatcaacctgtaattcggccgttcacttaaatattggatggtcgccaaccattatcattctatattaaccttaaaatttccttttaaatttcttactaataatttgtctttctccgttttaagtttgttgatggccggccttgtcaggttttctgcctgcaaatcgaagccacatgaaaagcataaatcagaatgagttcgacaggataacaattgagaatgcttgcagaagattttgcaaatcgtgtcccattagaatagcatgagcctattcttat

SEQ ID NO: 16562 - DNA, 2322 bp, Heterodera glycines
tttattaaaatattgtcaccatgcttttcttcccctatttccttaattattattgagaaacccataatgaatataatcgattaaaaatgtttccgggctttatccaaatttccaataatattatacaaaaagatttattatttttttttgtaaatgtaagtgtttcctcaaatgtttcttttatttttttattatttcttttccccaatttccaattcaaatgcttcggtaagtttcgtttttttttgttttgataagcttttccttctctaatcacttcaattattgaagattgaagatgaagcattggttgccattgtgaagggtccggcattttttgagggattttgcgcgagttacgggatgacttttagtgcgaataataaacttttggcgcaaaaatatgaattacatcttggcgatttgtttttcctcagaaggaattggaaatgcgaagaagttattgaattgattcataaagaggtactaatttgcataagctaaacaattcaattaaatgaaattttaatggggaatttaggcaaaaatcatttaaaaagacaaatatttttaatgtttttaatcatgaaattagtaagaaaatgaaacttacgaatggactaaaccgaacaattaaaaaataaaaatgaggtgttttctacccaacattttataagttttagaaatttaagacatacagtaattcaaaagtggaagaatgtaagaaattcgggaaatatgcttatgtgttgtacgaatatttgttctgggagtacgtccgaatgtccattgaaggttttgaattattaagcaccaaaacttacgtaaaaacaattaagcagttgcgccgaccctggtaaacaaattaatgcccgaagtgcgggagccaaagttcaattttgggtttaactctgccgggacactaattgaagtggtcaaaagtctgggccaaatttgggcattcttttttgataagcagctcagaaaacggtttggcacctattggaaatgcatgagtgagctcagtaattacaagcgtaagcccaaattggcaaatgaacgagaaatcgtcgagattttggagacgaatgccctgaggctttaccaacattatgaatatctgtttaacaatagcgaaacggccactctgagtcccaactcaaagttggaaaatttattccgaactcttcgcaaagtttttgataagaatttggaagaaatgtggagcaaaatggaaatgatcaagtcatcattgaatgaactaaatgtggaaatttcagagatgccattttatgacattgacaaagcggtgagttcaaagagaaagttactgccaataaactaattatgcacaattaaataattcattaatatattcgtcatttatttgatttctgctgatcttcagatcaaggacagtgcctttcttacatttatcatcgacagaaacaatctgaaaatctttagtatgatattaagcgctaaaactttttttaacgtttttggatcggtgcataaaataaatgtcggcacttatcctgagaatgtggtaggatatttggcgcaagaatatgaagcttatcttggcattgtgcatttgctgagagagaaatggcaatgtgccaatgttttgcacgagcagaaaaaatgcgaaacgttccgcgattatttggacattttgtatgaatttttgttccatatgtattatgaaggtaatcacacagaaaagacaacaaaataatttaattaaaaaatatttaagggcaaaatttagcgatggaacaaaataaatgcgcggttaggccaaattttgtgcttggcaacgaaacgaagattctgtcactgattgaactgttgaagaaattgggccgaatttcggcattctttttttctccaaaatattcaatgactttcgcccacaaatgggaagtgtttgtgcattataattccgagctaaaattggtgattgaccagcaattagaaaatgaaaggacccaacaatgtccaacacttgtgaaaagcattaaacatatgaagatccgatcgcagaaaaggaagccgaccatggatttaagcacaatggcacaaattagggggaactttgtcaatttgctggcgatatgtgccgaaacagtgaaaaggatgaatttgaaggacgtatttggcgagtacgataacaactgggattggttgttttcaaacaaagaccaattaacggtttaattatttaaacacgattttaattgagccgcgttttaattagttaaattgttttctttaatcagcagattgatgacaaagtgctgttttcgtatataaatg

SEQ ID NO: 16563 - DNA, 1732 bp, Heterodera glycines
ttcataactaagccgcagaaaaaaatgtaaaaacaaaactttcttcgcttatttataacacataaaatcccattttattaaacataatattttagtataattaaaaattatatatttatttcatttcgacgcattaataaacagaagggcaacgtgtatttacgtataatttttgaagtaattatcagtccataaggactgttcaagtcgtaaaaatcgacaatcataaggagaatccattcggcaattggtgaaagttcggcatgccctcgggacagaatttccctaaatttaatgatgctttaaatagacaattattacaatactttgcttactcttttctaaaccataaatggcttttattgtagtcaactcattttttatcaagaaaattgattttatagtttttttttctttcatttttggtttcggattcccttttaaaaaatggacgattcagtgccctaattcctttctgagcaattttgaggattgggacatattactagggctctaatttatagttgctaaaaacggccaaaacaattagtttttagattttaaaaaatgactttttttctactgaatcaaatggccttaaaatgactcaaaaaagtattttaaactttgtttaatgcttccttcacacttttttggcgtttttcagctttttgggattttgatgattgctcttttttgactttttaaggaaaaattgatgaattatttttaattatttgctattcaataagagtttaaaattaccaagtgattagataaattgcgaagagaagatttgcaattgaaagcaaaatgatggcgtaacacattcgaacttcaacacggtgactgcgctgcttcaaattcatttgtctgacccttcggcacattaacggataagcaaagagcagaaaagccaagtggcaaatggcaaacattttggtgatattgtaataaatttgctaaaatgaagaaaattcaaaaaaaaataattaatatcaaacatttgtaaaccgaagctgtgaattccaacggccggttatccaaaaaagattcgaaaatcaaatttagaagaaaaataaatttggaactttaaaaaaaatcaccaatgttaaataactcattttgtattagctgacaaaaatattttgagtagcgcctccattcccgcccatattaaaaaaatttacaattttcatacaaaatttttttttaattttaaaattaattttcctatatttttatactcctattttttacttgggttgaaatctccatgaacacgaggccgacaattttgtgttgtccttcctcaaacggtgttctcacttcagacaatcgaaagcacacagaatgccaaagaattggtgcagaaattgccaaagcgaacaaaagaataattgccaataaatatttgctaattttatgtgaccaatggcaccgatacatttgggaacaacaaatggcacaaaaacggttcaatgacattagtaaattcagctaaaaatttaaatatattttctaacatttcatattgctaagaaattagaataaattgctttaattttaaaaatgcctgaaattggattaagcccaatgtccatagcaaaaagtaaattaaattcgctgcggcgtttgcatgattcagcggataaaatatagccggaacatagccccaatatgcgcattttttgacaatgtacaataaaaatttgctaaaatgaattaaaaa

SEQ ID NO: 16564 - DNA, 1125 bp, Heterodera glycines
gtgcataaattattaaattattctgttctccaccatccacgaatgtaattagcaaattccgcgatgagaatccaaaattagcaaattaaattattaccaaagctaataaaaatatgaaagatgataattattaattataagtgtaattaagtataatgtcctcaatgtcattttaaaaaattataaaataagggaaattctgtaaaaaaaatcagaaaagatttgaaaaatcgttgccatattgggatcaaataaataatactcagcaaattatacaaaattttatctaaacaaaaaaaaagttatttttttagtttatttaatgtattatttgtaaatatttgaaataaatggactaatggagcagtttgatatgttttaaaaatttgccacccatggattagagtcaaacgcttacaaaattggatattttcaaaaaaaatgcaatttgatttcggtaaatgccgacaggccattggaaaatttttgaaaactttattcagattcatttagttcaaaatgctcaattttttatgatttttttaatttattaatttttatagaaattttgccaggaatttattaaaaatgataattttgtcaaacttcaagctaaaatttacattttcttgttttgatatataatatcatatacataaaaataaaataattaatttagaaataaataaaaatatagaaaaaatgtaaaaatgtttttgttttttatatttttgtttattttatttatttatttttgtttccatttgtttgacttccttttttcatctcataagaactcctttcatattgcattgttgtgctgtttgtggaaagaaacaaatgtttaagtgagaatgttattcaacaaaatgtcggatttatttttattcatttcttttattttttgtttgcattttttgaaaaaaaaaacggctgagatatatttaggatttttttatattattaagtctcccgaaaatgtctgttatttgtctaattttttgggagtatttaaacacggtgaacgaaacactcccaaaaaatatttcttaaaaatcaaaaattcttacgacgtaataatggcaaagtcgtcaatcaaaatgtatttttttttgccatttttaa

SEQ ID NO: 16565 - DNA, 2563 bp, Heterodera glycines
  unsure (1)..(2563): unsure at all n locations
aaatgccatcaaagcgttggacggcgcgtacattggcggctcaaaacttacggttctgttttgttggacaccatttttgttctttgggtggaaattcaatttttgactgggaaaattttttagattttaatgccttttcagtaaatgacaaattacaggtcgaagagtgtaaagcattgacaactgaccgaacggcgatcaccaaacaactttcgttgaacaaacgcaaaaaactgaggcaaaaaggcaaatggtaagcgcaaaatttagttttcttttttaattatttgttttgaattcgttttattgctttcattttccaatttctctccgccattttaattattaattgcattaataaaaattgttttacattttattcttttaagcgaagttgatgaggaggaggacaaagaagaaggtgccgaagaggcggacgtcgactcactaattgaaaagcaaattttggacaccggacgtaaacaatttgacattttttggcacgagggttgggaagggatgcataaattggcactaattttcaaaatcttttgcgactcgatttttctgtatccgaatttgcactgttttcaggacttttccttcgaaatttgccctttgtgtgctcggaagagcaaatacggcaacttttcgagccgtttggaccactcgccgagttggaatgtgtcgtggacaatgcgggcaaatgcaaagggtacgccctgtgcaccttcatcttcccggaacatgcggttgccgcgtggaaagcgttggacggcaccgtttttatggtactcatttggacataaactgagactatttccacagctttcttctcattaatagggttgcaaattatatggactaaaaaaacgctaaatatggactaaaaagctcaaaaatggccaaatatggactaaaaacatccaaaatatatgttttaaaccctcaaaaattccaaaaaggtttatatagctattcaatacttgcttaaataagaaatacaataaccaaccaaaaaatggatttaacatttaaaaatgcaaatttttttattgtcgtccgttgtataaaaaacacctctaagtttgccaatttcaaaaaaaattcccatttaaaaaaaaagaaaagttcgcaaaaaatggtgaaaatatttattaaaaatgccaaaatgacaacgaaaactcaaatttttcgtatttttggggggtgtaatttgtaaaaatttccaaaaagtcggtcttcaggtgtatattttcagcttttttaaatttttcttgtgaaaatttgccaaaaatggccaaaatatggactaaaaaccaaaaaatgtcgaaatatggatttattcccgaaaacccccaaaatatgtatttatatggactaaaaaccttcgccaaaacaaaaaatgttaacgcagaaatgctatttttgagcccctttcttcatagcatatgcgcagaaaaaataggtaaatccatacaatttacaaaacttactcatcaaaaacaatgaacagtttggagaaattctgaatattatctttttataaaaaaagaaaataaagggccgaatgctgcacataatcgccggcgaagagaagagagtgcggacgaacggtgcagacgacgacagcacaaacgacggatgccaaagtgcgttccaacgcgaacggaacgaaaaacgcaaggcgaacgacgcggaaggggcgacagaggcggcgacaaacaatcggtgagcaaaaaaggcaacaacaacaaagcctcggaacaattatccgaccggtggcaatgtgctgcctcggaattgtctcccattaattaatgcatttgcaactaataatgttttcctctctgttcagttgcacttggaacgcgctgtttcttggcactgacgcggtggcggagacattagcggaaaattatgaagtggagaagcgcgatttgctgctggttgacggcaaacagcagaacaggtgagctggggacggagttggaggagtacggattcgacgtatccctccgtacgcccccgtctctgttttaagtcggcatcaaaattttaagatgttttattgtttaaaaattagcctcatttggttgccaattctgctctctttccccctttaattgatatttctcccatagtgccgcggtgcgcgtggcaatggccgaggcgcgtttggtgcgcgagacgcgcaaattcctgcttgacaacggcgttcggttggacgcgttcgcccagcggcggcaccttttgagcaatggtggcgacaacgtcgacggcactgaggacggaaccgcaaaaatgagacgttcaaagacgacaattttggtcaaaaatttagacgccacgagggaagggaaaaaggaatggctgcactctctgtttggacgctttggggtcgttaagacggtgctggtgccaccaggtcggaaattgactgaatatatttcataattagaaggtaatggttacttttattcaatctgcgagttttttaaccccgatgntaattagctgcaagtattttggcattgcttttttcaataccatacatgaaaaa

SEQ ID NO: 16566 - DNA, 2999 bp, Heterodera glycines
tctgccggtggaccaacacgcggagcagttaatgtcgttgaaccaagtgcgttaatattcactgaatatctattttcaacactttcaaaattttttggctcaaatttattacatctttcaaaactcccttagaattaattattcgctaattgccttttgatttgccctctaaattttaaaagatcgttcgttccagaggctgtcttgtaacaacggcgctggacttactgcatcatttgccccaacgccgtatggccaatcgcctcccgaccaaaatcaagccatgcttgccgtcccgatggcaattcgtccaacctccggcgcaccaccgacaatgatccaatacgggaccacgaccgcgatgtacttcaatgcaccggcccaacagcaccaaatgatggtcagcagcagcggcacaagcagcagtgccgaacagcaacaagctgctgcagtccatgcctatcaacagcagcaacaacaacaccaccacgaacagcaaatgttgtacgccacgggcaccatggccggcgggtcacagcagcagcaacaaccacagcagcagcagcatttcttcccaccgcaaggagggccaagcggagcagcacacccgggtaaaagttcactcattcccaacagcaacatttaaatgacacaaattcgtatgtaattcgaaattactgtccaggaaccccttcaccatttcttcctccgtccatggcgcgacaaccgtccttaaccacaacagctgcgccttcctcttccccggccacaccggtgtcaactccgaccaattttttggaacgcaacgcggacattgaggcgctggtggcgcgcggagtgcacacgtggaccgtaagatttaaaaaattttgcttatgggcccacttatattttttatccacagaaggaagaagtgtccaaatgggtcaatttcgtcaccggctccgaaaccaacggggaccgttttgtcgaggaggacgtggacggcgcttcgctgctttgcctccagtcggagcagttgaaaacggagctgaagttcaagctgggcccgcacataaaaatttggagcgctttggaggcgcttaaacggacgatgatgtgctgaataatggagggagggatctcgcgaagcaaatataaatctgctgctgacgaatggtcatatattgtagttctcctgtgtatttctatcacattgaatttacctaattattttcatttatataaaaatatttattgtccgtaactctctcttttctcgcctttcatatacaaacacgcttcaaatgcgaagtataaaagtatgtttgttttttttggtaactgatcgggtcctaatatgtgaccataacccatatcgctcagttgacatcgccagcccttagggattggtaaccatcccgctgtagcttttaaattccagtttcaataactattaaaataaataggtcaaaaaatcttagaaattcgatcgattcggctcaaaaaacgaatcgtctttttaccaatcaacatcgttcgaaaacacttaataaaaacagaaaagaaaaaacaaactatgtagcattaatacatataaaaaaatattattaaaaagattttttcattgttaaatttatttttttaatacattcaattttttgaagagaaaaagcccactgattgcaaaggtgccaaaactgccttaatagtttgagacaatcgaaaagaagcagaggaaaaaatggcaaaagctgtgtaaaattaaaaattcacaatttcaatttttaaatttaggttttccttttcagcttcatctccggcgatggatggctttcggtgttcgatttgttgccgccttctcaacttggcctcggaattgcaatgatcagccaccgatttgactattacgtcgacgaacacttcaaaacgcgcaaatgggcattgaaatttattgaaattcgaagcaaaattggagagaatggcacaaaggaaatggaaattggcaattgtagtggaaaattgttgccaattccacaaattcaattgcctcgtaaagtcaccggattcgaacagctaatcatcgcgtaaattggcgattatggagaaatttcagaggacattttctatttattagtttcatcgaccgcaatgccatcgcttttctccaccgttttcgcccacttttcgcctcctgtcaaattaatttgaccatcaacacggacagtgaacgcgttttggagttgattttgcacaacatttggccatcgctcggaaaaaacatttgtggcattgaattgcccgcaagaactttccgctgtattcggaaattcgccccttcaattctcagtgattatccatctcttcgcgttttcactttctattctcccgatctgcacaccgaattcccatgcgatgacagtgccaatgcgtcggatggacaagcgatggcaaaatggcttttcactcctcatccaaacaatgtgccaaaggtgttgagatgctcgttggaaatgaatgatgggaatttggcgtcgaagattgaagccttcaaaacggtgcttacttattaatttacttaattagcacttttatgagtttttggggttcgctgacctgacaaaaatgatttcgtcttaataaatttttccatatttaggcatttgctaatgcttcttcccctgctaatttcattgttgtcatttggtctccgacgtcttttgttgattccgccttgccatttgatcaaaatcaaaccaacgaattgactcgagaacaattggtgttgaaaagaactaattatagcaactattttttgttggttcgttgtccaattgcgcgagacgcgagcaaatgggcaaaatgtgaaaaggaggcgattgattggcgaatttattatcaaaggaacagaatttacattcacattagtcgtgagaatgaaattggggacgggtcagcgaatgattattcaaaaattcaaatttgttgtgtttctatttttaggcttctcgacgcaactc

SEQ ID NO: 16567 - DNA, 1795 bp, Heterodera glycines
  unsure (1)..(1795): unsure at all n locations
ccccccccccccgtaaaaaataaacgcaccaaatccgcctttattgtagtagctgactgcggcattatacggtgccaaaattggccaaagaatggtgtatttgatggcataccaagcagcccgagtggtcagatagcggaaggcgtaataaactgaaattaaaaacggaaatcaatgtcaataggtgtactattttttccgtttatcttcccattntacaaccatttgtgggttaattaaagttgaatccaaattaataaatgccttgtgaaacatagtgcaaggagttgatattttttgtataaaattttgttggcaccgtctcaaaaatggttcggcgtgaaaagaaattctctgctatacaaaatttttaaaatcaaagaaaaattaattaaatcgtgaaatcaaaaaaaaagagtcggacttaattcagaaacaaaaacatacctcgcactaacgcgtattgaacaacggtgtaggcaaaaattgcaaaaaactgcactgcataaaagaacagttgagtccatgtccattgatcaggacgacgccttaaaatgcattttccaacggaattgatgttacaaaaattacatattataaaattgaatttttggttgaaaaccggagtttaaatcattatttaccaataattttgccatgtgcccgttgggtatgtcaagaatggtggcgatgccgagcgtggtatttgggttgctggaaaacgacgacaaagccgaggatgcacgtagtcatgagagccaatgtgcggcttgtaggcggctgagtcggaataggtgtacctcgtctcatagggactaaaaaaactcgaaattaattttacgaatttttttgaaaattttttgtcagttaagttgctttttatggttgaaaaaaaaactaaaaccgacaattaaaaaatttaggattgggacagcatcattaacccttgaaaaacactcgttttttgtacgtatttttgccgggaacggaaatggtcgaaattctatctaaattgcaacgaccagaaaatatggatgaatgattcagtgaggttcaattctaccgggaaatgtttttttcttttatattttcttggtaattgctacatccaaaaccccataatttttgtattattttttttactacgaatacctgtcaagaatttcatcaatttcttcctttgagagtcgggatgaagttgatgctgaagagccggcacgaagcatgggcgtcggtgtccttgaatctgacggacccggcgaaaaactccttgaaatacagaattatatttatatgaaaaaaccgggttattctttaaaatatactaattgtaagtttgttctaacatttgaaaccatttttttttgctcaaataatgcttgaaagattgaaaaaagaagtaataaaatttcgagtatgtaaaaaaatggaaacctaataggctctaaaaaacgtgttgtagaaaactttttatagttaattcaaaggcttacattcgtttctgatgcatcaattcgaaaaccaccgctgtttgtatgtatgtagagaggtagagagatgaattgaagaaatataaaatgcaaaagctaaaattcgaaatttttcatcctaatgaaaattacatataaatagcgcagatttaaaaaaaaaagaaataataaaattcaaaattggtaaaaaaaaacatgctttatttttttaaaagggcatgcatttgaacttaaaatgaatgtatttagaagtaaacacaaaaaccaattttaagacatcaatgttcaaggatgatgatgaaatc

SEQ ID NO: 16568 - DNA, 1671 bp, Heterodera glycines
cttaattcttaaacattaatggttggacctgtcgggctctttgaacaagaaatagggcaatccaaaagaacggaggtccctaatttattttattttttaggctcaaaaccagttttcagtggttttcgagagtgcttgttacgaatatgaacttggctttgcccaactcagaatcccgaatccgaattaagtcaaaacttcaaattttcgaatttcgctcttcattctaaaattgattaaaaaaaactagcaaaaaatcagtcacaggccattgttacagcaaaaataagccattcattatattcatatttgaatttaaaggtaaaactcaaaaaatttgaattttcgacttttttcgagttcgggttaggggtagaaaatagtctgcaaattcaatcacggccagccctgctttatattccgatttttataaaatttttattcaaaacgaataataaaattaacaaatattttccgaaaattttaattttcaattgatgtgatgtgaattagttcttgcggaccaaatccaatctcatccaaggtcgagaagcgattctttaaaaataaatgattttatgaatgaacttttaataccaccttaagcaagaaaaataattatacagagttttatggaacgcaaatattcataaaccgagttaattaactatcaatatgggttaattcatggaaaattgccaaaattgatttatttcttcgatttttgtaaatctcttataaaatcctttctttaaaaaatcagatttctaaattcacttactatatttttgcaaaaaaatgtcatattaaataggaattaattagccacttgtgggcagagaacaaattctcgtcttggatagtccaacaccaattggtaattgtttgacgaataattatgccctttagcaaggagcattgagaagacggccttaattaaaagaaaaattgttaaaaattaattaaatcaatttttgttttagatttttaaaattgatattttgacattctcactaaatataataataagcaaatttatttatttacagtattttaatcaaaattcattcttttgatcatttttttataattttgcttgtaattttttaattatattttctgtggaaatttgaaaaaataatttttacattcaatggcgctgctttccacattcggatgcgctccatttgtccatttggcaatcgaagtgacaattgaaccgtttttgggcatggccgaattgataaatccgcctcattcaccgtccattttgaccattcatcagagctaatgagctgtgctggagtccaacaaccactgctgctgctgctggacacttaaaatttaaatgtgctaattaaaattaattaccctaaatttgatttgccaaatccatcagaactggaaaatttcagggtgccatgccattaccatgaaaaaactttatccgatttttggtgttttaaaatgcgtcatccggttttcttatccccaaaataataataaatttttaaaatggtgcaaaaaaatttaacaaattttttatttcataattcgtactcatgtcattatattgttcgcggttattaattcgcttctgctgctgctgtcttttgtcatctgtcagctaaaaagaattgattttgaatttaaaaaattaacattttttca

SEQ ID NO: 16569 - DNA, 2438 bp, Heterodera glycines
tttgttttttcggaattttaacggaatttgtaggccctaattccgtaggtcttccagaattttttcttgctgcttccgtcgttccaattgtttcctcgacggactaatcaatttctgttgtgtctgatcacttttttctgccattgctttcaaaatgaattccttcgattgactttcggctttatattctcttttttcatgaataatttcatcattttctggcgaactgatgcaattcggtcgtaaaaatacggtcaaaatggcttccagaaagcgattacgataaacggacggatgtttgaccgagtttggcttctaaacatcatttaagttaaaaagaatttcaaaaataaattatttatttattaataaaaagatacttaatttttaatattaaaaatatagctatattttttaaaaattacaataaaaattttttgtttccttaattaagataatttaagtaaatctaaattaatatttttataataaataatttttacatatttttgccgtgtttctggaggaaaaagaaagccatctttctaaattcaaaaatataaacattttttgccgacattttgtcattttcggccaattttcatacctttctaaaaatggacatcgaagatttgtatatatcttcgagttctcggggataatcatatgtttgcaaagtgtcgattatgccaatgctaattaacagcttttggtcattttcgtacacattacgaaacggatttttgcaattgttacatttgccatggaacacgccaaatggcctaaaaaataaacaatatgtagtaatattttgaaaaagtttttcggtttttaaaatagaacttatttaataaattattttttaattggaaatttaattgaaaattatccaaaactagaagaataattaaaaaattatctataattactacacttacagctcatcaagccattcatccggtaatttttgttttccaacaaaatgcacagccatcaataaactgtagtccataatattgtgtgcttttaaaaactgaaatttaaattactaaatttgaattttataataatcaaattcaataattaaaaaccaaatctctcttttagttttattgtaaatttttttagaatttaacttcttataaaaaataccccacccccctttcttacccatgtgtcatcctccaaaagttgtaccaattcttcatgcttttccctgccaatgcaaatgccgtgccgaaacagtccctccgccattgtaccatttttgtcctcgctgttgaagcggaaaaagtccaaatcgcggcatgttttgtgctgtgcttcgtcactggtgccaaattttaattccttccgatttattgaagcgcctttcagatcaaatttgtagtgaatttttggaaagttttgcgggaaaacgctgtttatcattataaaattttgatgttccttgcttttagagtgcttgaaaaagagaatgattaaaattattaaaataaatatgaggtaattataaaacataggaatgataattattagaattgtatgaacttttgaaataaatcatttaatttaataaagacaaccttcagatcaaataatgcaaaatatttgggcaaaagtgtgcgtttgccattgatcaattggtcacgaaaatattcataatagtcccaaattccgccaacaaaaaaatttatttgttctttctgtttgcctctaaatttttgtttttcggcccaataaatatttaaatcttaatagcaattttcaaaatagttcagaaaatgggcaccgaaaattatacaaaaaaaaattgctaaaggtaaaattagtaatttaaaaaaatacattctatctgtaaatgtgtggaagaatttaatttcattttgatcagccgatttgatgaagaattgggcgtcattagtgcgtaaaaagctggcaccactttgtgccggatttggcatcaatttaagcggcttttccgctatcgaacggatcagatcttcactggtgatcacgggtggatggtcaaatacggcacgtaacgctgtgaacatatagggggcacagaaccgtaatttaaatgtgcccatgtcactaaaatttggaatatatgtatttattattattatttattctttttatcttcttttatcaattggttttgagagcatctaggtacttcggctgtttgttgattaagcttactcacgagtgtccaaaaattttttgaaaccataattttgctcgttgtcaggtcaatcaaattaagcaaaaaattcaaattttctaggttcattgtgtttttgagtgctttcgaacaatacgaataatatttgatttggatgagaaagaaaaaagtcctgctacgatgaggtgtttaagttgggagcccctgccctcaagggcacaggcagggggggcggctgatttgtgag

SEQ ID NO: 16570 - DNA, 834 bp, Heterodera glycines
  unsure (1)..(834): unsure at all n locations
ttcttttatcgactaaaaccaaactcgatcagctgtttagtgatcagactcgtattcttccccctcccaaaaaaatcacctcccgacgatctcttccactctcgaatcgatcaacatattatggaagtgccttattcttttctttgtctanttcctcctcattatcatttttaccagtttcaaaactttcatccaattcactgattgtttccaattttttgtttttgttgttattatttttgtcgtcaaattttatgtcaaaagcacttggaaaagtctggccataaaaataaaaaatggcaaaaggcatttctaaggccaatctgtgccgcaacagcaagcagactctgtgctttaattgactgaaaaaaaataatattaataaatttacattcttataagcaaggtttgccggatttgggcaaaaatcgggtccgggtagtgcagagccagaaaagccgggtaacggacccaaccgggtcatgaaaaatccaatatttatttcttcaaattaatctttttatgaaataaagcttaaaccctaaaaatactataaaaatattgtcataaaaatttatatttcacaaatatacgctttattcttttgtcataaacttattttatttaaaaatgtttgagacttctttatgataaaaatacagttgtagaaaaatcattaaaaaaggctcccggacaatccgtcagtggtaatccgtcagtggtaaatccgtcagtggacaatccgtcagtaactaatccataagcaaatttatttttaaaacacccagacttttttaaaatcatgtgaaaattaatttaagtcgctaaaaatgt

SEQ ID NO: 16571 - DNA, 683 bp, Heterodera glycines
aagaaattgctatgcgtggcattggtgccgcgatattatcgaatattttagtttttttcgaataacgacaaattttaaatcaaacatttttatgaaaataaataaataaattgtggagacgaattttttgagaaaattatttgcctaaaaaagaagctctactggtttggcttaactttgttgtctttttgaataaattttgtcatttacaccagggacgggctttcgctttcgcatatttcgctttttttgttactttcgcttttgctttcgcattttggcgagaaacacgaatattattcgatacgcaaacgaaatacgaaacgaaaataaaatttttgttatcatttgaaagtttaatctattttggagctttttctaaaatattatcaattaaattggttatgccaacgatttgtctgaccattaaaaaaatgtaatgaaatggaggaatgatttagcaaatgatttgtttggtcactcatttgctttcctaagctgcaactgagcaccaaatgcgaatcaaatggcactgaaaaatgactgcgaaaattggatgaaattcaaaatgtaaaatgaaaagattttaagcataaaaaatcggaaaaaaacaaatttttttatttaatttaaaaagggcgttgtgatggatttcttctattgccctaaggcacaaacaaaaa

SEQ ID NO: 16572 - DNA, 2427 bp, Heterodera glycines
taaaaattccattaaaaatgcaacaaaatcgtgaaaatatattcgtggatgagagaatcagaatcttacctagcatatgaattcctacgtattatcatcgtgccctgcatgtgagctacgcaggaattctgattctctgacccaagaaatagaaaagtcactgctctgaattgttaagggagcagatgcacattttatataaattttattacctaccataataaaaaatttattttagattacttagtttgcgaaatgtcaatttttgggtgtgttggtgaaatgtccgaatttggattagccggcgaaatgtccatacacacctttctcattgtaattttttgccatactgttaaacgaaaaaaaattttgaccataaaaaatttagaaaacttcaactataacacgattaaaccatgtgttatgacttttgttttaaaaaaaataatggaattttgtgaatttgtttttaagtttcgaataaatttagctaggcctgatattagtgctgacaaatggttgctgagcacgaagttttgagccgctttaatctcgaaaatttttgtaaatcagcaagtcgagaaaaggaattgaaaaaagtgaaatgaagttgacaaatttgtaaacgattggtcccccatacacagaattttgttttctttgtgtgatcattgattgatcagaatcagagcaacgacggcggtgagcccggacgatcgggcacttggccattttcgatctaaatttaatgaggtgaaattatcacattgaactgaatgttttaagcaaaattggtgcgtgaaacacaaaacaatttccttattaagctcgggcggaagtcgtatttcgatagctatgaaactttttaggcagcgcccaaaacgctaacgcacgcgaatcgccaatttttttttcttgcatcatttttcctcgtcattcttgtcttgctccctaaaatttatttccaagagccaaccttaattccattcatcaaaagcaattttttggttatttaattttttttttttttgtaaggcccaatcatcgcccctcccctccactggtgatgagaaaactttctgaggttgtgatgaggataatggtgatgatacacccaccacctgttgtaccaccaactgcttacagcaacaccaacaacacaacacatcatcacaaccaccaactcattcggcggcggggggggggggggggcattttgagtcacacacaaaaaaattttctgccctccggcgatcgccgagtgatttttccacttcttcaccttctgctggcgcctggcttaataatcataaaaaataattattgcgcagattcgttgtcttcgtcgcctcacagatcagccagcaccagcagcagaagggagcaacaagcaacaagttgaagccataataagtgaatgggtgggcaaatgattggtgaaaattatgtgacgaaaaaaaagttgggtggtcgtagttgatgaggtggcggcgcacacacacacaataatcaagttgaaggtgctgccatagtaatttgtattagggccttagccatcggggtgggaattgatcaattgatcgcaggagccggagggcgaaccaatttttctttagaattttacaaattttgcaagtatatttaatttttttttaaatattgatagcatgtttgataaaattttacagctgtgaaatttctcatggtgcatggttcatttaatttttctaattttttttttaccattggcatcggttttttggggaacgtggaattaataaaatgaaataattactcaaatttattattgcaattatttgtatatttttgactatcggtgcataatcattttggaataatttagatgaaaaactatctcttcatggagaattcataaataaatgatggaatttactccaaaaatccaaagttcacaaatgccattcgatacaaatatttaaattaatcagtcttaattgcccttgatatatgagcatgattctgatcaagtccaaagcttcgccggttcacaatcagctgatccaactggtatttgcctctcttttaggttcgtttaaataccaattttcattttttttcaatttaatatttaaaaattcaatttattaaagtgcttctcaaaatgccaatgccatatgctgagaaaacgttgtgtgagcgtcggttggccacccttccatcggcgccgggccttttctattaccaacgcattgaactgaacagtgcggcaccgtgcgcagaacgctgcgtggacgactgggaattttgtcgcagtgccgtcctaattgaggacattcgggtttggcacacattattggcattctgatttttgaattatttcaaattaatgaaaagagtcccggttaagggatgattaaaaaaatagttaaaatattactaaaatag

SEQ ID NO: 16573 - DNA, 2924 bp, Heterodera glycines
agtttgtttttctcattataatgaaaatttaaaagtgtgaattggaaggttttcggtacttgataaaatacttgaacctgttgttttctggacaaaatgccacttttgttaaatcccctcaaaattccaatcctatgcttttatgggttgttctaacagtaatgttgtgcattgtcattttcgtcttgattttttaaatttttttcgctgaaggattgctcaaatttggccgaattgacggagtctgaccttgtcgcgctgctctctcaattccccattcgttctctgctcgacgttgcttttaagcacttcacacttttgcaccgtaacaatttgaaaatatacaaatgaaatagaaataactcttttcccttttccgatggtcatcgcctgtctacgctttattccctggtcgcatttgtgctcattttgttgaaactgttcgacgatggtcttcaaacgtacggggcacacaaaaatttctgcaagaaaattacggacaacatcaggttggttgtatgaaggatttgctgtaattttcttatacattaacgtgtttatagcaaaactgtgcattttttctgcacctattgggagttgatcagaaatgagttggctccatcggatcgctcattggtccaaaatgaaatcaaccgcattgttctgcaggctgttttttacatcgtatcaaagaaaaggtgctttaaatttttaagtaatcccatttttatttcaaaaaggaattgttccatttttttctaaaccaaatttcagtgccggcattcgccaatttcttgtcgattttccgttcgaaacggtcagcgagtgttgccgactgagatgccaacttttgttgaggagtccgccaaatcggcaaattccaacggtgaccgcactgtacgtaatcccagcgtctgagcttgttcaacgcgttaaaaacagtaaacaaatttttatgcgattttaatacaaatcacattttagccgggaatttcatggacaatattggcggtgtgtgtcgcgagagtgacgagttgacgtacaccgtgtccacgctggcggccattgtgtcccgttctgagttggaattgcagcattttgtcgtcgagttcatcgacatttgttttctcaacgagaatttacgtgaaaagttctataaggtaggggaaccaagcatttgttagttttcacatttgaatctttcatttacaaaaaaatgattggcattaggtgggctccgaggccatggctgttctaattgagcgcaacccgcctctgttgggcgccgtcctgcgttacattgaccgccatgttgaccaccttgacgagtacgctgtcaacattctgtcaacagtgccgttaggcttttgcactgtctccgccgaagacatcagcgaccgcttgggcaagtggctgatcagccgatccattgaccatccggcatccgccattgcgcggtgagaaagttgtggctgctcatcatagcctaaaaactattcagaagagttctgtcctctttgaactgggactgtcaatcgcctcaaccggcatcgttgcacaaatcctcagttacatccgtgggtagccaacctcaatcaaatcggctttgtctttccgttgaaatacatgacctttgcgcagaaacgcttgtgaaggtggtgttattgtcgtttgagacaattggattgatatttttggacgatatttaaggctcacattgtccaatgcaaacagagaaacaatttgattgccaagtcggtgaacaaagcggcacgaatggcactgaaatgtcccgacttggagcaacagttcgaccgcttctgctgggacgtgttgttgaggctaaaaatttcggaaaaggtcgacagcgtcatctcccttcttcaattttgtattactttttgaactttgttccaaaatttcagccaaattgtccgactccgccaaatgatctcaccgccttttacgtgttctgtgtccaaaagtgtctttcatcgtgcgttttaaattgaaacagttcaaaaagttgttcaatttcctcttttttaagttccaatctcttcttcgaagcgggtcttccccttttccaagagttagtcaacgcttcgtgcttcaaggcggccgccgtacttttgattcgaattgtacatgccttccccagcagcaaccacatgcagaatttcatcgcaaatcccacgtaaaaatgaattttttttttaacttttccattttcgaaataatttgtcatacgttgctttttccgattttgaattatgcacaatttaaaattttttttagattctgtgaggtttttgaacgacttctccacgcggacgaatcggcgtacgctgttcagctgttaatgggagctgacaaatttcctggtccggtgctcagtctggtgtccggcggaatcattgtggagaaacaaaattccaattcaattcccaaatttttttttcagcaccaaatttccatcgacgccttccattttgagcagcgtaaagtgtacgcgcaggcctgggttcgcctgttgacatgcgacaaacgaacgcacgagtggaactcggacaaattcgtgctgtacttgcttggctgtgtcgcaaagtgttgccacctcttcgacccgcaggacaattttgggatggtggagcttttgcgggacctttacaaggccggttaacaccggggaaacacagattaaaattctgtttttcaggcccgacaccaggcctggagggacaccgttcgaggccccctctcctggttctcctcctcgtccatccctcctcctctgatcgctcaagcccaattcaccgtctctccatgggccacgttcatgttgttgcgtgccgagcaggaagtgtttgccctctttcacttcagtcttagtggcttcgtggcaaagcatccgagccgaagca

SEQ ID NO: 16574 - DNA, 4362 bp, Heterodera glycines
  unsure (1)..(4362): unsure at all n locations
ttgaaattgttcaaaaattcattaaaatgacaaatgaatttaagcaaaaaagaaaatattcaacaaaagaatggcaacaaaattatgccgaaatttgtaagaaaattggagttggctatgaaacaattaaaaaatggaagaaacaatttggcattagcagtaaacgaataacgaagaatgaaaaaatggaaaaaatgaatatttattggcaaacaaaaatagaaaatccgaaaatgagtgagaaagaaattgcaaagatgttgaaaattgatagaaatagtataagtaattggaagaaacaagttgagatggaataatggacgattattaattcggaaaaattaaaaaaaattttaataggcctatttccgataaagttactcacattttacaatttatatatgtcgatttgttagaaggttataataaaataatatttagcgccatttttttaattatatttattatgaataattataatttttaattttttgaaattgatatttttattttttcgataattcaaaaacaaaagattataaaaacatggacaacaaaagcaaaaaaaaaaatttttaatttcataatttttgtcataatgtcacttttatgagaattttttaatccaggaaaaatcgtaccaatttatataaaaatttattaatatttaatttttgcaaaaatacgataatttaaaaaaaataaacttaataacaaattcgatggatttaagaaaattaaatttattgaggtttttttggccataacttttttgtttctgagataaattttttgaaattttgaagacgaataggcactgtcaaacgctttaaaaatcctgccaagtttatttaattcgtatgacaaataaaaatgtgtatagcatttggcgccaaatcgatgcgcaatccgcgattctcggcatttttttccgcgatccgcgatccgcggaatttttgaatccgtggcaatttggatatttaaaaagaaaaattttttgaagcgattgtttcatatataaaataatttaaaagtaagtttttgtaaatgaaaaagcaagagatttgattatttttttcgaaaattcctttcaaaataagatatattcattcatttgtctagacaattatcctaaaaagagtgagcggaatttccgagcttgcgacggcttatgaaaaagtatcatagtgcgccgccgggaagtgttgagtcggaacgactattcagctgcgcaggatttatttttaatgatcttcgaaagaacctatcgcatgaaaatctcgaaaagcttatttttcttcatcataatcttatcctttacaattttgattattgattaaatggaaatttttttgaattatctggaactccttgcaattccccccccccccccattcagtcttcccaaatttgtatgcatcggaattttaattaattttttatataagaaaaaataaaaaaaagtgtaaaaaatggtttaaaaataggaaaaaaatgcgcgaccgcgatctgcgattcgcagtcatttttttgcgcgatccacgatccgcgaccgcggcaaattgaatccgcgatgcgcgaccgcgggatttttctgtgcgcgctccacccctgatgtagactctttcagaaaagaatttaatatttaaagcaaaaaatatttgtcgtttggatattttatttaatattgcaataatttttttttaaatttcattaaaatagtatctatttcattcaaatattcatttattaattattacctataattatgaattagtatcaattaattcaaaataaacatttggaaccatgaaaaataaataatttataattatggaaaaaaatttatgttaaaaattcattggttatttatttcttattaaaaattaatagaaaaactagcttaatcaaaaatattatttatatttccaattaagcaatattttttattttacaggaaatcaattgaaaggcgattttaacatcaataaatagccaaaataataatcaaaaattatattttacaagaaaaaataaaatttattatttttttaatttgtgaagaagatgaaattccgcctattataccttacaattttattttttgtgattgaaatcaatcaaattaaaatagaaaataaaaaactaccgcaaaaatcatttgatgaaatatttggagaaaaatgggaagaaaaagaaggaaaacaacgaaatgaactcaaaaaacgagaaataattagaacattcaacaaaataaaagagaaaataaaggaaaaaggaagaaaatatccaagaaaagaatggaataaaattgatcagaaaatagcgaaaaaattggggacaaatcgcaattacattcaaaaatggatcaaagaattggggcttaatcaaaaaagacacaaaagtcacaaatcaaaaactgatgaagaaaaacgtcaaattattcaaaaatttattgaaatgaaaaatgaatttaagcaaaaaagaaattattcaagaaaagaatggcgccaaaattatgccgaaatttgtaagaaaattggagttggctatgacacaattagtaaatggaagaaacaatttggcattagctgtaaaataacggagaaagaaaaaatggaaaaaatgaaaaaatattggaaaataaaaagtgaaaatccaaaaatgagtgacaaagaaattgctaaaatattgcaaattgatagaaggaccatttcaaaatggaagaaacagtttggaggagagattttggaggatttaaatggatgattataaaaaaaattggataaattttcaaacaagaaaattatttacgacataaaaactgattaattcttatattttatagaaccattgtcaaaataactggcataaaatccgtttatttttctcaattggatacgctgaatttgcttctattgtaaataattttttcttagtaacgaaccatcattgttatgatttccgaccagggctgcacgcaattacggattgcggatttcgggaaattacggggtttttggacccccgtaattacggattacggatttccgtaactgagaaattcgccgcaattacggattacggatttccgtaattgcaaacccactgtccatataataaatctatctacaaattatttagaaaaaaaatatataaaaaattttgaataaaataaaaagcatattttttacggcggattttcttgtgaattaataaacattttataattaaattttaaaatcattcaccagtgcctccttgtaaataatcgtaaccggagctttggtcttaaaattttataaatcctcattgaaacgcagaaaatcttcaaaaaatgtatggacacgctaaagtacataaagcatgcccaaaataatatttaagttttatgataattagggcccggatttatatggacaaaaaaacccaaaatatagattataatatggatgaaaaaatcgcaaaatatggacgaaatatgaacaaaaacgcagaaatgttgacaaaaaacacgaaaatatggacaaaaaaatctctgaaaatttgtttgaatttagaaaaaaaatcataaacccataaattttttgtcagtaaagaaaaaaccatttttaatgaattacagaattccacaattgggaactcctggttatcatttactgaaaaatattgaagttggaaaaaattcaaaaattagtaattttttctaagaaatcatattaagcgaatgttgctaatgaaattttttgcacaatttttgatatttaatcaaaaaattttcgattttagggacgtgttttccaaaaatttccaataattttccatctttagggttagattttggaatttttagtgaaaatgcccaaatatggatgtcaaatatggaaatattgacaaaaacttgaaatatggaaaaaaatggaaataaaaagggatcctagaagcaccaaaccaagataaaaatactatttacgtaatttttaggccgtaataagtgtgcaaaaaaatatgtaaatccataaaaatccgggtcctcccggacttttcgatagctaaggacatttcgaagcaaaggactttatttatttattccaaaaaacgtttattaaataccgttttaaaaacggagcataattaggccattttgctggcaataatcacttaagagacttttgtgacatttttaatattgtagcatatttatttgttaattgttttgtcgaaatttttaagttttcatttcttanatcatgttaatattgtaaatttgggattgctaatttgccccgaattcactatttattttcataatcacaattaatttaagaanatatttgtcaaaaaatcaaaaatcatttaatt

SEQ ID NO: 16575 - DNA, 1357 bp, Heterodera glycines
  unsure (1)..(1357): unsure at all n locations
tcatatcagcactattaccgctctttctttaccttacgcaatattgagaattcgccgggcgtcgactccgacctccgaacaagaaaggccccgtctgggttgccatttttcaagaggaggagctaaatggaaaaggctactatttttaatcaagattctcgagcagtacgaaattgggcaaaaacggaaatatttagtgattttaggtttggcaacgtgatgtcatccggtcattcataagtcaaaaacacagtttttcccaattttttgattttagtgttgaaatcaaccacttcaatcgacattaaaagtcctggtgtgaacctttaaggttaaaatttcaaaaacaatggaaaagtccttgattgttttaataacaaagtaagaaattgtcgatatttgttcgagtcagagattcaaagttggcgaaatggatgtcagaattgtgattcgcgaccagaaaatcttcccaatttgttgttaattataaataaaaatttttgctaaccaaaagagtcccctatgatttttaagaaacttcaaaaattcacatttaaaggagagcccttactttcttcatgactagcatttattgctcattacctccgaatcacttctcgaaatgctgccgagataccaagagtgttccatcattcgaatataatttgaagggattaatccctcaactccgttaatttccgctttgtaccaatgcgggtcctcgtctttgttgagaacctgaatttggctttgtttagattagcgaccttaacagaaattttttcatgccaactaaaatatatttaccttcaaaatttgacctctcttaaagctcagctcgtcaggctcaccagcgttaaaatcgtgttcagcaacagcctccatgccaaattgagaaagtgaaacggacacaagaataaatgagcaacaatgaaaatgttttggaaaataattctattgatatacctaaaaggcagattaaggaattcaatgatgcaattgcaagtgcatcaagcgattccgagaaaaagctcatacgatttggtaataatgcatggacggtaaaaaaaagaaaaaattgctaaataattggcacaaaaacaaaataccaattcattcaaaaagaatgcaaagtctctttatttgatcaaattcctaatccgagctcnaagctttaattccacttcnaataagtaaatcgtgtgtttttagagataataaataagaaatgatatttataaaatttacgaaaatttcaaattggtaggcatcttaaatttttttcatattttaattttcaaaattcatannacaaaaatggatgaaaatgccaaatctttgattttactttaacatt

SEQ ID NO: 16576 - DNA, 1876 bp, Heterodera glycines
  unsure (1)..(1876): unsure at all n locations
attttcatgaaaaattttaaagattttgtttgatttttcatgactggactcggttaaaaactaggactctgacccggctttctgtacccggcaataccctgacccggtatttgcccaaatacccaggcccgtagcgctaatntaatatacgattttgaagttttttaaattaaaaaataaggctacagaaaaaaattgaaaaactctcgcctctcgccaactctcgtgtttttggggactctcgccaaactcgcgctctcgtctttttggggactctcgcctctcgccaaactctcgctctcgtctttttggggactctcgcctctagccaaactctcgctctcgtcttttctgagacaagtcacacccctggtactcagtcgtaccagtctttttcagtaccagtcccggtcccgtgcaactctaatcagacacagcatttgttttgaccaattaggcgatttcggcctttatttgttcgagtccatccattccaagttctatgctccctcacctgaacatctctgcacacccacccatggttatcaaagtgccgtcctgcttaagcacaagaaaattaaggattttagggtctggcggtgccgataggcgcagctgggaaatttttgaaaatttcagtgcaatttattaacaaaaattgtacaaatcctaaatttttggaaaaaaaaaattccgactttttatcaaaaatttcggaaatcggaattccgtgccatccctgacacacatgttggttgtacacatcaaaccaatgctttagcaacattaacaaaaaagatatggaaatttaaaatttcgaaaaatctttgaatccggattcggggttaggagtagagcgccagtaggccattgcttctgatgctgacgaatactaaaatgaagagtcaatgaattttggggtaatagtgcaatttgtcccccccccctccttttttcgaaaattttttgtgttttcaaaagtcataaaaaacactttttatggggttttcggggttgctgatcatgaattctgcacccatttcgaccaattacggtcctcggacccgaattcgaacaaaaagtcgaaaattcaaattttacgattttctatttttagtctaaaaatgggttcaatattttttttgaagcaatgatatatttcagtttttcattatataaaattttatataaatgactaaaatttagtaactttaaaaacctttgtgcttaaaaatttatatgttcttgaaaattaaaaaatttatgtatggaaacctggcaatcttatatggttgtttaaacgagatttaaacgtctactagtttctgtttggacttagacctgaataccggcttagttggcaatttcggcctttatttgttcgagtccaccccttttcagtattgctccctcacctgaacatctgcttgtccagccatggttatcaaagtgccgtcctccttaagcacaaccaatgtcggaatgactccccaattaatgatgttaaacctcgcggccaatgagctgaaatccaagtcagattcatgatcagcacccttccccagcaaactggtttagagccaattatagagtatcgaaattttccatcattgtcaacgaagctagttgcccgctttttgggatgctatgtcaaacgacgaaaagtgctaatttgggcgaccgaccaacttttattaaatttttcaaaagttcaagccaaaaactggaaaatttcatacttttgaagacccattaaaccccttgaaactaattggccctctaaataatactaggtcgttgcataaaaaagggcgctttttcaaaatgactttttttaagacttgattaacgtttgttatgtcttttttgtgtgtaa

SEQ ID NO: 16577 - DNA, 3431 bp, Heterodera glycines
  unsure (1)..(3431): unsure at all n locations
tttatggatataattggagaaataaatgtgcatgcaaaaaaagttttntggtcaacaattatatgagtaaggatttgaaattatttttggcaaaataatttttgatctatttaaatttatttgttaaatacataaaaataaattaattcacaaaaagaaaagaatatgctttttgtctgtccaatttgtttttacatttttagaataaaatctgttcagccaaataatactcaagttgacgccgaaacatttgaaagcaagaaattaaaagtgctttatttttacatgcaattattttgaaaattaattggtcaattggaaactccgtataataaaaattacatcataaatgacaaagtaaaaactgaagtattaaaattttattattatttgtttaatttattaagatttatcaatgccaaacagcagaaagacgattcattgtgttatggatccacaaagcaaaattgcacaattcgtttttatgcaggaatatagggcatcgccgtgtgcagcggcacagggagagagtccatcccaaaagtttttgggaagagagatacggacagtgctggacacaataaaaatgtcaactaatgcccttgggcgaaaacagcgtctgttgccggaggaaagccgaggccacccgcgaccacaaaactttgagcccggtgatactatttggttcagtgaaccaaatggaaaatgggcaccaggggtgttgcttcagccaatgggcgaacgaatgtggcaattggaattggaggggagtacttcggcaaggaccgcccatttggaccaaataaaaagccgaagaatcggcccaacgcgccacatttgaggagacttgcttaatgctttgtacataaccccctctgcgtttaaaaaaaaaacaaaaaaaaattaaattaaaaaaaaaaatatgtattttacattacccatttattttagtgtatcacttagtccaaatgcatgagtttagaaaaagttgaaaacaaaaatttgtcttctaatgcaatctgaaaacgtgccacctaaaccactccaaaatgaggcagaaaaattggagaaacagttgctgaaggcgaaagaaaagaagcgaagtgaagagaagatcacggaagcggttggcaaaatgatggatgagctcaagagctcgatcaaagaagagatcaaagtcgctgcggaggatttgtgggccaaaaccgagcctttgctgaaggagcaaaagcgagtgactgcagcaatggtcgaatctctggacgaattcatggctggaaaaaatggaattgacgaagaggaaggcacgtgtccggcaccagcaagtgatcagcggtcggaaggcacagtggagaaaagctcatcggtggaagatggagagcctgcccaggctttgcccccacagaacccaggccaagggccaaaagagcaaattaatcgggcgcctctgggaaagagaggcaggggctatgccatgggagggcatggccctagaggacaatggaagaatggaggccagaaaacccaaaagcgcgtgggctatctggtccgtcagctggagcgcgaatgaacgacgagacgtctcgaaggaggagagggattgcggtgtctgcatttcggtcttttttatttttgtttttggcatttttgcattgacccattttccaccaattctcatcgtaaacattttatccatccacatctctcaatccttaccaaatccttctctcaaaaaaattctctctccgctttgtgtaatgtggcctagaccattctcacccgcttggcttcgcttgactcctcccaaaattgtgccgtatttaagctctctttctgctttggatttcacccttcttactgccattctcccttcctacttactctccctttgcttactcttaaccaattttgctataaccaattttgcttattcttactcttaaacgattttgctttgctttaataactgttttgctttaataaaacctcaaaaaaaaagtcgaggaaaaaaagagattgaattgggtcaaatttggaaaggttgtcagaactgagaaaagtgcgtttgcctgaaactcgtggggacacaacaatttttggtgccacgacccgggaagaggagaagcacgggttaaaccaggcgctgaacaaaattcagcaggggtaaaggctcggtgccattaccaaaacaatctctgtgagctggtctagttgtgtactaccagccgggctgttgtgcaaaatacaaaaaataaattttgagctggtcaagtgtgttttccagccgagctgttgtgctaatttttaattttcaaaaaaaaaccaaaaagtgaatcaaaatgagcaatcaaaattgttctaattcacaaagtggagaaaatgaaattggctccgattttgacccagttttcttcaccgctgaagaaaatggaaattttgcaaatattctaaaccgaatgagactttttgagtcggctgtttgccggcaatttcggagattggaatacgagttagcggagataaacgggatgttccaaaaatcgaatgagaacttacgtggtggaaaattggaacaatcaatggctgatttggaagaccgtgaagaattggaccattttcagatggaggaaaaggtcataaaaattgagggaagaatagatacggtcggtttaagtctgaaaagtcttgagaagtttacgaaagtcagatttaacaaaataattgagaaaatgaaaagtgaaatggcgaaaatgacagaagacattgatattttgcgaaagcgagttgaatttctggaaatggaggaagtgtcagacgaaaacctatgggctgagaatggacattcctttgagcatgagcaatttcttaatgaggacccaccaaattccggagaaaactgtgaaataatgatctctgacccatttcttggtggaattgccccgttggaaagttatgacggaaacccgagtatttcattttcgaggtggtcctcaaaattcgaagacatgctttcgctctatccacagcttactgaggcgcagaaattaagtcgtttaagaattcttttgattggacaagcccgcgccgagttggaatcgatggaaccgcaaccggaaaacttagctagtgcattaaattatttaagacaaaaatttgaaaatgagaatacacgctcaattgcccgtcaggcactctcaatctgtaaacaagcgccggtagagcgagtttacgagtccgccaatcgattaaatgaggcaataaggactgcactggccggagagggtgaagacgtgataaggaaaagacttgaagaatttgtggaaagattaacccccgacctacaatttgaagttaaagctggaaggccaactaattattcaagtgcatatgagctagcacagcattttgagctgattttaagttcaaggcga

SEQ ID NO: 16578 - DNA, 984 bp, Heterodera glycines
acgaagtgttcttacgagcccctcaaatttagaaatgggcgcgaagcgcccatcttagggcggtaagctgcctacaaccccttaataacttttcaaaaattcattgctttcattatgttaatacatgttacatgttacatgctcagagaggaaattcatgaactccctccgttttcatgtaacatgtaatgaagcgggcgcgaagcaccgaggccacgaagtgttcttacgagcaccacaaatttagaaatgggcgcgaagcgcccatcttagggcgtaaagctgcctacaaccccttaataacttttcaaaaattcattgctttcattatgttaatacatgttacatgttacatgctcagagaggaaattcatgaactccctccgttttcatgtaacatgtaacatattttgaagcgggcgcgaagcaccgaggccacgaagtgttcttacgagccccacaaatttagaaatgggcgcgaagcgcccatcttagggcgtaaacctgcctacaaccccttaataacatttcaaaaattcattgctttcattatgttaatacatgttacatgttacatgctcagagaggaaattcatgaactccctccgttttcatgtaacatattttgaagcgggtgcgaagcaccgaggccacgaagtgttcttacgagcaccacaaatttagaaatgggcgcgaagcgcccatcttagggcgtaaagctgcctacaaccccttaataacttttcaaaaattcattgctttcattatgttaatacatgttacatgttacatgctctgagaggaaattcatgagctccctccgttttcatgtaacatgtaacatattttgaagcgggcgcgaagcaccgaggccacgaagtgttcttacgagccccacaaatttagaaatgggcgcgaagcgcccatctttgggcgtaaagctgcctacaaccccttaataaactttcaaaaatcattgctttc

SEQ ID NO: 16579 - DNA, 981 bp, Heterodera glycines
tagggcgtaaagccgactacacccctttaataacttttcaaaaattcctttctttcacaatgttaacacatgggacatcttacatgctcagagaggaaattcatgaactccctccgttttcatgtaacatattttgaagcgggtgcgaagcaccgaggccacgaagtgttcttacgagcaccacaaatttagaaatgggcgcgaagcgcccatcttagggcggtaagctcctacaaccccttaataacttttcaaaaattcattgctttcattatgttaatacatgttacatgttacatgctcagagaggaaattcatgaactccctccgttcatgtaacatgtaacatattttgaagcgggcgcgaagcaccgaggccacgaagtgttcttacgagcccctcaaatttagaaatgggcgcgaagcgcccatcttagggcggtaagctccaacaaccccttaataacttttcaaaaattcattgctttcattatgttaatacatgttacatgttacatgctcagagaggaaattcatgaactccctccgttttcatgtaacatgaacatattttgaagcgggcgcgaagcaccgaggccacgaagtgttcttacgagccccacaaatttagaaatgggcgcgaagcgcccatcttagggcgtaaagctgcctacaaccccttaataacttttcaaaaattcattgctttcattatgttaatacatgttacatgttacatgctcagagaggaaattcatgaactccctccgttttcatgtaacatattttgaagcgggcgcgaagcaccgaggccacgaagtgttcttacgagccccacaaatttagaaatgggcgcgaagcgcccatcttaaggcgtaaacctgcctacaaccccttaataacatttcaaaaattctttgctttcattatgttattacatgttacatgtgacatgctcagagaggaaattcttgaactccc

SEQ ID NO: 16580 - DNA, 1485 bp, Heterodera glycines
ttgatccctgaattcgtcactttgattattccgaaccctgatgatcaaacgggagaggggtaaattcaaatttaaatttaatttaattaatattatttaattattaaacattttaagtggaatattgttttcctttttattgctgttttgcaaacattgagcgcagcaatttcgcacatttcgattatgaggaagaaataaaaaaagaccaaaaacgataaatatgtttgtctaattcaccgcaattatgtacataattaattaatttaaataaatttttaataaattataaatgattataaataggggtgatatttttaggcaaatgcctattttttcctgagctccccgtggcctgaaacgcacgaaaaaaatatgtttttttgggctgttgttaagctacttttcgagttattaatgcctattttctagtcttttatcccctatactaatttggtgctgtacgtacgtaagtttttaaaattgttaacaccaaagttcaaaaaccaataatactaatggtatatgattaactttaaaagtgccggatcgatggcagttgtgccagctctcaaaaattagattggtttaaaaatgcccgtcattgtgccaaaatggttgtcgttgtcgagagtggaatcagttcgggattcagaacagatttacgggaattagcagcaatccttgtgagctgcttgtgagttggcacacaccaaaatgccaaattggcactttctcaaggggataatcaattcatcccttacaagtggtaaaagaatgtcttaataatggcaccagtgagaccaggacgggaaaattgtttaattcaaattaccaattttctttggaaaatccacgcttattctctggcctcgttgaacttttttttagtcttttgcagcttttcctttttgttgcttttcatttcaaaatttctgttttgtgttttcaattttctgttgctgatgcaattttcttggaccaaaggccacaaaatgaaagtgcccatttttgtttttgcattttgcaaccaaagattatgaatattatgtgattttattgttgttatcctcggctgttcttatgtttctttatctttgaaaattggtggtgctttgttttgtaccccccggggggtcaaatcgacggaagaacgaacacatgacggaacgaccttcccgttcctgctgctaatgatgcaaccaactgaacaaattgcatttttccgtgatcagaaaatggatcagtgaatcagaacttcttgtaaaatgcgacatacggtagttttgaggatttgaattcatatgcctgcaatgtcaattatgaattgttactctttttctttacaaattcattatttgaactagaattaattgcacgagacccggaattctgagcagaatcaggtggggaattgccgggagtcgaaaagccgggacctgtaaatgatcgggaccgggaaccggacattacaaggaaacaaaa

SEQ ID NO: 16581 - DNA, 1061 bp, Heterodera glycines
gacatgtgattgagaagaaaaaataaatttattacaaaacaaggctcggttgaaatttaaaactattacgaatgaatgagagtatttttaaaatctcgtaaatggtaaaagccgaggctgatgctcgagagtctcggtcttaactcgagaaaagtctcgattttttggtctaggtctctctctcggacttttcagtctcggtctcgattttcaagaccgaaaaacgagattttttacatccctaatgattatcttttgataaacttaattcttcacattttggtattttttttatctttttgctttgttttttgctcccatatgagttgtccagtgggttgtgtgtgcttttggttgtgttccctatttttgccttggatctaatttttcaaaaattatctctttttcagtgggaaattaaataatttaaatattcgaatttgcattttttttttaacccggcgacgccctaaaaccccaatttttttcttaaatacatgttcaaaatcgcaaaatttttgtcactttttgctgaaaatctattaacaaaataagctcaaattttcaaaatttccccggcgacgcctaacggcacaaaaaaaagaaattggttaagaaaagactcgaaaataatttaaacgctttttaagtaaaaaagaaaatttttggaaaaattctcgggtctcggctttttcggtctcggtctcaggggttctcggccagaaaaagtgaaaattaaattagggccggcgagggacgggacccagccacggcgttttgttggatccagtccgcaatcccgtattttttttggaaatttttttttaataatttgggaccagagcgtttgggcccccgtttttgggccccggggtcgtttgggccccaacccaaaaatagaaaaatgtgcttttttaaaaattaagattctaaaaactaagcctgagggcggtgcaccccaaaacgtcgtcggccgaaacgtcgtcggaagactttttgaaccataactttgttcactgtaaagcaaattaagaattgttggtgttgttcgatagctctat

SEQ ID NO: 16582 - DNA, 1849 bp, Heterodera glycines
tgagaaaaatgggcgaaatggcttaaaacaaaaccatacgaatttaatgttatgacgctgtacccgtaataggcgagagcgatgcccaacctaagaaagagagaaatgatttgatgcagggagagagtcccattctgaggggatttttaaggaaaaggcataattatgaagcggaggttttctccgcccgcccaccggtcgcattccctccgtccgttgatgaacacaatggtcttttctgtctcatatgtcactcctttaatgacagttccttttcaaatgttttttctccttccctcccaccattgtccccgttgttcaattcgttcgatttgcttcggagaagacgaataagcatgggcattttgtcgtatttgttaacctgtaaaacgggggaactgtcagtgcagaaaatgaaagttcacctttaacaccgtttggttgaccgtaccgaccgcctgatttatttcccctacactcacaaagtaatacccatcggtcaaaaaagagttcgcaatttcctgtacttccctgtcgatggttgcgctgaacatcaaagttcggtgccggaaacccttcagaatttttgcattttttaatccccacgcttttgctttgctcaccgatcgtttcatctctttgaaaaggtccctaatgactgtccgcgcgtcttcgtacacaaaaaatttgtccgtttcgtctaacacaaaaaagcgcagtttgtccaatttgatgatgtgctctcgtgcgtaatgaaagagacgcccgacggtcgccacaagcaaatcgcaaccctttctgacattgttaatggagacgcccatcggaatgtctccgtacgccaacgccacgtcaacggaagtgcctaaaaataacaaaaataaataaaagggtgaaaaataaaacaaaacaccagctgagaaagtgcaggcatcttcatacaattgtttaaccttaaccacacaatttgataccattttactgattaaaatattattcaataattggggaagagatttgcgaattgaatgatttacgggaacaaattttgaatacaaaaatccccagtgtcgccagcccttttaaatgcgcaccaattcgcgagttggtgcgaccacaacggagtacggcgagtcgccgttgtgctgtgtgttgcccgcgttgcgcatctgttggacttcgttgatcaacggcagcagaaacgccgcacttttgcccgtgccagtgtgcgcatgtgccaccaaatcgcctgaattcaaatgaatgatgaaaggacaaacgacgcaagttacgaacagtccgtctgctgaattagagggatgacggccttttgcacttgcgttggccgggaataattgcgccgctgaatattccgcagaatggcggggtcgaagccacagtcattgaatgacctgaattgaagtgccaaataaaatacgacggctccatttttacgtggcgtttcttggtgtcggtgcccctcttcctccggcaattcgaatgtcttggtcgtgcaattctccgaagttctcctcaaacaagggtccttttgaaatgtgataccgcgcgtcaaaaagttggtcatccgttttcaattcaggcacatgtttcggccgaggaactgaaaaacggaaatccaatttcaattcaaataattaccgaaaccttttttccgtgtttcttcaacgccagcggacaaatttaacattttgctttgagaaaaaaagaataacagcaagtttgtgggaaaaacttgaatttaagaaaaaatttagagaccggtaaaaaaaattgcgcgttaacgggaaacaggaaaactaaaagaccgggacgggaagggatacaggaa

SEQ ID NO: 16583 - DNA, 2892 bp, Heterodera glycines
caaaaaaggaaaaccaaaaaggaaaagctaaaagaaatgggaaaaagaaagggaatgtgggaagacgaatgaatagcacaagaaagaagaatgggggattatccgtaaagttaattgatcggaggagtaattagtcgattaccacgaccatacgcaaatggaaatagaaatcaatcgctccatcaatcagcagaaaaattgttggccaacgcaacaaacatcagcagaaatgagtgttactcacaacttttggtgattttggggcgaagaccgcgcaacgatttggtggatttggcacaagtgaaggaaagggtccgttttttggtcagactaaatacgccacggcagaagaacacctttggaatgaaatgcgatgtttaaaagaaaggaaacaaaaacagaaagaaagtggcaccgcgtcggatggagtgccaaacggaggcaaaaagtcgcgccgggggtaatttgagacggggggagggcacggaggaggacgggtcggagacggaccttttgacaagcggttgaaggcgaattctgcccggtagctgaaagccaaaatattaaaaataaataaataaaatatttgcaaaaaaggaccggcaatactccgcgaaagtgagcacgtggaccactgcgttcaccgagtcgacgttcaccgagtccaaatgcttggaggcgaacagttcgcgcgggtcgaactcggagagaggcggcgccgttgggagctgacgcggcgtgtagaaccaaagcagcgtcagctgcagggaacggtcttcggattggtagtgaatggccagcacacggccctaaaccaaacgacggtttcacgcgggactttgctgccgtggcaaagcattccgaccacgaaaaggtcgtccgcactgtccgccgaattaatttggacgcagtcgccgacgcgaatggccacatttggcacactccgatggcgaatggcatcgtaacagatggaagtgtcgcgacagtcggggaagggacggcgcacggagccggggcctagcggacgccaattggacaccaacggcagaagagaagcggcgccggctcttaaccgaaacaaaatcacttaaaacggccaaatccagagggattttgccttttgtgctttgccgcgatcgattgtccttttctgttgcgctttttctgcctcttttggtcttccaaattcgcttccgcttcttttggcacactgatcagtgccattctgagtggtgctgtgccgttgtcgatgtgctgttgctcttctccttccccgttgtgtcgttccgcgtcccttcctttttgccgctgcccgcggtgtttccgccttgggccaatccgcgacctgacgcgtcttcgcttccgcaacggcctttccgcacctccgtcagtctgtccgttacgtctctttctttcgtttgacgatggatcgtcagagatgttgctgctgcttgaggaggaggaaaagcaaacggaggaggggagggacggcgcgggacgcgggcaaagggtggccgacgcatccgcgcctttctgcttcttcgagtgcgctgttatcgcagtcaatgccatctccaaaaggcgtttcggaatgctgagaattggtcggtccatcgtttcttccgcgtccaattggggcggacacgcgttttcgtcctcctccccggcgtccgctggcggtgcggcgtttggttggcccataatctgtgaggaaaaggacggaagtgatttgcattctgtcccgcagggagtccagcagcagtgaacagagacaatgagggaaacaaaaaagaataattccaacaattaagacatgcaaggggaagtgatcagtccttaattgagtagtctgatcaaaatgttcaattcttaatgactgctgatcaaaagtgatcattgatcagtagtcctaattgactctattgatcatttcaattgacctcttgtcgctccaattcgggcattataccgaacgactccgacgccacagtcatttcgtacgaaggagcagcggactgcgtttgttgttgttggatcagcaattgggggatgaggtgtttggccggtggagtggggggaagggcgtgcaaaagcagctaaattaaagcatccaaaagggacaaatgaaaagtgaagaatggtcaaagcaaaactaaaggaagaaaaagcgagtggaagaaaaagagtggggaagagagaaagagaaaaaaggggggggggaaggaagggaaaggggtacttttggctttgttcctacacaaaaaattttcacgatgtattaattatgccattaacgtaggaatattgatggatccatttcgttttgtcgcccaaccaatttatgcttaaggtaatttggcaaaattgtgcttgtatgaagtgtaggaacaaaaccgaaacgtaccgggaaagggtgggggagggagattttgagcgttagcaaggcttaacatcaaaaatcaggccaattaataaatagtggaaaaggagagtggggagagaatgggggggggagagatggggggggagagaagggattgattgttatgcataaaatttagacaaaaaaatgttcattttttgaaaatatgcaagaaattttgattatcatttttttatgaatatataacttagttgtgatgctcgtgcctctcggtctcactcgagaaaagtctcgggttttttttttgggctcgatttcatattgttcagtctcggtctcgaaacgtaagtaaaaagacataatattgtatgaacgaaaatggataatacttcttagaaattgttgaataattttaaaactattaatttaaaaaaaaagacgaaaaatttaatttatgaaaaacaatgctttatactattcaggatttattgactcggttgtttagttta

SEQ ID NO: 16584 - DNA, 887 bp, Heterodera glycines
atgcaaaaactttttaaaaacagatttctttaagaaaattcttctcatttttaagaaatctaataaaatccatgttttttcaaaaaaggaataaattttttaaataattttagttttactattcttgctgatttttgtcaagtttaaataagttgttttttttcaaaacaggtttctttaattttttttttactcatttttagcatttttgaattagaaaatttaaaaaatccatctttttataaatgtgaaaaaattagagtgccacgggaccgggacctggtagcggacaactgagtacaactgagtgccaaggtcccggttttgaccgggaccgggactagtcccggttttttcccggttttcccagccaaaaattcccggtttttcaacccgaaaaggtcccggtcccgggtttgcccaaaattcccggtcccgtggcactctagaaaaaatcataaaataattttattttacaattccttacaaatattttcttagtaaaataaattgactgttttttcaaataggatcattgctcatttgtttgtgagtgaaaggcgcggaaaaactgaaatttttgaatttcctatctctgaaattttccaaatgtccctaaacaacagaattgtgcggatttggtgcaaagattagaccaatggacagaacaacagcttggacccatggaaatggaattgaacccggacccgtcacgagttcaatgggaagttgatctgctgatggttcgggccgagttggcatggcgaaaacagacgacgacaaagaatggtaatcctccgatcagaagtgatcagagaagtattattggcttttactcgattttaccaaattggtggtatctggactggaatctgatcaggattttg

SEQ ID NO: 16585 - DNA, 977 bp, Heterodera glycines
ccccccagggcattttccgcattgatcatagttttgggccacacaatgccaatgggatgacgcattttgtgccgcgcgatgcaaattgggcatccaaaagtgcatgggaatgccaatggttgatcggttgagggccccattaataatgggccaaattttgttggagacgacaacaacagcaataacaacttcaaagcgatcagaccgctttcaaagcagtagcagcgaagaagaagtggcacatttttggcttttttggcactttttagtttttggtgtgttggcgagtttcttaaaaacttcgatttttaagaaaattttcgaatttaaaaaagaaatttccttgaatttttatattttttcaagcaggaatttcaattatttttttaaattggttttttggaacttagggggagggctgcagttttaagaaactcgccatcgctcctttttgcgcatttccatggcttagcacaacattggcattttttggtactttggtggtgcatttttcacccaattaggatgactttggcactgtccctgaggggccaattactgccatgcaaattttccaacggatcagacgacgtgcaaaatgcttaaatgccacggaagaactgaaactcgccgaggaatgcttggcacaatgccacgttagtttttggggaacattttctcgaaaattaattatttttaacaatttacagaatttgttaaaaagtgaaaatcaatgccaaattaaccaaagcaatggcattgaacatgttcacataaacatcaccaaacttccacatatgagaagtgcttcggaaatgccattctcacgagaagtaattaataaaattgtatctccgtggactcaaattcaaaacaaaattccgaaaattttctctggcattctttctgtcatttttgtgggttttcgagaaaatttgaccggcaaattcaatgcctatttttcttgaaaaaaacca

SEQ ID NO: 16586 - DNA, 1248 bp, Heterodera glycines
  unsure (1)..(1248): unsure at all n locations
gtgggttttgcccngcgttcgtttgcggcgcgtncngtgggctgcgccggcncngctttgcctgtgnggntgtggcgctttnnttgctcnttgtccccgtgccgncctctgttcggctcgggttccgccggtgcttcgggctctgcccgggtttgcggcggcgcgcgttctgctgctcctcgcgcgccttctcggtgcgccggtcgtgtgcggggtcgtcgcgtttcgtgcgtnccggttcgccgcgcgcggtgggcggtgcttcttttttgccgtggtttgggccgtgtttttcgggcccgcctctggtccgggggggcngctgggccgtttttggggtttcgttttctctcgctcgggcgctgggttttttgccgtccgcttgtttggggcgcntggggtgtggtgtgggtctctttctttcgtccatttatgtcttcttttctctgccctctctcatcactctctcctttctttctttcgctcactctctctctccctcactttctctctttctatcgctctgttatcaaaacgccaaacaatacaaatttgaattgttttccgattgtcatgttgccaaactgaccaaaattgtgccctgatgattgcaaatgcgccttcaaatgggccaaacatgcgaatgcggcacagtccatgcaacagcacaacaacggctgcagccgactgtcctcctcacactgggcacatttcacaaacgccgcctgatttggttaacgggaaaaccgttgaatggggatggactcatttccgaattaaagcaataaaagtcgtgattttcagggaggggggaattcggggtcgctgattatgaatccaagccggtatccattcgacacaactccgaaccacggatccagattcggacaaaagccgaaactttcaaaattttcgagtttgcccttttggctcaaaactgtataaattacagtagtgacaaccttcagccggttttggaccaaaatacgaaattgcatattttttttcatttcgcttacgggattaggaatttctgaatttcttggactttctcggctgaagaaattcacggtttttttggcatttctcgggttttggcaaaaaaaatgcccaccttcaactgaatgttatgccgattggccgggaacacaatgcgccgctgcaacagttcatatttgngcaacaaggacgctttgcgcttgctgtagtggagacatgagcgcaatttggactcgtacatgtgccaaa

SEQ ID NO: 16587 - DNA, 2337 bp, Heterodera glycines
  unsure (1)..(2337): unsure at all n locations
aaaaacaaatttctgccggaaaagggggggaaagaagcaaattgtgcaaaaattatggcggcggggggacaaatttaaataaaaaatcgaattaaaaatttaaaaaaaaccagggattagttggtggcattaagtttttttctttaaatcatttggtttttccagggtataatttgtgttcattgttgtggctatgtgtgcattttaccagggcaatacaactaaaaaaacggcattaatttttaattgagaagtaaaggagaaagtgcgcaaatggcataaaccgattaaaaaagtaattagataatagctggctgggttatatttttgttaaatttcgtatctattgactcttgactccatttgactttaaaggtttgaattcaaaatctaaaaaaaaaaaaatccgggcaaatgcacaacaaacaattcaatctctgttccatgaataatttaaaagaagcaatgaatggaatcaggcccgtagagggaaaaacaaacagcgggaacggagacgaagaattaattttctggaagacaattgggaaaaggtagtgccggtgccatgaaataactacgagaaatttccaaaaaaaaaaaaattttttttatgaatcaatttacatttactacttgctgctacaggcctgaataaaaaggacaaaaaaaatccatgaagacgacaaggaaacaaccaacacaaaaaaaaacaataacaacaatctttggaatcaataaaaacataataataataataataataataataataataataataatcaatagccctgcagtccgttgtacacccgtggcacatggtcgccctgggcgagcagttcagctaacagtgccttctgttcagcggtcaactcaccgcgcgggaattccacatcgaatgtgatgtacaggatgccgcgctcctggttgttggtcatcgacggcatcccttcgtcctttttgcgaatacgcgcaccgggccatgtgatctgcgggaaagagtgtgtttttttaaaaatgaaaaaatttttgttcgagttcgggttcgacattgggcgaaatggatgcgtaaaattcgtaatcatcggccccccacaaaattgaaaaattttacaggcaattggatttgaaccgatgccttaaaaaaaaaaaccattttttcgctctttcccctttgtcgagaatggataaatccgaaaattattagagcaaataattttgtgtcacccttttactggtattaccttatcccgaacaatgtgcactttgtgtccatccaaatggtcaatgtccatctgaaaagcgttaagaaatctacgttttgaggaccgttaatttttttgaaattttggtaattaatttgaagcaaaaaaaatttacaaaaccaaaaatttaaaaaaaaaccaattttttgagcatttttgtcaaaaaaattttttttaaattacgcaattttttgaattttgcagaataatagagaggggatgatacaaaaaaacagtcacctcaaagccggacaacgcgtgctgcaacgaaatggtcacatttgtgtacaaatcatcgccacgccgttcgaaaagtttgtgcggttccacgcgcactttgaagatgagatcaccagggtcaccctgtgtagtgtggcaaaattaaaaaaaaattttttttttttttgaaattcactctacctcaatgtgcggttcgccctcgccaatgaagcgcacttcttgcccattgtcagcaccaacctccacttccacctaaaaatccaaaaatgaattatttaaaatagaaaaaaaaatttaaaaaaattaaacgaaaaaattcaaagcatatagggggattgaacccaagcctatctttttgttgactaccacaaggaccacttagacaaacggttgtcttcaaatccacttaaaatggacctccaagttctttgtttgcgcctccaacttcacatttggacactcatcacacacgcgaacttggaacatttgaaaacgacccttaaaacaaatgaaaacaaaaaattgtaaaaaaaaatttttaatagccgaccatgcccaactgttgtgtcctcatttcgtgcctaaaaacaaaacaaaaatggtgtaaaatattaaaaattgtactccaattaaaagcacaaaaaaatgaaaaagtttgccccaattcaaagattaactccttattttgaagggctagtanattctaaaaaaaaaatttttttcaaaaaantgagcccccccccccccccctcccntccgctgtgtgcacctgcaattgcattnnccgagtccgctcgtctgcttgtataccgatttttttgcgcgtcatttc

SEQ ID NO: 16588 - DNA, 1573 bp, Heterodera glycines
ttaaaatagaaaaaaaaaatttaaaaaattaaacgaaaacattcaaagcatatagggggattgaacccaagcctatctttttgttgactaccacaaggaccactgagacaaacggttgtcttcaaagtcttcaaatccacttaaaatggacctccaagttctttgtttgcgcctccaacttcacatttggacactcatcacacacgcgaacttggaacatttgaaaacgacccttaaaacaaatgaaaacaaaaaattgtaaaaaaaaaaaaaaaaattttaatagccgaccatgcccaactgttgtgtcctcatttcgtgcctaaaaacaaaacaaaaatggtgtaaaatattaaaaattgtactccaattaaaaccacaaaaaaatgaaaaagtttgccccaattcaaaggttaactccttattttgaagggctagtaaattctaaaaaaaattttttttcaaaaatgagccctccccccccccctccctccgctgtgtgcacctgcaattgcattcccgagttccgctcgtctgcttgtataccgattttttgcgcgtcatttccacaaatttgcctttgtaaacctggcaaaaaaaacagataaatttgtgcaataatttaattaatttaatcaaaatttatgggatttcggtttgccccccccctttttttccttaaaaaatggttcaaaattttaaaaacctcttccagtgtgacgtacaaatcgacaacaacgtcagcaccacgtggcgtctcttcgtcctgctcttgactgccatggccgaagaaatcgccgaaaaatgacgagaacgggtcatggccaccgaaggcatcgccgtcgcccattttgcggacgccctcctcgccatgcctagtgggggggggggggggggttaattaaaatgtggcagattcaaattaatcagcgaaatccgagagcttacaaaaattttctaaaaatttcccggtgtaaaatatttatttaaaaaagttgtgttacgaaaatccaaacctgtcatacactttccgtttttccgcatttcccaacacactgatcgcttcgcccaattcttggaatttttcatgggcatccgggtcttaaaaaaataattgcaaatttcttgaatgtcatttagttggccaatttactgtctgggtttttgtccgggtgatgttgccgggccattttcctaaaatcaaaaaataaacattactaaaaatgggtgatatttagagtccgagctggacctgggtacagttcattttttggctcaaatcgattttcctggccctggtttctatattgtaataaatgcagggaccatgtcaaggtaggcataaaaaatctggataatattttagaatttttttcaagtaacgaatgtttttttaactatgaaaaaaaaatacacgataagcctgtgatttttcctgaacctggatgcattttttggcgctatatgcaaagtggtcaattttgaattttatcaaaaagtaaaaacaaaagtgggggggaccctattgttttgcaaaatttttttatatatagtcatgaaaatttattccctg

SEQ ID NO: 16589 - DNA, 1588 bp, Heterodera glycines
tgcactcaaatttgccaaatttttaaatttacctttttttctgctattattattttttaatttaataatataacattttacccatattgatgatgggatgagcccgtccagccgcagtgcctccacgaaggagttggccaaactggcccaaaaaaggactgattgccaatgagtgactagagattgtttgtattacatttttggcattatgttttgcgtaattcaaaaagccacaaattcataatttactttatatataaagtagagtagagcgggaccgggccgggaattcccggtcatccgaggtcccggtcccggattttgaaaagctcaggtcccggtcccggtagggcaaccgggaaccgggaaaaacaagcactggtaagaatggaggtctgagtgaaaaattagagatgaaagttggagttaaagggaaaaaattaagaaataatcatataaaatattctgaattttttttgtatactcattggttttcctatcaagaaaatatcattcctcatatattttacttgatatatatatatatatattttattattttttaaatgaaaatccatacaaattgagcctaataatcccaaaaaagaagccatttttgttgaaaatctgtcaacaaatctcctcaaattttcaaaatttccccccggcggcgcctatcagcaccgccggccccctttcttccccaaaagttttctggaaaaagcgcgccgaaaaaagtggtgtgataagtaaatctaaatttcaaataatattcgaccatttggcccaaatgattaattgcttgaaataattgaagaaattttgatttgaaaattttctttaatttaatttagctttaacttttggattttattaaataaaaaaataaaatttaattttgttattattttctcttggaataaattaaaatttgaattttttaaaatttttttgaatttttaaaatttcccggttggtcccggtcccggtcccgaagaaaaatcgaggtcccggtcccggcttctcaggtcccggcaagtcccggtcccggttttgcccaaaattcccggtcccgctctattctagttaaaatcctttgcgtttcctcaaatccgccaatttaccccgtcctttctctacaattgttcgtctcttcaaattctctctttctgtgacggcattttgcccgaatttccgcccgatgacagtgccaacgcgtcggatggcaaagcggtggccaaatggctgttctcgcctcgtcctaacaatttgccgaagctattttatgtcagcatttggtcagagatggggccacaatggtcggcaatcgtggaacatttattgatgcaattatgtgatatctaactggtggactttgctatttaaatgttgttgtatatgatttttgttcacccactatttgttaataaatttaataaagtattttattacataaggcttcaaaatacgaaattcaatttttttttttccatgggtcttaatagctgatttcaagacccgatgatgattttttcttgagatgctgaatttcagagcgtaattgacctaaaaattgccaatttccagt

SEQ ID NO: 16590 - DNA, 2172 bp, Heterodera glycines
ttttgcttgggaagggtgcataaacttgctgtagttgatttaagagtaaaaagagggcttggttcttttgcttaggagaaaggattacttactatagttgacttttacagtatgaaatgggtccgttttttgggggaggggtggagataatttactgtcgtcaatttgtaagtaaaacaccaataagagcttgtcttgggacgtgaaactctctgtccgaaatctcgcattttttggagggagaagttcaaaatttgttccgtgagatccctacgtcccacaaaatcattaaaaatggggttctgaaaatggatgggcctacataaacgtgtgcacttcatttccctcgcccccgtcgtttccctcccgaaatttttttttaattttcaaacagaaatttaaaaaaaaattcttagggattttttagtaaaactttgaaaatcagcgatttcttttgaaagttttttttttgaaaaaagttagtaggtaaccataaaattttggataaatcggtgaaaagtttttcaaaaattttttccttgaaattttaatactaagaaatttcctgagttttttcgttcccgatcagaattacttttgcagaaaaaatgtaaatgatggcattaaaaaaataatcaaatttatacattttaaaaacggattcagtgccaaagaattaccgagcattgaaagcgggtataaatgtcagagctgacatgataatgtaagtgatcaacatgtataaatatttattttggtgaattttgtgatataataaaatatgcaaggacaaacacagaattaattttctatatttaataattttctcatctcttttttccttttctttttatttttatcctttaaaaatttaaatttatattttttaagcaatttgctaaatggaaaaaaataattgaatttaaagatagaagaaattaatgaattctctaaataaaaattattttaaaaaaattactttaaaaaataattattttgaaattttcattttttaaatttaataaataatttagaaattggtttcaatccacaagagaatgcgttgcaacagcttgtatgggataatcgcgttgataaattgtgcgaaaatccatggcccacttaatcgtatttttaaattaaattcttggcaccattgtttgttttcaattaaaatgccatgtttgggttcacaaatttttatttattatttttaaattttcatttttctattttttaatttaatgccaaataccggcacattaactatcatacgtttcatttctgtttccaaattgatgtttgaagtttcgtttaaatttcttccacaatgattcaacattttgggtatgagcttgattgttggcaggattgacaaagttctgggaatgatttatgcgtgtaattttggggtaagttcggaatgcaacggtaagaacgctattcatccgaaataatggtgttctctgggttgatgtattgttggatgagcaatatcagacggattgcggaacgtgattccacagggaccaaaaaaatctcgacgaaccgtcctatgttgtttttctgggaccaataatcgaaatgattgccaagaagttttgataaaaactttttggaaaatttttgaattttttaaaattttctcggggacgggaggaaaagagctgctactccccggcggaggaacataacacacttccctataatttttcaaatttttttttaaattttaaaactttccagggtcctccaatcgtccagtccactccgcttgtgccaccgccgctgggaatttctcagaactacgctcggcacagtcaagcaccgacaatggcattgccgtctccaatctttggccatcacttcccatcatttgggccaatgccgacggtcagcagcagggcacgcgttttttggggggtacattcagaaagtgctctgaaacgcaccaaattttatgtacaagttaaataaggctctctgatgcttttattatcaaaaaggaagatgaataaaatttttaattgctttaccaaattttataggcatactccccggtacagggctaacttaacctgaaaaaatgacaattgtaattgattttaaatttttttagaaattctgagttattaactgtttatttattttttgaaaaattaattcataaat

SEQ ID NO: 16591 - DNA, 1952 bp, Heterodera glycines
aatgccagcagcaggtaaagcaatgaattggaatttaacattgaatgccatattgagaaagtaacatgactgcattcaattacggcttacgaaaattacgggcatttttttgggtcttgtattctgtctgaataaagattttgcgagttttccgtaattttgatctatgactggaattttttctcaagaaaatttcttgcgagttgtttttttttataaaaacaaaaatttttcctttttttatgctcacccgtatttctatttctcttaaaaattattcctgataattagggatcggattcttagttttttaactattttttctgcggctttaactcgacgagaaatgcacgaaaaacacattctttttcgaaaatttttcatttttagtgccactattcatcactaggaatcactattttggagcttcgccactaaaaaaaactatttcggaagttagccactaaaataattttttgccactattttggcgtttcgtcattatttttgccactattttggcattttttggaaaatttcccaaaaaatgcaataaaaacgaaaaatacaccccaagaatcgacctaaaaattttcaaaaatacatccctaagaattggaaaaatttcacaaaaattcttcccccaaatttttttttcttgttcaatattttctaagaaaatattttgtaactgcaatcagtgaataaaatctttttccttaattttaaattattttcaaattaaaaaacagctatttaaaaaattacacccctaaatttggaactttttcgccactatttttgccactattttggaatttttttctcactatttagttaattattttgggattttttatcactaaaaatccgatccttactgataattcgaagtataaatgctacacccctaattttggttgtttttttaaaccagaatatagggacctccctttttttagttcgcccccattttggccttttttggatgatactttgagtcatgagagagggatttttaggttaaacaatcacttggaaatctttcttgccgaatttgagtggcttagaaagtaccaataggcttaactttgaatctgttgtttcaatcaaactgaatactaggtcactccttcttaagtaactttataattttaaaaggaacaactgcaggagatacgctcgcctcatcatcaaatttcgacgacttctcctcggcaagcatcaacgagccatcagcacaaaagttcccaccatccccaggaaaaattagtgactttgagacggcgttcggttcatattttgacaacaagcaaaaccgcaatgattgatgcaaaagttcaaatcgaaatggaaagtgagaccagtgagaaatgatcggacggcagcataaattcggaggagtgaaagaaatgtttgcgattcattggctcagttcaatcaactccgatcatcctcagtctcttttagtgtatcaaatgaaagcttgaagcttaaagattttttttaatttaccaagaatgtagggattgaccacggaagaaaaaggttatggcttaagaaactgagtatggccttcgagtatccggaacagagcctttggattttcaattttgatatttttttggttgagtttttgtgacttggcttcagtaaaaatgctttcgttaagcttctggttggcatattaattcaattattctctagtatttttacgaacaaatacacaaaccaaaactacgggggactaggagcaagatggttttgaaaatgctttaatattggactatgatggcgccaaaagagtgcgatttacgaagctggaagagagataccaattaattgttttggtgaatttaaccgaagtttttttcgtttttcgtcccaatgttaaaaattgatcaaaacttgtttattgttccagaaaagggaaaaatccgcttacattgagg

SEQ ID NO: 16592 - DNA, 969 bp, Heterodera glycines
aaaatccgcttacatgagggacaaaaacattaattaaaaatgtcctcaagaaagcgaacgagatcatctccaaaataaaatataatatgaaatcaatacaaataaataaatatttaccaaatcacttttagttttaatgaattaataattcgactttaatttttccggactattttacaggaatagagatagttttaattttatttctaaattgatttaatgagtttatttcaataagccttttatcgagttggttccaaattttagttacccgccctacaaaaggtataaattttttgcctattttatatttcgaagtctataaaagggaatgttaaagcgttcagaaggtttgaatatttcaaagggattcagatctgttcggccataaattattttatcagccatgaacagatcagaaagctttcgcctgctttcaagtgttgacagttgcaggtattctaatctttgttggtatggaatgggtggaaggctgcatttgaaaagaactcttttggtgaaatatttctgacacttttcaattttttaaatatttttttgaatagatggattccaaacctcaggagcatattccaataacggtctaacataagttttgtacaaaataatccaaatcctagaagacttggacttaataatccgaaattaagaacgcatacgtaaatatgcattctttattatttgtgtgacatgattgcaaaattgcaatttattatcaatattgatgcccaaatccctaattgtatccacaacatttattatatttccatcaattttatatttctttggggtttttattccccaagtgaagtacaaaagttttttgaattgagattctgatttgccatttatttgcccattcggataaattatgcaatgctttatgcataattcctgtgtcggctcttgctttataacaaatatacaatttaacatcatcagcatata

SEQ ID NO: 16593 - DNA, 3850 bp, Heterodera glycines
  unsure (1)..(3850): unsure at all n locations
atttcaattggggacgctgtaatttaatagaaaaaaatatannttaatattaatagttatttattgttttgcttntcggcactccattgggccgatgaaaaatgccgtgaaactggcattgaatgttcagcagagaatcgccgtcaaattcttggcccggcactgttcaaaattcgcttttcgcttttctcgcaaaagaaattttctgaaaaaattggtaaaaaataaataatatttgttatgtatggtccgcctcttttgagttttattttataaattatttttgttagattttttcaacgaaatattttttttattcaccagtctttccatatttacagttccatccggcattttaacagcaaacgaagtgatgggcgtggaacaataccataccaatccaaagttttgtgggatttccgattgcttactgtatccaatgcaatttccaagtcaccagcgaatttgggcatttggaacattaataatggacattgaaaaaatgtcggaatttgtgggagaaatggctgtgagtaaccgatacagcgaaactttgtacataagtggacttccatggcgaatgttagcacaaataaaaacaagaaatgaaggcactgacaatgaaaaatgtttggaattttaccttttgtgtaccgctccaaaagaaggttcaaattaactcttaattaaggctaattaacaaattaatcaccattaaggtttgatttggcgctgctgcgttcattcggccacttttcgaattgtctcgcaaatgaaagtggcggaaaattccactgggacactttgtgaccatatttttaacaataaaaaatactggttgggtttcaataatttcatgtcatttgcggtgagtttgacaattaatttttcccttaatttatccaattatgaacaattaagcaattgatggacccgctcaatggcttttacaacaaagaagaggacaaagtgacacttaccatcgatttaaccgtcaaaaaagaaaaaataagcaaattcattttcgatcaaagcaaatcggaagggacaattttgatggaaattgaaaaagtgtcggaatttgcgcgcgaagttgttgggagtgaacgtaaaagcgagacagtcacgtacataaagggattaccatggaaaatattggcacgaataaaccactggacagaagacagtgacaatgcgaaaagtttgagcatttttcttttttgtgccactaccaaaaaaggttcagtttaaatattaataaaatattaattaataataattaatttgcattggcgcagaaaattggagctgcaaatgttccgcaatcatccgaattgtctcacaaaatgacgcagtgtcggattacagagtcgaatttaatgacaaattgttaaacaatgaaaggaaaggctggggcaccaaattctttttatttgctgtgagtgacaattaatttttcccttaattcatccaattatgaacaattaagcaattaatggacccgagcaaaggcttttacgacaaaaacgaagacaaagtgacagtggccgttgatttcattataaaagaagcaaaaattgacaaataataatagacaatttgacagatttctcaatgaaatctcttttttgtctattcttctgttgttattcgcatttgtttttagacttttttttagtcttggaaaatgtttccaattatttatttttttggctttcacaaaacaaaatttggctaaaaagaattccgattttgtgtttatgaatgttaatggtgtttctttgtcaaaaatgttattcctatcaattttatcttacaaaagatttctaaaaaatgtaaaaaccaaaaaattaatagtgcgtgttttacatagaaaaactaagttttgagattgagcaattcaaaaacttatgccacagagaaagcaacaggcgccgccgggggaatttttttaatacagttcgacattttgaaaaaagcctggacttgggttccatgttggtgaatttcctgggcaaaaaatccaagaaaaatccaggccaagctctagtatttattgctttttgcttaagaaatttttaaaaaattgcggaaataaattcaaaatctggaatcgtgccatttctatggcgtttgtttgttgttccgtcgcttgcaactagagaccggagcaggaccggatcctgcgcaggattttgccgggttccagtccgcaatcccgcattttttgaaaaagcgggatttgcaggatttgcgggattaatcctgccggatccggaatggctaagtaattctctaccattttttttgcgtgtttcagttgggtgtgcaacgatgtttggatggacattttgcccctttttgaccatgcccaactcggcctcaaattggcactgatttcgccacgtttcgatgttttagtggacgcccatttcaatggcaaaagcgaattgacaatttggagacaaatcacaattcaaaagttcaaaggaccaaaagcgaaactgtctgaatggatcgatgacaaatgggtggcatttcctttgccggaccgtccgctgcccaacaaaattcgttttaggaaccttcggattgagtaattcaaacataaagggaagaaaatcactcctttttcaccattttcacaggaaacccgaccattctgtgctcgcatttctccgtgccaatcagcaaatttttgaaaaagccaccaatttatgtttgtctgtttcttcatgcttccatgattgcctttcattattcgtcgacaataatgtccagccgatttgggatgtttttgcctgtgaaatttggccgatttttgcgccaaacattcgccgctttaactttcgcgatggtgatcatttggacaatttgcgtcgccgcatttcgcccacaattctcaccgatctcaacaaccttagtgccatcacttccggtcgtctgttccccgatggcatcgctgatgatgggccaaatgcaactgctggccaagcattggccaaatggttgcacactccgcgaaatgatggccaaccgaagcgattgcgttgcggtggtggttatatgtcaaaaactgaatttgtcaacattttcaaagaggtgtggccatagtttaggccttttccagctttttatgtttggaattttgggccgctggtcgcgaatctatgacactaaaaaagagttaaaatccaagttttctaattttcctttgtttaaacttaattaggaattgatttgaacattgtcagaattgtgaatgttcgggagctataaactggaaaagggtcataattttttaagcgaatgattttgataagctttaatttccgttttttcatcaattagaaatttatccgtgccaccacttccgccaactacgaaattcatttttatgttaatgagtcatatgagtcaacgccattggtgccatttgaatttgtgaacgaacggacaaacgaaaagcttacactgctaacagaaaaaatagatgtacagtgtatcatagggctaatgaagcgatatccaattggggataatacggtggcggatcagtgggaaaaagaaggaaattggaacaatttaaactatgtcaactttatgctttgcgatgccaaacgatgcactgggtgagcaacagggatggcacggaattcgaccccctaaaaagctttggacgtcgaaattccgatttctgaaaaaatttggaagtcgaaattccaattcccaaaaagatgtcaatctaaagctcttgatgagacaaaccgatctagggcttaaagtagttgatcagaagaaatccacgggagaaaaccctttactttacaatagccaaaaaacagttgat

SEQ ID NO: 16594 - DNA, 3587 bp, Heterodera glycines
  unsure (1)..(3587): unsure at all n locations
agagaccaaatggcaaaaaattcgggaaattccctggtaaaacattccccaaggaagaagcgtgcccagctttggcttggtcccggtgcctacataaaccacgactgcgccncaaactgcgaatttgtgccgaacaaacagcaaaccgcgacgataaacgttctgagggacataaaagcgggcgcagagattaattgcttttacggggacaactttttcggagacggaaattgcaattgcgaatgtttaacatgcgaaaggtatcaattttgaaatcacattaaaatttatttccaataaattttacatttcaaaaatcgccttttcattaggcttcgaatgggtgccttcgccgatcgccgtttggctgctaattttggcgagattctctccataaatggcggcaccaaaataaggtcgcgaattcaatttgaccgaagaataaaaagcgaggacattgacgaagaggaggagcaaaagtacaaattgcgtgccaccggctaccgaaagtgccgcgcggcggtggcggaggacggcggcggcgcagtggcggtgctaaacccattatcaatgcatttgttgaaagtgaccggcggggcattgccccaacaaaatgccgaacagaacggcgaaacttgcgaggagtcattggaatgtgagaccgttgaatttgcattcattaatcattcttttctttcagacctcagagaaacgctgaatttgtcccggtctttaaagttcgaaattcccgacaaatcgccactgaaccgttcgttgacaatgaatgggcgaattccaatttggagaagggaagcggagccaaaagcagacaatgagccaaaacagcagaggaaaatggcaaacggagaaaagcgaatggtaaaacaaaggcaaagccaaagtgaaaaaagaaacaaaaagcaaatttagagagtaaaagccgaaaagagaagagaacggaacagaggagaagagccaacccaaagaagagtgagagcaaagaggagaaacgcaaaggaaggaagtgaagggcacagaaagagaaacggcaggaggaaaaagaaagaagtggaagaagagagaaacggaacgagagaaaaggacgaaaaggaggcggaaaaggaaaaagaagaagcgaacaacaacaaagagataggggaagaggagagaaatgagacgacgggagaagaggaaaagggcagggcgaaagcggacgacggagaggaaaagaatgagggagcggtactggacgaagaggaggagaagcaagaaacagcggaagagaagagcaatacgtcttccatggcagaagaagatggaggagggaaagagagaaatggggcgaggctggaagaagaggaggaggaggaaaaggagagtagcagtaagaacgggacagaaaaagagagaaaggaaaccataggagaagcgaggatggaagaaaaggaagaggaggagaacagagaaacagcggaagagaagagcaatgggacttccaggcaaaaagtgaacgacggagacacggctgaagaagaagatgaaggagggaaagagagaaatgaagggaggttggaagaggaagagatgagcagtaagaacgagacggaagagaagagcaatgggactttcatggcagcagaagatggaggaaggaaagagaggaatgaagggaggttggaagaggaagaggaggagaacagtaagaacgagacggaagagatgaaaggacaagaggaaaaacaggaaatgaacggaaaagacaaatcggaagaggggacgatgacaaaacgaaaaatggccaatgactgcccgaagcccatcagagtttcgaagcggaagcgcaacatttccccggagtttaatttgaacgaccttttgtacgaagattaccgaacgaagttcggtgatgccattccaagggatgtgtacaggcattagcaaaaagtacaatgcaatgagtttatattgttgtgccgttctactacccaaactgtttttatggggactgggtcgttttggcgccagcgcgagttttttgattataacttttttcattgttggccaaatctaacaatcttggtatcattcgaaagcccttcacaagctctattagccttacaaaaaataaaaaaaaattttagcttgtaaaaaagttattaagaaaaaacttccaaaattttggtttttttgttatttcaggttataacttttttgataattgtctaatcacgaaacaattgcttagaaatagcttctaaacaccttaagcttttgaatgataccaagaatgttaaatttagttaacaataaaaaagttataatcaaaaaactcgcgctggcgccaaaacgtcggcgccaaaacgaccccgaccctcgactcaccacggttttttttgttaccaacgttctcatgattcgaatcgccacattttttcaaattttatcaaatttaaatgaaatgaaaatgttaatgcaaaaattaaacatttttgctaatgcacaatttttcgatcaattttataacctctcttccattgtcattcgaattctcgaaaattgggaaaatgacggaccgaagtatgtaaaatacgataatttacaatattggaattaatgagtttttttttgttttttttttgcatgttcagtccgactccatcatttctcagctcaccggcggacgacgatttgaagggtaattggctacaattcatgcaatttagccaaacccatcattttggaggggcggctatatccaaaaactattttatttgtttatttaaccaaattcattaacagagtgacccaatttcggaggcgaaatctgacttgtcgaaaaatgttcaaattttactatttcaaattattttcaaacgttttttggggaaatttctttaaataagtgcaaaaattccaacccttaagaattaattttctttttgtcaaaatatcgattttttagcgcctctttatttacattttttgtgattttatacacataagcacaacatccgggaaatgctgtaccaaaaaagatttgctttgaagcattagaaaaaaaggcaatggtatagattattggtcccgaaaatttttttttacaaaaatttgagaaaattgtttttaggagtaatctgaggcgccgagcacgaatccggccttgttttgactcattcgaaccccgaacccgacccggatacggcatttttcgaaaattaaaaaaaaatattgcagatattgctaagggcatgattgaattgtagaacttattgcctagttattcgatgaatacatgtggagacagttcaatgggaaaaagacattggctgcattcgacaacagtatcgataagacttcccatttttaccttgtgaatgcgtgatgcacatttgggtcccttaagttaactcatattgttgcacaattcaatcaacgccttagcaaaaaatttaattttcgaaaattgttcgagtccgggtttatggttcgaaactgagtcaaaataaggccggattcatgctcggcgcctcagattgcccctaaaaacaattttctcaaatttaaaaaaaaaaaaaaatttcgggacc

SEQ ID NO: 16595 - DNA, 1137 bp, Heterodera glycines
  unsure (1)..(1137): unsure at all n locations
gggggataaatggaggcgggggattattttgagaaacccttcagaaaatttagaatttgttttaaattttgaaattttttcattttttaagcccttgaaatttacgctaatttttggaaattcatcgcttcagggttggactatttagtggataaagcttaaaaaataaagaaaatccgggagttctaaattaaagatgaaaaaaattcttccagaaattttcaatttttcagaaaaaatcaacattccattctgaaaagaagttttcataaattaaaaaactagaataatctgcaatttttttcttttgagtggaagaaattttcacccaaaatgctccaaaaatatgtcactagggtattttagggcgctgatcaataatttgaaattttgctatttttgaattccccccccccatatctaaatttttttctgacactccgatcactaaatattattatattaattgtttcccgccgattaagtccgttcccggcaccttccaacagctcaactgatcacgacgaattgacagtgaaaattggtgacaaacaggtgaaacaacagaaagagcaaaatggatttaaaaactgaccatttaactgaccaaactttatcagatcactgataaacttttaaaagatcaatgataatttgatcagaccaaagataagaattagacaggtaatttaataatttctggtcaaatcactgccattttttgatactgatcatttttggtcagatcactgtaaaccttacttaaatcactaaaaaaaatatgatcagatcactgattcttatacggaaaattttcgtcagattactcataaatttgtcagattactgatatttcttgctcagatcactgaaaacccattctgatcagatggctgtgtccgcccattggctgatgtccgtttccccggtgatcagtcgcatgctcagcgtggagatgaaggagaagcagcagcgaatgatcactttggacgaattgggcgtggacatggaccaattcatggagtttttggaggccatctcttatcttanaggatattttctgcccnacccgtaatcattgatactgtatttattactactataacccctgaggngtgaaaatatgattttaatttt

SEQ ID NO: 16596 - DNA, 2031 bp, Heterodera glycines
atgagaaaaaaacggaaaagagctgccgaagcagttaaaagggggggggggggacattttaatatgagtgggctgccggcgggggagcccttcggaatcgacgacgacctatggccctttttccgcgacctttgcaccattcattctttacacgttgatgggggcggggatgttttcttgtttgaaaatttcgctttttgtactcctcgtgtaccgtccgtcccgccgctccaccaagccaatcgtcgttgtttttccgcagcagatggctgtttctactgatggtgaaaatgtgtgttcagccgttgctccctatcgttgcatttatttcattcgcattcgcaccaccacatgtgggcccctcctctgctgacggtgtgcgggggggggggggaaacgagggcccaaaaacgggggcccaaaaacgggggcccaaaaactggggcccaaacgcccccgactcattggcaatgcttcttccaagccaaatgtgccagtgattccgttggcacaaattgtccgttggcattgggacgaaaatggggcacaacagattatccaagcaataaaatatgtataaagaatggatttaaaatttggttaacaaatttagaccaacacactaaacaagggcactgaactaagttacggcagctgtgccaatgccaatgcttcttcatttgttataagaattctcaaaaaacgggagaagaaaaagtaatccattgaaaattagcgtttcaattatggttaaaaattaggattttttgagttcggatttaattttcaaccttacaattgggtccaatcactaaacattttttccattagtctcttctcggcgccttccagcttgcctgacgacgacgatttaacggtgaaaattggtggcaaagaggtgaaacacacaaaaaggacaattgcttttttaaatttaaaaaaaaagaaaataaaaattgttttaaaactcgagtaaattgagaaagagataactcccataaatctttgtaaaatcactgacaaaatgttttgatcagatcactgattaatcttggtcagatcactagtaaagcccggtcagatcactcataatccattctgatcagatcgctgtgtccgcccattggctgtcgtccgtttccccggtgatcagttgcatgctcagcgtggagatgaaggagaagcagcagcgaatgatcactttggacgaattgggcgtggacatggaccaattcatggagtttttggaggccatctcttatcttaaaggaccttttttgccaaaccgtaattcatgatactgtatctattctactatatccccaggagaaatttctctccccttttatgggattggaatatttttaattatgaaacggattcctaatttttagccaaaaatgtgctgatgctgctcaatttggctgactacttccaggtgagtgcccttgcagaccagcagggctggacgtagttacgtgttacgggaattacggcgttttcgaccctgtaattaccgcttacgggttacggctttttgagatttctccgtaattttgatctctaactaatttggaccctacagacagactccatcatttttttcaaaaaattagtttttactatttttgaatttattaggctaatatattaggggcactaattgctccgttttgaggtgaccgcgttgaagtcgcgctgcgaattgcatctgatcaattgcgtggaaattccactgatcgaccgtttccttctgattgatcgctacggactcgacaatttgaaagtgcttttgcataaattaatttttaatgatttttcaaatattttaattatttcccacttttagaattattttttgcattttgatgttgacgaattccgtgcctttttcgttgcgaacaatgaacagttttttcctaagatcagtaaagaatttttgttggctttgtccgtccgactttgtggatgaatttgtttaattatgattgggcctggctttgatcaaactgatttttttggcattttcat

SEQ ID NO: 16597 - DNA, 3039 bp, Heterodera glycines
  unsure (1)..(3039): unsure at all n locations
ttttggaaacaaaattttttttcgnactcaatgcatttttntggccaaattcntctcgggaatttttnggacataatttcattttttaaataattttaatntattntaggaattaaaaggngaatttattatatttttatataaatattcattaaaaataaaaaatgtcctcaattttaataaaataattcatttggctttgtttaaatgacaaatttctttaatcatttttatttaattttttggaaattctttttaattttcaatgaaatattttcaatcttttttcaatataatttttaatttaatttagcgttttcaattagctttaattttcgaaatatttttctttttatattattatatttaacccaaaattttatgattttgtttttttaacatttttttgctccatccaaatttatttttggcattttccgttttttttaaaatttcatgtttggcattatgtccattccttttttttaaatatttcctcaattagctgcccattcccaattttcatgccattctttcttcccccaccccacttttaaagtctttatatttccctggcgacctaaaagcatttaagtacccaggtaaattagccgtgccgtgccgtcttacagccgacggcacgaccattgattttgcgtttggcacaaatatttttttttgtgccatgccaaaatatggtgcttcaaattttccagatttatttatttttataaaaaattcaatccgaattcttcagagacaaaaaaaaaatgtcggaaaattataaaaattaaaaaaattaattttaaaaatgacacaaactttcacgccaatatttttcaaaaatcatcatggatattttgattattaattaatttttaattagataaatagattttgtggaaatgctccataaaaatgcaattaattgctttattaaaatcaaaaaaggtgggcgttagaagcctttgaataaaccgcacataattatatgcactaaatttattccaaatgtgcttaatgggcgtcattcatcatccattgggattaaattgaaaatttcttttttttttggaacagccattttttgacgcttaataagaaaataaaaattcaaaaataattttaatttaatttaattttagataaatttaattttttaaaaaattctgtaaatgaaaattttgatttatatataattaaatggtagtattatttcattttaggtttttaataagcaattttccattttctaagcattttcccccaattcatttgcctaaccaaattggttttcgcaaaattaatttgttttggcgttccgtctgatgtcattgctgtgtgtgacaggtgaaaaatgcacacaaaaatagaaagtgacaaataaaaattaataataaaattggaataataataataatttaataaaattaaataaataaatcgaaaattaattaaattaattaaaaaattattaataattattgaataataattataatcataataataatttgataaaattaaataaataatcaaaaattaattaaaaaattttattaatttttttaacaattattgaataataattataataataataatttgataaaataaataaataaatgaaacgcaaataaataaaaattatttaattattcagtgaaaaaggctcgtcttcaaggcacaatcggttagcaaattaaataatttaaattaattaaattattaaaaaaaaaaaaattaaaaatgccaaaattaaattttctaaaattcttttccagaagatttcccatgcctatgtgacgttaaaattacaaaatgtgaagtcaacaaccaatcgctgtcaaaggcaatccagccgcaatgggagcaggaatttgtgttgtaagagaatataaataaaataaataaaatttattaaaattgaatttatttttaatttaattttatatcaaaaaatttactctgatgactcatccatccatttatttcattttttattgcttaatttatttcaatgtatgtgaattgaacaaaaattaacttaatatagagtgaattaaaattctgccgttaatttaaaaaggatttatttggcacaaagtgcccgccactgacatatgccgtccggacggaccggcctagtatggcacctctgattttattttactttactcacaaattttttttcccatttaaacgtttataataaattattcaatgagttatgtgcataattattataattgcctcattaggcatgcaattaatttttcatttagtttttttgataataattttttcaaattttaattttatacattcatcactacgcctgttttggcaccattttcggggatattttcggcccggcatttgaccccgactcgggtcgaacgttgtgccgggattgggcaaaggttccccaagaattaatggcaccaaatttgccaaatcctatcggatttgttgtgttagctctgatcactctgatcatttttgtttgccatttcagtgaaactgatcagctggaccagggcctggtacttgagctgtggaacaagggcgtgttgtgggacaaactgctcggtgttcacttcttaccacttcgtcagattggctatgcccaagaggcggggcccggccgatggctccagggcaagaaaaaaatgccataaatattaaaaataaatgggaaaattaataatttaattataaaaaaagggaaaataattaatttgaataataataataataataacattatgggcgaataattaacataattataaacaggcgaattaattaatttatgcaataaaaagagtaaaataattagttgcatgtgttaaagcaatgaagtaaaaaataatttttgttttaaaaaaataataaatacgaagtaaaaattattcgtacanaaaattttaaaattaaaaagaatgaatgattgttttttaaacattttttaaagttaaaatatgtgttttacttaattattaataatttangtataaatattaactcatttcagtt

SEQ ID NO: 16598 - DNA, 1673 bp, Heterodera glycines
tcaagaatttctcaatgaaaaatttgggaaaacatctcaaaaaatgcgcaaaatttttccgctcctggcgccttacaattcaatttgtaaggaaaacgccggcgggcaaaatggcatgccaaaaagcccgtttttgccaactgctgagcgccgaatggcatttttaaaacgggcactttccctaataactttctttaaaataatcattattaatgttaataggagagaaatttttgagaaatttcattgagaaagtcgtaaagtgcaagttttttttgagattgcacaagttttaatatatataattttttactgctttttataatcagatatgcttcattaagcttttattttcgcatgattaatttagcctcattaaatggatttaatgatggctttttttaagaattcaaaaaattgatgccgtcattaaaatgccaatctgtcccatatccaataaaatccttcattcattttattttaaataaaaatgaatgggtcatattttggcgttttgtcttttttatgtaaaaatattccgttattcattattccgtttcatttcttttttcaattgcactctgaggtgccaattgtgtttgtatattgagcaaaattcaaagaattcctaatctgggcacaaaataaataattccacaatggcattcatttcgattttttgtttcttggcacatgccataaaatttgggccaaattaaaaaattttgttttattatttgctattttttttaatttttaaaataaaatttttaacaaattaaacaaatttataccttttgaagtttataaattcttttattaataatatttgaaaaataaaaaacaaaatttgtttattttttaataatttacttttgacatttacaaaattaaataaataaattaataaatttaattataaaaattaattaatattatttccttcagttgtcttcttctaaattttaatcaggaagttgttccttaaaatattctaataacaattccatcgggaaacaagtcacgaaaaattcatataaaatttaccatttttcgtccattttttgctgggtcaattaaaatttaattgccaattttgccgatggcaattttagttttataaaaaacaatttttaccataaaaaattgtttttttgaagaaaatttgagcattcctatggtgccgtgcttttttgttcgattctatggcacaaaaatttaattggcactttctcgcggggcacaaaattacgaaacaacatgggcacatccattctcagacactttcaacttttcttcttttctacacaacgttttggctttctttatttagaaaggatttttattttcaaatattaaacatttattgggcggctcaattagaaacaattaatccctaattagaggcacacattactcattggaaaagaaattaaaattctttttttttgtattaatttttgccctcttgaaaaatgccgtttcaatatgcctatttaaaaattaatgccaccgtaattagaggtcattagtcctttgtaaatcaaaattaattaattatacattaatcattggaagcgaatgaaaattcattttttgatattcgtttttgccccacgattaattgccaatttaatatgcctcaatttaaaataaatgccaccctaattaga

SEQ ID NO: 16599 - DNA, 1872 bp, Heterodera glycines
tttttggtcataggagtcgtcgtcgtttcattttttaggttgtgcgagtcgtcgtcgtggcattttttggtcattcgattggtcgtcgtggcattttttagtcatactagtcgtcgtcgtggcattttttggttgtgcgagtcgtcgtcgttgcattttttggtcatacgagtcgtcgtcgtggcattttttggtcatacgagtcgtcgtcgtggcattttttagtcatactagtcgtcgtcgtggcatttttggttgtgcgagtcgtcgtcgtggcatttttggttgtgcgagtcgtcgtcgtggcattttttagtcatactagtcgtcgtcgtggcattttttagtcatacgagtcgtcgtcgtggcattttttggttgtgcgagtcgtcgtcgtggcattttttggttgtgcgagtcgtcgtcgtggcattttttagtcatactagtcgtcgtcgtggcattttttagtcatactagtcgtcgtcgtggcattttttagtcatacgagtcgtcgtcgtggcattttttagtcatactagtcgtcgtcgtggcattttttagtcatactagtcgtcgtcgtggcattttttagtcatacgagtcgtcgtcgtggcattttttggtcatacgagtcgtcgtcgtggcattgtgaagcgattttgtgtgtaaaatgtgaattttttaaaaaacggattttgacttttttgttcgaattccgggttcggggttcgaattgggcgaaaatagatgccggaatcggtttttccgaccctaatcactttggttggattttagaatttttccgttgtccagcactgactatctgtgtataaaagggatgaaacttttcactttatctcataccaaataatttttttcgcgaacaccaccggacatatttaccaaattcttgccgttatgccgctgagcacctccgaatgtattttgttttccgctattctgttcggcatctgcttatttgttagtcatacaattccatttttctgaataacactgtcttcctcttcaggtggtggattattatgccctgactgttgcgaccttttcattcctcattggaattatggtagttgttatgtaattttcactttagcacaaaatatttcttttttaagttcggtgcactctggccggtgatttgttctactttttacggctctgtcaaaacttcgaagaagaccacttccgcttcaaagcaatcggcatctgccaatgcatctggaactgcgaacaccaaatcatcatctgaccattcctctggcacttccaaagacaagtcggcatctgccaatggatctggagcgaacaccaaatcgtcatctgaccattcctctggcacttccaaagacaagtcggcatctgccactgccgcgggcacttccaatgacaattcgtcttccatggcaaaatcggattacgttgaacgccagaaggaccgctccagccgcgtatgtttactcactataccttaaacaaaaatacgcatttctttttttagtgcggtgagcagcagaagaaaaagtgatggaagaaaagaagaagcggatagaagcaacaaagatgtcgtctgattaagtgtatggaaatgaatattattgtatttgagaaatgatcgatctcaattgttgtgcttattttctctcagaaatgcttgttaattcattccttctataatatacatactcatttatttttctcgattttttttgttggccaattggtttaggataattgaaagattgtctaaagaatttggtagtagtttaaagtggttcccccccccccccaaaaaaaaattcccatgacatacataagagacaattaatttatttatttgcttgcttttat

SEQ ID NO: 16600 - DNA, 1387 bp, Heterodera glycines
ttgactggcgttcacttcgccattgttgttctgttgcagaaatttcagcaaaagaaattgtgggtggttgtcatcatcaaaatcatctccggctaacggcaaacgcatttttcaatgccaaattgtgaaggacaacacttgcaataattgcatttgaaatattttgaattggcagcctataaccggaatgatttgccgaaaaacggcgttttaaaatgccaaatgctctttcaacacatgtgcgaccccggcttaatgcataattaaaccagggtgcgtatcgaaaatttttcaaaatcagaacagcaagcccgaaaaatcagattttggggtcaaaaatcagaacattttgcaaaattcttcaaaacagttgtttttacattttattcgatacaaaaatgtatcaaatattatatttttcatctcccattatcggttttaacaattttgggaagaaaatgcgcaattaataaattttggtgcatttggaatcaaaaaagcagatttttaacgatttttttcgccttaagaaatacagtactttttgctgataccgaaattgaagtgcacatacctcagcgggtataagtcgtagagaattgttgttttttgcattttgtagaccattttgtactctttctaatgggcccacttaaaatttccagaaaaattttcccaaccccctaggaatttttttcgaaaaattttccgtttttcactgtatattggggtgttcagatcaccaggaaggagtgatcggaccaagttgctgtaaaagacttttttgatcagcactcaaagttaccttagcaggaattttttcagaatttttggactgcaaaattgtgccaaaaaatgaaatgggacaacacttttgaccacctatattttgatcaaattgtgaatatggtaaaataaatcaaataaatgtttatgtcacaaatgcaaatatggtatcattggaaagcccataaaaaatgctatccaatggtatgctacttatctgttgaaattggaaaatgacaattttatacgcaattatttttttcaaagcatgatgggacaacacttatgaccatgactgttataatgggcgaaagtatgaatgcttgcttattcatctgattattgagttcattcgatagccttaagtgtcctctattaacctgcataatttcgaaaaatttcgtaaaatttcaaaaaagttatggtcagacgaatgcttaactcagaaaaaacacatagaaaaaatatatttggtttacataatatttgaaaaattttagcttattttcttttggcagtttaatccaaaaataataatggtacgcaaaagtcggctaaccaataatttatagatcaaatccaatcacattttgttgtataa

SEQ ID NO: 16601 - DNA, 2962 bp, Heterodera glycines
  unsure (1)..(2962): unsure at all n locations
atttatttttctatcggaaatccaaaaataaaataatatgatgagaatttaccatcggtgttcccatcgtctgattgtgagtgccgtcttttcccttcgtccgttgttttgccgtgggctgaacgacggagttgagtgccgaaataaatggcggccgattcttcgaagggctgaaggaccaaacggaccaccaaactgccgaggcgttcgaccgcgtcgtaaattgctgcaaaaatggcaaagtgaaaaaattaaacacaattcatgcagaattatgtgaaaaattggaccttgaacttttaggggcaacaaatcggtgaaagacatcaaataattggcgccatcagtcaacgattgtttgagcagagaatggcaaaggaaagtgccgagcaaatgcaaatgggaggagtcgaaaaggcgaagagaggcaaaggaaaaggggagggaacggtggagccaaacgaagaggagggagccgagcagctgaaaaagggggacacaaattaacggggaaagaaaagtgccaaagatggatggataaatgccatcgcaaagcccagtcaaaaacaaaaagacaaggatgccgaattttaaagacactgtcccaaattcgaacacaaattccattcggattttgtgttttgacctttgcttttgctttacctgggcgacggggaaaacgaacaacggattcattccgaagagaacggcgaaaaaagcgatggccttttgactgagcaccaaaatggcattgtttttcgcatattccgctatgctaaacgataaattggtttataattacactttgagttatgaatttcgtcaataaaattacggactttcccattttcaattggcaaacgatggacggctcggcgaatgtttcggcgagcgcggacagagcgaacagtgcgacaatgagcgcatttgtggcccgactgatggccaattcggacggcggagaaacgacgaaaagggcccacgggacacagcagagggaaagggtggccaaggcgaacagcggactggactgacgagttttgggaattgaatgaaacgaatgtttgaaattgtgccaaaagacgaaaagaaaatatgtgccaaaatatttgggggatttttatgagaaatgccgataaattaagtataaattctcaaaaatatcatattttaaatgaatttttaaaataattagcaatgggtaaaagaaaccttagcgaagcgtaggacggcactttgtggagcggaaaatcggaactgagacagagccggcggatgggctcacgggaaagaaagcaaatggtggtgtaaagcaaagtcattctgaagaaatggggggagggaaattgcaaaaggtaaaagccgaaaaacaatccattttaaaagctagggatttccaaaaaagtaattagtattcgtaaaaacatacttcacattgaaaaagcccaaaagggaagggtcgacgaggcgtaaaagagcgaaattgaggagaaaagagacgagccgaatgaccaactgaaagagaaggaaaggcgaatcantttgggaggggggggggaaggggacctggtccagcgagcatatgccctgtanacactcgcngaattgtccatggaagcaatggaggaaaaattaataaaactgaaaatccaagccctaacaatgagcaaatcgaagtaattttcaaaaatgaaagtaatttagccgtcaaaataaaaaaatattgagtacaaacaaaacaaaagacattaaaaatcgtagaggataaaagagtttataatgagtcataaataagtctgagcaaaagtggaaacacaaatttaaatatggcactacaaaaatcgaaaggtaagaaccaaagagaatcactttgacttcttcggaataagcgcgatgaaatcggaatggaacgaacccaaataaatatgggaagcatcgtcaatggcctgaaatgacaagttttgtagttttttgattatatatattggtgaaatgttgacctgtgacacatctggcacatcggaaccggtcgggtcttggtaagtgcgcaagacgtgcccatccaaagccaactccataacgaatccgtacttcttggcgaccaattccatcaacgggaacagatactgctcggggacgacctggcaaaaagaaaaatgtaagggtttgtatggaaaataaagaaatccacggaaaaagacctgcagaatgaatcttcgaactgccggaagagggccaaggagatccatgaaggaggacagaaattggccagcgtaacgcacggaagccaaaccgacgaggaaagacgatttgtcatgggacaagcgaatgttgtcggggaagccgggcaaattgtcgatgaacacctcgtgctgacccttcttcggaccgtcaaaaaaatacctgaaacattatttaactgggggaaaggagcgggggaagaaaatgtcgaggtcagcaagagcgggcaggaccgtcccaagacacaattttaatcttacaattagcaattgaaccgaccgctgaatgcgtgccattgagcactcggagaccagcacagacactttgtccggatgaagttggactccgttggcaaagtgcagtccgtccaacaccacccgcgcatcgccactgcccatgtccaattgaataagactgaaaacttgcaaaaggattgataaatgatagcgagtcgtcgcatttaatattttctgaccgtccgttgggccgattttcgaggaatccctggagaaaatgcgcccgatcaaaagtggtggacgagtcagagaagaacagctttttcccgtcgctgaacacgtccaaatcgttgatgaacatcgctttgtgccctccgggcttggaattggaggagaaaatctgcttcacagtgtccccgttgtcaaagtcaatcgtgaacaagcccaaataagcgtcggcgaccacaatttgtcgggcattgaga

SEQ ID NO: 16602 - DNA, 3281 bp, Heterodera glycines
  unsure (1)..(3281): unsure at all n locations
ttcctaaaaaatgcaattaaaataaataaaaattttaatagccataataaattaataaaacgattaaaatcattgacccaaaataaaaaattatttttcgacgtttctctaatcgaacggttcaaaaagaaactacgtaaatagtttctcgacctttcgtgttccacaaacaaatatgggtaaaataatatgttaaataaggtaataaactttaaaaaaaattaagggacttaataaaaatatacacaaaaaataaataataccaaagaataatattaaatggaataaaaaaaattaattataattaaaacattttattggtgaacattgaagaaagtcaataacttattctatacgacgtgtataaatatatttgagtgttgaataaaaattcacaagtatatgaggataattaataaatcaattaatttaattaaaattggcaagaaatttcttaaagcttgtcataaatattgagttaaaaatagtaaacgaagtttagtttaatcagagaaaatatgatcacaataagctgcttttaagataaatgcgaataaatttcggtttgttaattaataagactctagaaaaaaaataagaagattgtatgcataaatgatttcaaataagtaaacgattattaaaaaaaaattaatacatataaaaaatttttatcgccattgaaataattttatgggaataacataaacgctaattgagaatttgttttagttaattgaccttaagaacaatagtcaaaaatgaaataaataaaaagtaagacgacttagtaaaatacaataataatgtacttgcacttatccaaaaaaaaaattggagatcatttaaaaaaagagtgagaccgttaatttattctttttaatctgatgatataatattgcaaaaaaaaccaatacatttttatgtaagaattgaaaaaaatgtttaagaattttcacataatttaattaattccgagaatattatgtatcgcttagaatgtaaaagtaaaaattcaatctgaatgaaatctaatataataaagatgagactataatatttgaaaataatgaatagtctattttacgtctcttaatatttcagatatttttgtaaataaaacaaatattgattaagctttaattttattcaaaaacaaaatttctacatagcatgcatattaccttttgtcttcgttttccacaaaaatgaattaatttattttaaattatatgagacaattctttttaaaccaaattatggaaacagttaaatggaaaggatttaaaatattaataaaattcaggaaaagtgaaacggaaatggtttaaaaattttttttgtattataatctcatggtttggctcagtattataactaatgcgttctgcaaccattttgcaacttttttctgcaataaaagtgtacaaaaatcaattcggaattatctttgcattttataaattatttattttcattttttatacgaaaatatcttttctatatgttttttattatttgaaaatatccaaattaattgaattaaatgcttgattatatttattagagattactttaaataaattataccaaacagttttatttatttaatttgcttaataatatttttaataaattaattatgttttgtttgtcacgattgttaactaaattatccttgccaagctataaagtcaattttcctccggtaatttactttttataatatttaattttacaattttaaacttttgaaatttatgatctaataagattgtgaagatttaaaaaaattagctatacatctatttaaatgttgtgttgacggaattttatcgtgtatggctcgttctcatttttgatgttttaatattacttgattttttcaatttcttttttcataaatatttataaaaatttttatttatagtcagttgattgattttattttttttaataaaatttttatgctgttaaatattgtcaatttatcggcttgaccagaagttgtttgtttttcatattttgcatcattataaatttaattatttataatatcaaatccttcaatattttacagattattcctttaattatgttgatgatttaaaagaaatttatactaataaattgtttaaaatttaatttataatattacaattttcatcattttattgttgtgtgataaggagtagcatttagttaccataaccaaaacgtgcagttcaattgtgagttaatcagaaagaatttattttaaatagagttgagcgggaccgggaccggacgggaattcccggttttttcagatcccggtcacggtttttggaaaaacagaaatcccggttccggttttgccagtcccggtcccggcgggactaaattaagcactggtaagaatgggggtctggttaagaaatgagaaggaaattggtggagaagatgatatgaaaataaaaaataaattaatttatttcatttatagcagttgttcaaattcaaatgaggtctagtggctaaaccttccgacctttagtctttgtcacttgggttcagttccccagcggaacaaaaacttttttcatattaaaagttggtcccggtctcgatctcaacttttctagtcccggtaagtcccggtttttgtaaaaattcccggtcccgctcaactataattttaaagcatgaaatggatctaaaatttttcaaaactagaacaccgggtcaaaaaatcagcttttgggtggtcaaaaccagaacattttatgaaattgcttcaaattacttatttttacctttatttgataaaaatttattaaaataaatttttcgcctacgattatcggatttaataattttggcaaggaaattagcaaatcttatatttaagtgctatcggtatcaaaaaatgatatttttatcaaaaaaattttgcggctgcatttttacaaaaaaaaatatattaacagattttgtcgagaattatctatgctttcaagccgaaaataaaggattttttatctggcggtgccgatagacgccgccgaagcttattatctttttaatttaggctaattctcaacggttttttgtacaaaatgaccaaattttgcgcaaaaacttcaaatttttaaaaaatgagaacaaatccgatccttgttttacaatattattttcagcaagaaaattanattgtcttctctttagcttattcgaaaatcaattatttatattttacttttgtattaatttatttaccaaanntatttacgtttttatat

SEQ ID NO: 16603 - DNA, 2301 bp, Heterodera glycines
attttctcactggtgttccccgaaactatgaaatgcgaccttagtttgttctgaaatttgttattttttgttatatttttataaaattttaaatattttttccgtttgacgcacatccgaccaaactgacaaattactgtagaagatattagccgcaagaaataaaaaaattaaaaagttaagaaatttgtccgaatgcgggttcggattcgaaacatggatgttttgcacaaatccgaccaatttcagtcctgaacagctactcacgcgaaaacggccccgaccgattcttagggggtctaagaatctctatttgtaataaattgtttgaaatttgccggaaattccctgagaaatttaatgatttttttaaatcgttaatgggatttggggaacaagctgtgctcctgcaaaacccacgccacaacacaaaattttttgcctatgtaatcgaatgaatgcatttttctttcgaaaattgtgtagttttcaggattttgacggggatttacgacatccattagcaattagcaccggcaaaattaaaaagtgtcgatttgctgctgttcctccctcttttctgcttcattctctcttcctcctctttctccccctccttcttccgtcgaatttttccttttcctctctttctcttccgtctctcctccttccccactgctattttcatccttttcctcctctttctccccctccttcttgcttcgaatttttccttttcctctctttctcttccgtctctcctccttccccactgctattttcatccctttcctcttctttctccccctccttcttgcttcgaatttttccttttcctctctttctcttccgtctgatggcattttcccagtttgacaggtccgggtcggggtgtagaaggagtgaggtggcgcttttggcattgtccagagctttgagtgcattgatgatccctttttgtattggcccagacattgcgtgcagtttggttgtgcgtgtgtgtgtgttgtggtgcacttgttgttttgtgtctttttccgggatcagtctggccttggtcctggaccttttgtgactaaacacctgcctcggaggacaaggtgtttgccttttgccttatggctaaactaaagcctcggaggactgttagtttgccttttgccttatggctaaactaaagcctcggaggactgttagtttgccttttttccttatttgtcaatggcctagtgcgcgaaaacaccctttttgcacgaagtacttcctcgaagggcaagtactttgtccactacacaacaccttccaaccctctgttcggacgaagtgcttcctcagagggtaaacactaagtccgctacgtccctcgtgaagttatgcctcggaggacaataactacacgaaactatgaacactagacaagcctcagagggtcttgtctaggctctctaatttgcttttcccttccccctttgtcaccgggatccgtcgatttcagtccgtggttcacagcaaatccacccaggagcgccaatttgtcccgacttgctctggggtcgggccaaatgaattccacggtgcggggttcaggggcaggcagggacgagacacagaattaataaaaaatttataccgggaaatgacctcaaacttgggtaattaaaccaaaaaatttgaaatggtgaacaaattatcacaaattgatcacaaaaatgccatcaccggggaattatcacaaatggaattgggcaccgggatgggacaggaaatggagggcaccggggccacagaacaaaaatcaataaccgggggtcaaagaatgatcacgaatgggggttatcacagttaaaggcaaatggaagggaggggagagaaacggcaaaaatgcctaatgaattttggttgtgaaattgggggacatttttggccgcttaaataacaataaagttaaataaaaagtggcaaatgtgagcagaacgaaaatgggccgaaaatttgggcacgaaatgaaaaacgggggacaaaatgaacagatgaacaaaatgggcggaaaacgggataatttgggggttcattgttctttggagtctcattcgccgaattggggacggtggcagaaaagttgcggttttgacaaattggtcattaatttgtgcgcggggcgggggaggaacacacaaaaacaattgacaatttgaaggaaagggggacagagggatggaacggcgaaaacatgtcgcgcggcgggcgggggattggtgaagggcctcctccctcttaattccgccgattattgatcggcga

SEQ ID NO: 16604 - DNA, 3558 bp, Heterodera glycines
  unsure (1)..(3558): unsure at all n locations
aatattataaaattttatttcacctttaatcggaacaganngccaagctcagnncnactggangaccttttaccatattaatttacaatttaaataattaactaaacgactgaaaatttgaataggatgacatgctaattgtaaaagtgggccaaattgtgcacattttggtccataatgaaggcacaccaattcgcacattgcatcagctttccatcagtgataaaatgaattatttaaaacaaattatttttaccaatttcatttttcagttttatattgtttcaaaaacaattttgccgatgattgggaagaaaaaaattatgttcctttccaacaattctacacaaggtattcaaaaaataataaaatattgttgtgtatttattaattaattcgtaaatccgctacaagaatttttcaatgaaaatttgtagaaaaatttctgaaaaacctggataaaatttgctaatttcatttatcgagatgaaacaatccgttaacaaatgttcatcattccgaattatattttaaattttttgcgctatttaagttgaccaaattttcatcgacggaacgcacgaactgaccaacaaaaatgcatttaacactatgataatgaatttaatcccctttttaccatttaatttatttatattgtttcaatattaatattgatttaaattttgcataaataaattttatccggccaattaactttttcaaattaattcaaatccatgaaatcctttaatccatcggcaataataagcaaagtgacagccgccatttttcaaccaaaaaagtcccggtcccgggtttgcccaaatttcccggtcccgctgcactctaattttcatgcttatttagtgcttaatgattattttttggtgctgaattatgtgcttaatgatcattttttggtgctgaaaaaaatccggtctctaatgatcagaccaaagattgagcaaaagactcgaaacattacaaaacaattaattctaaatataggtatggattttccttttccttttttgtcttcctttatccagttgccgatgtcacacatgaatatccgtccacaacattgccggcatgttggcgacctgccggcacaacccatttcccgttggaattgcactccagcgggagggaacccgaatcgtagttgccaaagtccgtgtcaccgtttgccaagatcacatgtatggaaacctgggaagacagaaaagtgcgttaattgattgtaagacatgacgatttcctaccgattttccaggaattcgaaacccaaagacccgactgatttttcccggccaaaatccgagcctgaaccctgatagtttttccaggccctaatttgtaagcgacttttccgacccgaaaacctaaattttctccagaccagagtctgacagctatccaaaccgctagtgatgcgcgagagtcccggtctcgactcgcgaaaagtctcgtgtttttttgggtctcgttttcgagtcttggagataaatatcgatctcggttctcggctaacttttcaagtctcgatcacctttcaaaccgccgactgcttccgtacccgagacttttttgtcgccgccctgcttcaacccctgtggcattcattacttaccacttggcctgcgtcacagttgggcgtcagcgttgcgcagccggccgcattcgtgccggcagtgttggttggcgttgttgtggcagttgcttgtaacaagccggacgcaaccgcttccggcacgctcagcagccgaagggcgctgggcgaacatgttgtgcatgccgcagtgccacctccaccggttgttgcagcagttgaagcagttgtaagcgttgggacatttgtggtggctgttgatggaagaaataatttaaaaaaaaaatttatccgtttcaacaaaatttttaatacatagaaattttcgagcagaaaatttttgttttgaatacagaaaacaatttattatttactgtatgactacggtattccctttttctgaatttttctttttctctacataaaattgatttatggtccagggaatcgagaaacttagaccccccaaaaaactcgaaatttctcaatgactaagacttttaaaaaatcttattcaattaaaaaatagaataaaataattattttaagaataaattttaagattttcctaacaattttttaaaattttattttttattcaatttatttattaattccctttaatttaaacaaaaaatgtggtaagtcatgttaatttggtttgagtcgagaaccgagactctggcaaatccctaatatcccttaaaatatttcaatccatctcaaaaagggggcatttatttagagaggggggcgggagggggggggggaatattttaggaaatacagtagcaaaaaatattttccattacagtagcccctaatcgattaaattaaaaaaaaactgtcgctgaacaccttctnggtgctgtggttccagcggcggccgtattatctgtcggatggcaactctgtaacatggtgggcatcagcagcaacagaatggcaatgctaatggataatgaagaagaatgcagcagcaccattttttataaactgtgtgtaagataattaaagaatggatgaattaatntaattaggtaattaattaagccaaaatgattttatttgccaacaaaaaagaaaaattcacggcgtgcgcgggcagcgtaatttttaagggaaaaatgctgttgaaactgttttcgattttccttattagcaccgcacgtccaagacctcccccnctcattcaattttgaaaaaaaaaattgctaaattttcccagaaatcataaaattactatttttaatgaaaatctgttaaaaaatggtaaaatgttttatttatttaattatttttgtaatttttgtaatttatcgtaaggcttagttatctatccatcaactgacttatcccaagctgactggtcctgacgcgccaaaaattacccctttttctaactgttttcgccgccgcattccataattatttttttttttcaattaatgaatggctaattagcgcgttgatttaatagtatatacatattaactgcgcatcacacacacacaacatatgcgtttgtgttaaacgctttttacttccgcgtgtgtggcgcggcgccggcggcggattatcgcaaaaattgcggcggcgacggcggcggttggcgaagcaaattaaaaaaaaaaacaaatatgggaaattgaacaggctttgtgctttttgtttttttgatcaccagtgttccttcattttgttatcatcaaattagcagcagcagcatcttgatcttgatgaccatgtgatcatcccagctcagaattaattgatcattagggttgtaaattatatggaataaaaaagcccaaaatactgactaaaaaagcccggaaatgtccgaatatggactaaaaacattgtttcataattaagaatgcgatttttaggtttttaatattattttttttttactcaagcgccaaatggagcaattttgg

SEQ ID NO: 16605 - DNA, 1463 bp, Heterodera glycines
  unsure (1)..(1463): unsure at all n locations
acgatagatanaaagaatgnccaaaaacgccctgtgaaaattggacaaattgttggcatccgaagaaaaaagtgttatcggcggaggacattcttccgagacggaggacgtcaccaccactattacaagcattacggtaatgaatcaagcttttgtgtcagtgatacggtttaaaattaaattagtgggcttgagattctcagtctaggatcagaaaaatttcttggattttccggggtttcgactcggacttggttttgttagcaagtcaaagattctaagtctctagcatcgccaaataaaagatcagcaattccatggtaaaaagaagtgagaattgagggaataaataaaaaatttatcaagcaaaaattaatttatctgatttttaaattaattcaaaattttcaaatggattaaatctgacaaaaaatcttaaatagtctctatcttctttttaatatcgcttttctcactttttaaatccaatttttcagcctgaatgcaaaagtgggtagtcaatttctgaaaaccggacctggttctaaaaataaacttaagcaaaaacttcttcatttaccacattataatccattttgataattagcagacgcaacgacctaagctgacggcaaagtccaagatcagtggcagcacttcgcaacagcttatgcccccctcatcaactgccaaaagtcaatgtgcttcatctccaaaaaacagcctaaaatatttatcagcagcacatggcacacaacgagcagtgcctggtgctgttccatcagtgactcatactgataagccacggcatccatcaaagaggcaatgatcagaaaatattttaattaaactatcgattttttgggaagtttgccttttgtcttgaattttggtcaaaattttgagcattaaattctctcataccatattcacaattccacaaaaaataaagaaggtaaaacccagcgataaatatgaagaagaaacattttatttaatttcaaaagtcttgaaaaattgtctttttggatttgtgccttattttgccctttttaatttcgttcttttttttaaaatacgaatttttattaagcaatttccaaatgttcaattttaatcttgctcaaccttgaagcacaaagaagaagcagcactcattgcctgctgctgtgcctcatcaatcataccgtcaaagtcactcgaattcggacactgacaatggggaagaaattgggggcggaacgggcgcgacaaaaccgttacgacataaggccgattcggcgcataatttgtcgcaatcgccgccagcggacccaatcagagcacggccacctgctgctgctgctgttggttctgctgnggaccagcaacaggggtgcgtttgttgagcataatttaagcgttgctaattagtgagtcatttcgtaaataaccgccgaggggtaaccaatgaaaaataaaag

SEQ ID NO: 16606 - DNA, 2055 bp, Heterodera glycines
ttttattttcattttacccccttggacaattctgaaacggccatgatggtggcggaatttacaaacggcattgagttaatgtgccaaaaaacctttcgcatatatgggtggctcggtggttttatcgttcgaaagttcttgatgaggagaagcttattctgagcattttaatgttgaaactataaattcataggcgccgtttcaaagccggacccacagacaacttacaatttgcaatgttcaggaattaattaaaaacacaatgaattttgtccagtacctttggctaatatccagggcccagcttaatccaaatccaaattgtctccgatttgtttaaatttgataggcagttgcttcttgccccgatggacaaccaaatgttcgacgcggataataaaaaagagttcgagataaacaacaacggcatggaaaacgagtcacaacggtggttatgtgctaatttgaactacgcgtccgtgggcactgcgcttctgaagggcacgccaaacagagacagtgccttattagtgcaggcacttcgccaggtgtgggggagaactgttcgagagtacagtctcggctcatctgttgaggaatttcggatcttatttgatattgtgtgcgactagctttttttgattaattataaaaaacaaatgcatttttatagcaaataacgaaggcaggctcaatgaccgctggagaggccaaccttagcaaaatgatctcaaatgatattttcatgttgcgcaataaaaaacaggtcgatggttttgaagaattttcatttggggcgagggaaaaagcacgaaaaatacgttttcaactttatttgtatgaggaagagctgattaattatggtgaatttgggattttcatgcttaatgctgaaaatgagcatttatttgtgtatgtttatttggacatttttgaaaactttcaaaacaaaattgcaataaaaattttttaaagttttgtttaattatttgtgtgcttaaaatccggactctaaataattattgaaaataattaggtcactacaaattaatcattaaaaaaactttattttttgaaatcattttatttgaaattttattacgctgaaagttttcttatgaaaaaaatttaaatattattttcaaaagctatgatttttctagcggaaaaacacgcaatattccatggaaattttcataatattaattttttaatgtatttaatttattcagtccgttctgtccttgtttttggttccctcccaacaatcctcgtccaatttcacttccgttgattctcgtcgtcccaatttgcttccttccttttcctccacctctctcatcagtggcacatcctccacttgtgctggtgttggccttccaccatcaataccctcatttgtggatctgcttaaggcaagaaaagggagcaaatttaatgagtccaaattagtggcaattgttattaattaatggcaaacttacaaattattgcaaaacggctggggtcgtttcggcgaggattgtttcgaagccaagcgacataagcccacaaaaaattttatatttggtatcaatttaaaaagctggacaactcttttagcctggaaaattcaaaaaatttcgtttgggtataaaaaaatatggcaaaaagtgcgaaaatttgattaaatcgtctagttttttcgtacactctcataatttttatacccaaataagttttttttaattttcagctaaatagccggtggcaaaatgaattactgtgaatacatatatattaatgagatgaaaagatatcttatttataagaatttttggctttaatgatatatctaatgaattattattagtttttaactgttattaaaactaaaatacgaagaaattctttttcttcacttaaaaataatcaaattttttgaattttttcttagaaaaattttcgctagccccccccccccactgagttcctgctgaaaatcgaagtcccggtttcccctgaagatttgtcatttttcttgccctgctcaaggacagctcggtcggttgctga

SEQ ID NO: 16607 - DNA, 2882 bp, Heterodera glycines
caccgagaaggacgccgatttttgtgcccatttggtcaaaaatttcgagtccgccggccttccagtcagtgccgagctgctgcacgtggcgctcaaatgcgcctggtacaagacggaacgtgaacagcagctgcaaggccaaccaattgcgggcggtgccgtcggctttggcagcggggcgcgacaacggacggggcttggctatacggcggcgccaacaatgatgatgggccaaggtgctggcaccgtcgccccgggaataacgaccatggcaaaagcgtccgtgacaaaccctcttggccagtcgtcggggccgtcctcccaacaggcgaccattacgaagcaaatcgatcgcgccaagtcgttggtggccaccggcaatgtgaagggcatggaccgggtgtcgatgatgcggtcggcgttgaaggtctgtgacataggacgttcacgcggtgcacctcaaaacgttgccggacgatttttcattgcgacattaagaaaaaaaacatgatgagggagcagcatttttcgagtatattcaagaatattttttgtctttaacccagaaattagctatcaaaaatttgtgcccttttggtttgggtgtttcatttttccttccctttccagagcaccttcaaacactccttccaagcggccactgttactgggtcggactattcgttaccaggcaatctcaacagggcacttttgtggtgaaacttttttccccctcatttttagcatctgacccgaggccagaatggaaaatcaaattggacgaacaggcggaaaagattaaccaatgcatcaacagacaaaagcagcaaggggaagaaggcgacggagagggaaaagtgccaccaaattcggagccgacaaaagcggacgatggacagcagccaaagcggcgatcgagatggacatgaccacacggcattgatccatgacaaataaacattttttcaatgaaaatccttatttttaatggtttatgccatgtttctgttttttttgcgacttgcgctcctacaaacttcgttttgagatgatttcctcggtcacttttcgtttttccaatgccatctcctcccccgtcacttttccgccgttggcattttgcccctttgtcaaccattttcgacatatttcaaaacttcccaacgatggaatgacattgcatgactttttgccgcagaacacaaaagcgattgatttcactgataatggacaaaaaactgagacggtgcagcgacggacggcggacggacgccttcggttgccggaatggctgaagagggacgtggtggccaagcagagcgatgtgagtgagaaaatcagacaatttggagcggcttctttggcatttggaaatgtttgtgatcccatggataaaacttgaccgtgatttttagatttttggatggaattaaacaaccatccatttttatcaacaggtgaatttgatcagaatgaagaagcagctgaggggactgaagttggccaccgtttgtgaggtacaagtaatttggcaaattaccatataaatcaaatgttaattgctttttcaggaagcacggtgccctaacattgggtaattaagagtaacaataaaaaaatgattccgtttctctcatttttattgtagcgaatgtttgggcggtgggcccggcaggccgtcaaccgcggccattatgctaatgggcgacacgtgcaccagaggatgccggtaaatcaatttaatgccagatttggcgttgtttccattctgaattcgttctggaggtttcacttgccatctctagcattattttaggtcagtctttccaatactaatcagtccggtccgtcctcactttttaactgtcatagggtcagatcagtaaatggtttaattggctgacaaaatccctgggtaaatcacacccaaatcggctgatcagacggaggaaattattgattcaatgggcaattcttaattctatcactaaggatgaatccggtctaagtttgctcttacaggttctgctcggtgaaaacggcccgccgacctccgccgccggacccggaagaaccgctgaacacggcgaaggccgtcgcgagttggggcgtcgattacattgtgctgacctccgttgaccggtgggcaaccgaaaattcgacgcattggaattctcgaatttgtttattaagcgacgatttgtcggacggcggcgcggcacacatttcggccaccgtccgccgtctgaaggagcagtgcccccatgtcctcgtcgaatgccttgtgcccgactttgcgggcgtgttgcccagtgtggagcaagtggcccagtcggggctggacgtgttcgcccacaatttggagacgggtgactgactgttgtggcatggtgttatttataaattgtgcccttttcagtccgtcggctgactccgctggtgcgcgacccccgtgccaaatacgaccaatctctgcgggttttggcacacgcgaaaaaggcaaatcaatcaatgattatgcctaaatcggtgccaaattgcaggcgaatcccggcgtgttgaccaaaagttcgctgatgcttggccttggcgaggcggacgcggaggtggaggaggcgatgcgcgaccttcgcctggtcggcgtcgaggccctcacactgggccagtacatgcagcccaccaaacggcacttggccgtctccgagtgggtgagcccggccaaattcgaccgctggcgcgagttgggcgaccgtctcggattcgtgtactgtttttgtgacaaatatccaatttgctcattttgtactcattattttcctttgttttttcagtttcactgtttccggccctttggttcgcacttcgtacagagcgggcgaatt

SEQ ID NO: 16608 - DNA, 1457 bp, Heterodera glycines
  unsure (1)..(1457): unsure at all n locations
gcgggttttggcacacgcgaaaaaggcaaatcaatcaatgattatgcctaaatcggtgccaaattgcaggcgaatccccggcgtgttgaccaaaagttcgctgatgcttggccttggcgaggcggacgcggaggtggaggaggcgatgcgcgaccttcgcctggtcggcgtcgaggccctcacactgggccagtacatgcagcccaccaaacggcacttggccgtctccgagtgggtgagcccggccaaattcgaccgctggcgcgagttgggcgaccgtctcggattcgtgtactgtttttgtgacaaatatccaatttgctcattttgtactcattattttccttttcagttacaccgcgtccggcccattggttcgttcctcgtacagagcgggcgaatttttcttgaaaaatgtgatcgaaacgcgaagaataaaagagaacggaggtggaataggatgagcaaattgacgaataaaaacataaatgaaaatattaaaattattttcaaaacaataaaaattagaagagaatcacaatcaattaatgcgttatgtttttcaaagaattcgtttgctaaagtaactaaaacattttattcatttgcattgtttttatgttcttttttgttcccaacttttgaattaatgcccattgaagtcgaagtttctttgagccgaaaggctgccgtttttctcaccggggagagtttcactgttcaggtgaattctgaaaatattatccagtcccttgtttgggatttgtgtgatacagctgaaatctcatttttgtagcctatcgtattggggggataggttgagcccctctcttattggtgttcccttaacatgaatttgatcacataatcagccggggcaccccaatggaaaaattggtattttttgctgaaaactcgattttccttgttgatattccttccaagctctacatcactaaaatttccaaaaaaatatgcgatatttttccgaaaatccacaaaaataccaattttggttaaatgaccgagggaaaatctaaaattttcctataaaatactgccagcatataaaatatgcccccataatactcaaaatcattgtcagatcacattggccaacagcagcgacgacggcgaacggtcgttggcctggggctgtgtgcagttgcattgtgaggagaatgccgtgggcggcgctggtacggcacgacaccaaaaagtgcggcacaacgcgtcgacggcggtcacccgcgcgcggcaggccatcttctcctccgcacccgccattctcttctgcgacattcgcattgngcccggcgcggtggaacagttcgagacgcgcaaggaaatcccggncgatttgccgccaacatttaaagtgatcagcagagaaagactcatcgaataaatggggtggcatttgccagaaatgtcagaccgaagcattgatttgccta

SEQ ID NO: 16609 - DNA, 2457 bp, Heterodera glycines
tcacttccttttttcgatttccctatgttttgtaaatttatttctgcttcgttacagttgtccttttaataaatgttcattactctttgccccccccctttttctcattttctatccttccatcgatgaaaatgccgcaaaaggtaatccctcctcccaaatgcctttgcgatgagctaattccgaaaaatctcggaaggatcatgttgtgagtccaccatttctgacagtgattccgacactaaacaaacataaaactgttctgttgttaactcattcatccgatccgacgatggacgaaagctttacataaattggaataaaaaatgaaaagtgatcgaatcgcttcgctttattcattttattcactcataaaaatcagcgttttcttccaacgaaattgaaggcgtttgagtaatggtaataagggttgtggccatagccctccctcggataggcgacattataccactgaaagaaagaaacgatcatttgcatttaattaacatgacatagccagcagacctaattaatggaatgtgttaataacaaaaaaaagcaaatgaaacaaaagcccatttttaaattcattgaataaaattagacaattaattttgattatattgcaaaaaaagatatatttccaaatttaccataagaaaactatttcgattaacggcaaaagttttgcgagaaatttcagaatcaactttttgtttgaaagaatctaaatttgcgcgattgtttcagttccgggttttcccactaattttggaaaatttctgccgaattacactatttttatttccgacgtttctttgctaaaattcaaattttgccttaaaaaatgaaaaattgtaaataaaatactttttaaatccttttaaggcccttttaatcagcagaaaaaagtcattttaattaaattccgggccctattaatcacaaagagagaatcaattatggtatcatacaatactttaaacacttcttgaaataagctgagtttgaaaaaattatttattaaatttaaatttaataaaattattttagcgaatgaaataatctttttaaaaatttacaaaatttccctccttaactaatgtctggacaatccatcatttaattttattttttaggacaaaaaccaaaaagttgcaaaaaatggtttggtttaaaaaagcatgcttttacgatatttctagttatttaattattttaaataaatgtcatttaaaaattttttaaatttttctaaaaatgattttttttataatttaaaaaaatcaagataaattgttttttatataaatcttgataaaatttggcttaatggattatctatccattgctgaaggaccgcccggaaccaataactgaccccatttgctgattggcgaagaactaaatttaaaatgaacagcaccaataggaaaagtatcgaaagttgtttaatgtacaataataaatgccaaggaaccattgccaatgcaaattaagtatttataggaggcggagaatcagcaaattggcgcaattggcctattgcaaaaggcaccacatttctttgacagaaaaagacgtccgactggtccaagcgatcagagggaagcgaatgaaccgaacgaatgttaggtggcccattggttggccaatggaagggtcttttcctaagtgtgcaaatgtttgtcccacccccctaattatctaattaaacaatgcgttgctcacaatgtctccgttgttgcccgttcattcatttaatcacttttttttaccttttcccatatttagagacgatcagtaacagggatcttaggaaaaaacgggaccggaacatgagaagccgggacagggaccggattttcaaccgggacagcgatttaggagaaaccgggaatttttccatgaaaaaaaaatattttttaagtgaaaatattgtaaaatatctggcaaattcggtgtcattcaaaaactcttgatgtgttaagtctaaaaattcgaatacttaattattagggccgggatttctagtgaaaaaacttttttttttgcttaattgttttgaagaaaggagctcaaaaaacgcatttctgcgttaaaatttttcgattctggtgtcactatcggtcactagaaatcactattttggcgacttcgatagttttttctaccttttcggtactcattgggtttgggtccgcttttttggtcgaaatttttcaaagtgtagccagacaggcagacagtgcactatttccttcttttcttcagcatagccactggtgagaaggaagaaatagtgcactgtctgactgtctgtctacgtggggctgcggcgggtggaagggtagacagtaggcagccgtgtgctcgctgtgcagcagcacactgtgtgggaaagggaaggaatgagaaaaagaagagaaagaaatagttgcactggtctgactgtct

SEQ ID NO: 16610 - DNA, 2096 bp, Heterodera glycines
acgaatactggttttaccaaactaaaagtgcaatgctgctatccgattcggtttttaccgattaattgcaaattttctaaaaatggcctcgaattttaaaaaaattatctcgttaatgggtaaatcgtgccagagtcgaacagagctatgccgatccttttaaatgaatattgtattaccaaactataagagcaatgcagaaattcgattcaatttttaccgagttattttaaaattaaaattaattatttttttgttatttaatttgtgtaaatctttaagatgtaaccaatttaacccaattctttaatccatatttgttttgaacattataatggtaaatttttaagctaaaattaaaaatggctaagaattaaaaaaaaattatttcgtttattaaacggtaatgtgccagagtcgtaccaagcaatgccgacccttttaaatgaatactgtattaccaaattaaaagaccaatgcagctatctaatttggtttttaccgattaattgcgaattttcaagttaaaatttttttacatttaacttatgtaaatttttcaaatgtaaccaatcctaaccgaattctttagtcaatatcttttttgggtacattgttaagctaaaattaaaaaatgcatataaatttaaaaaataatctggtttattaaagggtgaaccgtgccagagtcgaacagagctatgccgacccttttaaacgaatactgttttaccaaactaaaagtgcaatgctgctatccgattcggtttttaccgattaattgcaaattttctaaaaatggcctcgaattttaaaaaaattatctcgttaatgggtaaatcgtgccagagtcgaacagagctatgccgatccttttaaatgaatattgtattaccaaactataagagcaatgcagaaattcgattcaatttttaccgagttattttaaaattaaaattaattatttttttgttatttaatttgtgtaaatctttaagatgtaaccaatttaacccaattctttaatccatatttgttttgaacattataatggtaaatttttaagctaaaattaaaaatggctaagaattaaaaaaaaattatttcgtttattaaacggtaaatgtgccagagtcgtaccaagcaatgccgacccttttaaatgaatactgtattaccaaattaaaagaccaatgcagctatctaatttggtttttaccgattaattgcgaattttcaagttaaaattttttttacatttaacttatgtaaatttttcaaatgtaaccaatcctaaccgaattctttagtcaatatcttttttgggtacattgttaagctaaaattaaaaaatgcatataaattaaaaaaataatctggtttattaaagggtgaaccgtgccagagtcgaacagctatgccgacccttttaaacgaatactgttttaccaaactaaaagtgcaatgctgctatccgattcggtttttaccgattaattgcaaattttctaaaaatggcctcgaatttaaaaaaaattatctcgttaatgggtaaatcgtgccagagtcgaacagagctatgccgatccttttaaatgaatattgtattaccaaactataagagcaatgcagaaattcgattcaatttttaccgagttattttaaaattaaaattaattatttttttgttatttaatttgtgtaaatctttaagatgtaaccaatttaacccaattctttaatccatatttgttttgacattataatggtaaatttttaagctaaaattaaaaatggcttagaattaaaaaaaaattatttcgtttattaaacggtaaatgtgccagagtcgtaccaagcaatgccgacccttttaaatgaatactgtattaccaaattaaaagaccaatgcagctatctaatttggtttttaccgattaattgcgaattttcaagttaaaatttttttacatttaacttatgtaaattttttcaatgtaaccaatcctaaccgaattctttagtcaatatctttttttgggtacattgttaagcctaaattaaaaaatgcatataaattaaaaaaaataatctgg

SEQ ID NO: 16611 - DNA, 1799 bp, Heterodera glycines
aagtctcccccccagatgaattacaattattgaaaccatttatttgttcattttattaaacttataatatttagtatttgtacatataattgatgaaaatttacgggtttttacccaaattaacacatgaaaatttaaatgtttaccaatccggaatccagttccggatccggcaatatgaaaatccggattgaccggattatgagagaccggatccgggatccggtcattttttaaaataccagtccggtccggagaatttggaaatctcggtctctaatttttgcccacccccacccttaaattttgattttttttttgctattttttatcctaaaatctgaccaaaattttctcgtttttttttatcggggatttaattccgttagtttattgataaatatttaaattgccaaatgcaaattcgtcctccctttttcggttcttcgtgttggcgcgtacggcggccgacccggcgacgccggccaaagacgcgttcaccggtttcatcgtggaaagggacacgccggggctaaccgtgggagtaaaggtgaacagcaaaaccatttttagagatatccattaggtattttggctggaaattcggttaagggggcttcaggtccgtccgtgttcagaaaaatatttttggaggggcattcctaagatttttttcagtttaatgttatatccacttttattttttggaactcaatgccagggaagaaaaaagcaactatttgtaccgcttttcgttagccaaaatatcgaaatttttgcaattttgaggtcaaattttcaaaaatagggtaaaatggatggctggcggtgccgacgaggggcgccctcggagaaaattttgaaaattcaatgaaatttgttaaggaaactgataaaattttatctaaaaaaaggtttcctatattctctttaataaatttcacttaataaaatgccaatttgcccccccccccctcttccaaagatgccattttttgattttttaaatagtttttcgttattttgcccccccccccatttccgtcctctttttccaatttcgtatccctcactttttcccgaaggaacggaacatgggccaacggtgctgcgacaaccgaatgcttttcctgcaaaatgtcaaagtgccggcggcgaatgcggtgggccgcgtgggcggcggctttcgcctcacaatgcgcgcctttgaccgcactcggcccgtcgttggtgagcacaaaaaaggggcgcaaggcacggaaacgcatttttttcagtcgtgaaaaatattgaaaatttagtttaaatttgtttacacttttccatccaacaaaacaattcttcggggcggttttttgggctaataaaaaatacgacatggatatattcgccctgccggagagttccaatttatgtgattttttagtaaaattagaataaaaatgcattgattgtccgccggcagtgcagaaagaaccgtctggaaaaattaaattttttgtggaaattggttcatttcaaaaaataattcagacaaatctgaaaattcaaaactttttgtcaataataatttgagaaattgctacacacacttgggacgggccaggacgttttcgcgtgggggacccacgcgtttcggcgctcgcgtttcggcgctcgcgtttcggcgccagcatgtttttagctataacttttttctttgtaaaccaaatccagtattgttggtgtcgttcgaaagcttaatctatttagaagctttttctaagctattgctttgcgattagacaattatcaaaact

SEQ ID NO: 16612 - DNA, 2259 bp, Heterodera glycines
tgggaaaattcgttaaaaattcttaaaattcaaaaacccaaaaaccgttttttaggcctagctcgaaaaattttgaaaattttcgaaatttttaaatttcagaaaatcgagcttccaaaactctacaataagtctgctggcaccccctcgctcagttcaaaccctggcgagttattcgcctggtactgaagtgtactttttgagcacgcttcagttgccattttctgcaggccagggggtggctctattaaaaaaataaaaaataccagcatgtagaggacactttggcggggtgccctcgcagcgggcattttttgatcagagttttagaaaaaaagttacgggccttcaaacgcaagcaaaagtgagaaattagccgccgggactcagttggccaccggagcggaaaacctatagttttatagtgattagaagaggtacaacagtgatcagaagaggtacaactgtgattaaaaaaggtacaaaagtgattcgaagaggtacaaccacgggggaagaggtacaaccacgggggaagaggtacaacaacgggggaagaggtacaacaacggggaagaggtacaacaacgggggaagaggtacaacattattgaaacaggacaacattattcaaaattaaataaaataaggaaatgtatttattaaaaaataaggttaaaaatcgaatgctggatagttacaaccacgggaggtacaaagtgattagaagaggtacaaccgtgattagaagaggcacaacagtgatcagaagatgtacaatagtgattagaaaaagcacaaaaattgtgaaatggtacaacaatggttaaaagggtaaaataatgattttaaaattaaacaaataattaaatggtttatgaaaaatagaattaaaaaatgtattaataatttttaaaaaattattaaaaaatgctttcttttattaattaaaaataaactttgaatttacaatgattgagtattattgtattgaaaataatttttttgacaatttctaattaaaaaaacattaaattctttaatttaaaaaaattattatttttaaataaaattttcaccaaaaaataatttaattcaaatgaaaattttttatttattattaataaaataaaaatattttaaatgaataaaaattgaaaataacagtaaaataaatagaaaaataaagtacaccgcccggattcgaacttcccccccccccctcccccctcaaatgatgcctcagaatccccaatcacacagggattctgaggtcttatcgatgttaaaagtaaaatctgatcacgtattcgtgatcagcgtcataaaatagccctaatgacatgtttttggaagatttttgtcgaaaaaatttttccactcaaaaatcctatgctcacccctttggtcccgaatctcaaaatcacttttatttttataaaaattcttaaaaaagtgataaaaatgccaaataaaatttatataatagagaaaaaaattgcggattttttcattatttaaaatttcaaaaacacctttacagaaccgagttctgaatttttttctggaaaatcgaaaatttccagaatttctggaataactttttttcttttgaatattataaaaccaattaaatctcataaaattctccttatttttctctatttttaaggctttattatagttaaatcgatgaaaccatcaccgagttataaattttcaaatattaacccaaatttccaagggctaaaaaattaccaaaaaataaagaatttttaaaaaattccaaaaatactgtaacttaaaacaaacatcatattcgtgctcagcaccccaaaatacccaagaaaaaaattttacacccaaatttaggaccccaaaaaaattttcgaaaatttctagggggcctagctcgaaaatttttgaaattttccagtcatgaagcacaccattcgatagcatttaaaattctctacaaaaatgttctaagacaatttttggctaaaaccaacccctgacgagttatgggcccgggactcaaatgtcccgctgaggccaaaaattttttctatttccgggaaaaaatcgaaaattttccgaaaaaaataccagtcgatagagctcgaaaaactatgttttggaagtggtcttcgtttttctgcgaaaaattcgttaaaaattcttaaaattcaaaaacccaaaaaccgttttttaggcctagctcgaaaaattttgaaaatttttcaaaatttttaaatt

SEQ ID NO: 16613 - DNA, 1537 bp, Heterodera glycines
gattttgggtggaaaaatttttgcactcaaaaatcctggtcacccccctttggtcccgaatcccaaaatcacttttatttttataacttttttttaaaaagggataaaaatgtaaaataaaatttatataatagagcaaaaaattgcggattttttcagtatttaaaatttcaaaaacacctttacagaaccgagttctgaatttttttctgaaaaatcgaaaatttccagaatttctggaataactttttttgtttttgtggtataaatttcaaataaaactcataaaattctcccgattttttgctatttataaagctttaattcaccaaaatagacctgatctgaactgagttatgaattttcaaatattcacccaaaatcccatgggccaaaaatttcccaaaaaataaagaatttttaaaaaattccaaaaattatgaaacgaaaaatgaacttcatattcgtgctcagcacatcaaaataccccagaaaaatatttttcacccccattttcaacccaaaaaaaaattctgaaaatttctaggaggcctagctcgaaaatttttgaaattttccgggcatatagcacaccgttcgatagagcttaaaattctttacaaaaatgttctaagacgatttttggctaaacccaacccctgacgagttatgggcccgggactcaaatgtcccgctgaggccaaaaattttttctatttccgggaaaaaatcgaaatttttccgaaaaaaataccagtcgatagagctcgaaaaactatgttttggaagtggtcttcgtttttctgggaaaattcgttaaaaattcttaaaattcaaaaacccaaaaaccgttttttaggcctagctcgaaaaattttgaaaattttcgaaatttttaaatttcagaaaatcgagcttccaaaactctacaataagtctgctggcaccccctcgctcagttcaaaccctggcgagttattcgcctggtactgaagtgtactttttgagcacgcttcagttgccattttctgcaggccagggggtggctctattaaaaaaataaaaaataccagcatgtagaggacactttggcggggtgccctcgcagcgggcattttttgatcagagttttagaaaaaaagttacgggccttcaaacgcaagcaaaagtgagaaattagccgccgggactcagttggccaccggagcggaaaacctatagttttcccagatgcgcctcaaaaagttgtaagacccttccaccactttcagacccctcccgacagccgttcgactcaaattagtttttaagacgaaaccccctttttctctatgtatatataactagcgtgttgtggcgcagtaattgctcggtgtaggcagttggctttgcacagtaattgctcggtgcagacagtatgctttgcacagtaattgctcggtgtagacagtatacttttggtatatatgggcgggcgctgacatgagacgcggcttcgccgcgtcgcgcaaaggacttcgttgctagtgcatgcgcg

SEQ ID NO: 16614 - DNA, 2787 bp, Heterodera glycines
  unsure (1)..(2787): unsure at all n locations
gacacaaaatttaagtaactattttattttttcttcataatcttcacattataaaaaagtatatcttctatatatctcttgacttaaattgattaaatatttataatttcaaatttctcggttactaaatgtttcaagatagccctgaaaaatgccgttttctcggtaggttgttcaatgagtgccgtgttaacaaatatattcgcagtttcattttgcaaagcatgtttgggttcaaacttcactcataaaaacaattaaatatgtgtatatttttaattaaattaaaattttttaaaattttcatggtttttgtttttcaaatttataaattctatattttgtgagaaaaagccttggtcttttttgaattctaaacacataagcatttgtcattttttgcttcgcctattttgctgcactttcattcttcagttattttgcataattattattattattatttatttttaaattttgccgtgtaaaaaaaatcaaaaaatttttcaaaatttattttatttttttcagatgcgtcttattgttgacgatttttttgaccaacaagtgcgacagttttccaccgaactacgtcttggcaatgcgtttctgttccttggtggtgccccgtcggggttagcctcccaactcgtccccgacaatttgtaccccttccggggttgcataaaaaaggtgtgttttgggtttatctttaattatccataaaataattacaataatatatatatatatatatatgtgtgtgtgtgaactaatatgaatataaaatatatcatgaaaatttagccaaaatttcccattttgcaaaatctgttaaccaatttaaaaaattttcacagaggcgcttctcggcactgcatatttttttttttaaatttatgtttaaataaaaactcaaaaattccccttttttggactaaatcaacaacaaatccatccaaataaagaaaatatgaagatatttgggtaataaaatggtgaaaagatgccggggtggagaacattttccgttgatggggaaacgaataatgagaaatcattaatgcccatatagattaattgattgagtgacacatcaccagcagttgacgaatagacaaattaggaggaggcaacaaaaacaattatcagagaacaaacggaccaaatacaactcgtagtgttttaaaaatcgttttaacttttgtcaaagtaaactaaattaaacatttttggcgctacttgcaaagtttgaaattttttttcacttttttttggtcaattttttttttgtttatttttaatgcaggatttgcttttttaacatgaaacgtatttcatactatttaataaactgaaaaaaacattttaaaagaaaatttagcgctagttaaaaattgacaaattttgagttttatcaaaaaccaaaggggggaccctattgttttgcaaaatttttttgagataaaaaatcgtgaatatattttttattcgccataattatgctgttaatacttaatattcatcattatgtgccaaaaaaacaaaaaaaaaatgaccaaaaaaaagttaaaaaaaatttcaaaagggtactctttgcanagtagcgccacattttttggtctcaaacgatattagcaggattttggacacggatcctgggaaaatcctaatcaggattttgtcccattcgagctctagtagctaaatgtcaaaatcgtttaaacagattgctttccgtctattttaattattttacacatataccatatattccaattatttgtatgaaaaaatttttaaatttataaaagtctacagtaaaaaattcttttaaattttaggcctttttccaatcgggtcctgttaagctcaaccttattgcattggctgaccaaggctatggccaatcgcatggtaatctaatacattttattcagtttttaatttatttttctcaaactattagaatttaatttacataacttaaaaaaatttgttcccaaattttcttaaaaaaaaaaaaaaaattaaattttcagttcaaacatttggcgatttatcctattcatgttccccaaatgctcaagtgcctgaagtgtttgccttcaacagtggcaaaaattttagcaaattgccagcctggaaatcgccctccaggggtaccctaggtaaggtgaattgttttttcgaaatttcaaaaaataaaataaatttgtttgccgtttttttcagcgtttcaatttcgcacacttttgccggagggacttcttttgtaccatggccaaacaaattgtccaaacttcaccatctgtgattacttggcttttgaactcattgatggacacctaatggttgtgaaatttttcaaaaaattaattaatccatttttaatttttcgatggtaattaacctcggatcagggcacatccgattgcaggtgataaaatttgttattttaaattattattataataattattattgggttttttcataagccgttcacataatcgagcatttgaggcaaatttcccccgattttttggatttgaagggctaatttataaattcataaaatgaagaattgatggatttgaggtgcagttttttttttttttttgcctttctttgactcaaattggcaatagtaaattttatcgaaaatgtttaaaccaacttttatatggcttcaaaatagtaaatttcaaacccctccgattgatacccacctttataaaaattagatttttcatgaaaaccccaatttttttttgttgtatattt

SEQ ID NO: 16615 - DNA, 2495 bp, Heterodera glycines
  unsure (1)..(2495): unsure at all n locations
agcttgcatgccgtgctaggtctgtaataattattcattatgtaagaacttgaaataaaaccttagagaataatcattgatttaanaatttgttttagatacttttattgaatataataatttacaggantttttactcagaactttacactttttcattgtgtattcaatttctacaaatactttaaaaaaataacaataatgcattatataggcaaatttaggataaaataaacgaataaaacaacaattttgagattttaatatctaaatataatgaacaccaaaataaaaaaatgattcaaataataatccgtaaaaattggacaaatatcttcatatcgattaataattagtaaatacttcaaaaataaattaatgtattcacatttaattaataaaatagcaaacaataaaagaaattaaggttatttgatttgtataataatgattcaataaagagaatatttaaaataaatggttcgagataaataatttaaaatactaaaaataaaaataatttattaacaaaaaacctaaactaatacgcaattattatttctgcaatgcatgagatacaattaaatacaaaaaaaaaattgcgtaagtcattctttatttcaaatcactttttttttacaatttattcgatcaaaaatctatccatttttatatttttagcctcccattattatttttaacaattttggggaggaaatcacgcaaaattgataatttcagtacattcgggaccaaaagatcaaaaaattttgcgtcagaccttaaaatttcttgataaaatagtgacatatgccataaaatagtttaaaaattaaaatttaaaacttggcaagtaatggctttaagactgctgaatgttttaattttttcttatttgcataatatatatatgtttctttaataattctaaatattaatatacaaataaaaaaagattatatcttactcttcgataataagtcattaaagttatatttaattcatatctgctctaggtattgccagataaatatagaatattttttccttttccaagtattttattttgcttaaaattattttcaataaataaaattttcaaattcctaaactttcattttaatatttttgttaaacattgcccattcgtatagttgtagttctgaagttgttcaatttttgcataataattttattattttttcttgtttatttcttttttatgaaaatttttgagaatattgacttataaagtttttgtaataattgggtgatttaattattgttataataataaattttaactctatttaaaattattataaattgcttcttatttttcctaatcgtaaaattaaatttatttcagtcaggaaaattccaagatctttgaattacttttgcactttgatgcaaaagcataataatcaagtgtaaaatttatatttaaaattattgtttaaaaatgttttttgtatattgaaaaaaagtccaaaaagcaacttagatgcttccagtttccattaggttaattatttctattgtttcatgatgattttatttatattattgcaaagtaaatgatttagtaatttggtgcgatttattcattttaatcattttgttaattttgacataattactctttgttcaatattttttgcttattaattagactgtagaaaattacttttgagaatgttatttctttgtttcttagatatttttatttttgatccgtcaaaaattgattttcatgtaactattttacaaaatttattttaattattattatttaagcttatttttatttgtgaagttcatgttactcatggcaattaaaattattgttttcagcaaaaaaatataccaagtccacagcagtagtgcatgtacagtaaaagatatgtgaatattcattatccattttcttgttctgtaaatacattattagaaataaaaccataaacataaagtcttaatcaaaataaattatgaacataatattatattgtagaatgcatttaattaacaatgattctattaattacaaaaatcataatatatttattattaaaatttatttaattttatcattaattcattttatgaatataaaaatacatacacaattcataaaagtaacagatgagagttttagtatattatgcaaaaaaaaaagaaaatataattatatattttttatgcgtagcatcaagttaaatcaatttagatgaaaattaagatattcaaatagtgtcaattattttcatgatgtttaatttgcaagattattttaaaaatagaaaaaatcaaattactaataattttatttcaaactataaaatttaatttttaaattaattttcctaattttctaataaatgcatctttttcatatattaaaaaatgtactgtgattaacattcataaatattatttagcgcattaatgaaattaccatttattactacagacgaaattactanatcagt

SEQ ID NO: 16616 - DNA, 1224 bp, Heterodera glycines
  unsure (1)..(1224): unsure at all n locations
ttttataattttttaatgttttaataaataaatttccaaacatttgaaaaaagacattattaaaaacattatgctcttttttcatttgtatttatttatttaattaatttttagttttttttntaaatattccatttaattagttaacaagaattttttattgataaaagccttttttgttatcgtaagttatatatattttttaatagatcatctcttggcaaatattactttgttgaagtacattataacgcgtgttgttttcaaaatctattatttttaaattactcaaatatctaaaatttatttaagctactatttatctttagttttttgcgtcaataataaatatatttttaacttttgtaaataatttctcacgcctattatagtctttttgaattacatataaaataagcataatgattagagaccggaattttgaaaatgtcgggaccgggcccgggctcgggcttagacaattggccgggcccgggcggcccggccaaaaaaacccgtttaaacgggcgtcccgggtccggtcaaaaattttggccgggcgcccgcagggcccgggcttttttcaaaatttcgaaaattggtttgtaaaatgagaaaattaggtacgtaatttctatttttgctttgtttaaataattttatgaaaattttttatcattcaacaaaagtcagtcaatatttgtaattcagcattgggaaaaagatggtttttgagcgatttggtgctggattcagagaggctaaattcatatttggactttccattttctttacattctcggcactccgcgattttgacatcctttgatttttcaaataaacctattttccagattgatgcattcatttctgaaaaacttttaaaggaattaaaaacaaaaagattggcatgtatgtacgaaaatcaattggaatatttatgtaattatattctttcactttatattatttttaaaaagttatttcctttaatttgcaatgttttttttgaataagttagttttcttatttaaattttattgtatttcagaatgttgtcatatttgctaatataaagaatcatctatatattttgatatttaaatttctgttcgagaacatctttagatagatagtattttgcaacaatagtaaatttattttttttaaaaaaagaaaatgaaaggcaatttgtctccgtttaaaaagattgatatttgtgat

SEQ ID NO: 16617 - DNA, 3977 bp, Heterodera glycines
  unsure (1)..(3977): unsure at all n locations
accattataattaattaataatgtactcacagcttaaactactgaggaaaaaagaaatgattataaaaaattggatgtctccttgaaaanagagaatggaatttgaaagaattggataaattggaanaaaaatgatagaatggtgactgatctgataataattgatanaatggaatgattaattgataataatttgtggaaattatttggatatattatagaatttgattgattaaaatttggaataatgtttaggtaccggaacaacgaactcagacggcgccaatccctccctccccacggcggacggccctcaacaaccgtaaatatgtaaaacaaacataaaattacatatatatattattttataatataatattatgttttttgtatatcctttacagaaaagtaaaattaccttatttttaatgataataatgagaaacccaataaattaaaacaagaacaattgagtatgggatgtgttggattgagcaacacacagtgacgcgaacggcaatgtgcccttcaacgccagaacaacaatgacggcaagctctcgacaagatatttaaaatctgaactcatccaaagcaacgtcaattttaaaaaataaatcaaattaataatttgcaatcttctcaaacaaaaaatatttaaattaaattatataaaataatgatgcgaaaaatgcatcattaggatgttttggtaaattattattttcattcgaaaaatattgcctaattttatttgatttaatttttttataaaatttcttaatgattaataaatgcacatatttttatatcctttagtcaagattgctgaaaaattaatcgattaagggaatttttaattttaactttcataatgattagaataataaagctttaaaaatttttccattttatttacaaattttgctttttattgtaaataaatttaaataaataataaaaaaaaataaactaaactttttgaaaatttttagaatatacaaaacaaagtgttttgccggtccggaccgaatttacattttcaaaagcaaccggtttccggatttggtcaaaccagaaaaccggtcaatccttatttttccaaaaaaacgccggactgttttacggatccagtaaaaaccggtaccgggtctccggtccggctcggcctctaaaacatacattaggaaaaatataaaatttaaaaaacaaataaaaataaactggtccaaattttagagtaacttttatttaatttataaaaaataataattttaaaatacactgcattaaatgatgaaaaaataaatctacataaaaataacatgaacataagaccgatgaaataatcttattatgcgaaaaataataaattaaaattaaaataataataataatagttcccattttaaaaggcgaacattaatggaacaatttgatgagcgcttcgattaaattaatattagtatttcttgattaattaataaacttaactttatctttcttctcgaattctgtcaaaaattacgacttttttgtccgataatcatttagagacgcctattaaatttttggaaattatattggtagattattgtgggcatatattcatattttgctttatatctattttcttctgttatatattattacactcgggtttcacattatctattgaaattgaaatgaaaattaattgaaaattaaattttctttatttcatttagaaagaaaagtgaaattaggactttggagaattataaatatattttaatgaaaagaaaattatgaatttatatttatttatttaaaaatgataaaggcaattagttttgaaatgatatttatatatatataatatttaatatgacacgtaaatcatctacgtgacagtaaatttacccgaacgtgaatttgcccgtgaattgtgatagtgaattgacacgtgaacactgccactcaatattacttgaatcatctaggtgatcatgaattaaccgtgaatctcgaccgtgaccatgcattaacccatgaattgggacagtgaataacacgtgagaatggcatgtgaatgaataaatattggtataattaatattctctatttgaacactgaaaaccatgaaatatttgatgtgatcttaaaatataaatcttgaggacgagtaaaaataaatgtaatatttctatttattgtgattttattactgttaataattttattttgatcattttatttgtaataaaatatgggtggtgtttttttcaattttcttgtatttttcctacagagttttctcaaaaatgccaaaaagaaataaatcttaattaaaaaaatttatcaaaaaataatttcgatacgataagtgcctataggtgctattgtcaaattttgaatatttattgtcttttttccaaagtttttcttctgtgctggtaataagcacattcattaaataattcctagccgaataattcatatttctggaatgttattataacaaatgacggaatatttcatatacaaggaatgatttcaacgtttataaatgtttttatttatttcttttaaatccgataaaataaacctaaatataaatgtataaattcaattcattttattctttttcctggtttatttttgtttttatttacatttcattcattatactgttcgtaaaaataacaatttaattatgagaagtttaattataagttgttgtttttactattatttttttaacgtatttttaggatggttcccttgcttaaaatgaagccattagacatattttttaacaaaaaacgcaatttttaatcacatagtcagtttaataattttaattgtttttatttataaggaaatattatataattttttttatattttggattttttacgaatttaatttttatgaaatcttttttattttccactcggcttttcattaaatactttttgttcaatttaaattctttgaggttataattgttagggcttcgttttttaggcatttgcctattttgaactttttgtgtttaatgcctaaatgcctatttttgtgccaattacgccaatttgccacctattttcaggattttcgaataaatccttaaccaaaatgcaataaaaacgaaaaatacacccctaagaaatgtccgaaaaaatttcaaaaatacacccctaagaattgaaaaaaatgttcacaaaaattgacccctaatttaatttttttttttttgataaaattttttgggtttaaaaattttccttattcgaaaaaactttaaaacaattgaaatataactaaaattaagtgtttggatgaagttttatgttttttgcttatgttgtcaaaaagggaagcttctacaatagatattttttcgttttccaattttttaaattttattttgtgggttttttttaattttcattagcttaaaaattttcggctctttaaaaatataaataaattttgtcatctattaatttctttaaaaatatttgaaagtaattaaattaaaatttttattaaataagtctatattaatcgatggctttcggtctgtaatagaagaatccgaaaaaaattttcgcggcaaccaatccctgaagagttacagacccgggactgaaatggcctgagaaggagaaatttttgcaaaaaaattaaataattaaagcatttgttcatatgtttgtgtggtttagtgactataccttctgcctttcattatttgtcgctagtgttcaattccccaccgggatagatattttttatactttctttacattatttcnaatganatttaattaataaaaaatcaacttataaatttatttttcttttttaacagcctaaaccgcaaatttactttttattgattttcattcgataaaaaattctatcgatttttgaactataataaaatttgtcaattgacccgaaacccgatcctgaaacccgatatttt

SEQ ID NO: 16618 - DNA, 1684 bp, Heterodera glycines
  unsure (1)..(1684): unsure at all n locations
gtccgagcaatgggnncggcgttggcgcaaacaccagcaaaagcgctattctttgccacactaacccagcattgccaacgctgcaacgattttgagcttaaagcgctccaatctggtgcacaaaaattcgaaaattgtttttaaatattttaaagagcattgtcgtccaacgggatattttgatgtgtacacgtgcccagcagtggcggagtacaaagtggacaatggcacaaaatcacatcatactatcatttataagtgagaaaaaaacaaatttttttttcaattttggcgctagtgaaaaagtgacctattttgaaaattttttcaactttttttggtctaattttttttctttatttatttgcatataatgaatattaagcattaacaacacaattatggcgaataaaagtatattcacgattttttatcaaaaaaaaaaaaattccaaaacaaaagggtccccccctttggtttttgataaaattcaaaaatccaaagtctaaaaagtatctttttgaaatttttttcactttttttttcaattattaaataacggaaaatgcgtaccatatgttaaaaaacaatttacataaaaataaagagagaaaaaaatagaccaaaaaaagttgaaaaatttttcaaaataggtcacttttcactggcgccaaaattttcttacccaaattttaacataaaactcgcgaaaaaaatcgaaaacgtcatttcctaacaagaatttttttctagaatgaaatttttttcgaaaaaatggcaaacgttttcctgcgcagcacctatcggcaaaatggacgacaaaattccctcaaattttcaaatttttttttagtaatttgccttttatgtcccattctaaatgttaaaaaaatttcatttctctcaaccaatctattttttaaacaattttaggccctgcttgaccatgtcccgggaccaggagagtgacagcttttatatgttttgtatggcatcaatggccagtgctgtgctgtccgcgctgtacgttcgctggcgtcgtgaactgattgaacggcgtgcatttggctcttcggcacattcatacgcccgattggccaccgctgtgggggacaattgaatttcgttttttttttttgtggaaaaccaaaaattccttcgatggcacttttgcacagtgataattagggccccgacttttagtgacaaaaatcgcaaaatagttaactaaaattgtgacgaatagtgacataattttcagccaaaaatcaagcaaaaatttttttattcactgattgcagttgcaaatgaagtaaatttattttctaataatttcgtggcaaatattgacatttttaaaccaaaaattttgtcaaaaaaaattttggtggatgaatttttaagaaaatttttctaaaaaatttttaggtcgattcttaggggtgtattttttggttttttggcatttttgttaataaattttactaaaaatgtcgaaatagtgaaaattagtaacaaaaagccaaaaaagtgaattttcacttttaagtgacaaaactccaaaatagtgatttccagtgacgaaaaatgacgtccaaattaaaaattttaacgccgaaatgcgttttttgagctcctttcttcaaatcaattgagcaaaaaaaaagttttttcactagaaatc

SEQ ID NO: 16619 - DNA, 2446 bp, Heterodera glycines
  unsure (1)..(2446): unsure at all n locations
gtcatgttcgtattatttttctgcataaatgttaatttgttgaattaattgccatctttttatttaccaactgggatttagattaaaaaataggtacatgattantagagctccttatgagctttttttgtgtaataccacataaattaactaattaagaaaaaaaaatcgcgttcaaaaatatttaagagagaaatttaatacatttattttgccatttaattcgatgacgtctacagttgcaaagccaaaggagcgtcagttccaagtctgttttattaaaaaaaaaactaatttttttctagggcagtccaaatttaaaagagggtagtgatcgtacccttcgtggtgagaattcgaactcagctatatagctcggggtgtaccccaaaaattggataaatttttctgggacgaggtcggggtgccctataccaacttaataaaaattgagaaaacttggaaaaaaatttatttggtggctgggcgaaaaaatgggctccatgaaaaaacggggctgttcgttatgcctccaacaaaacaatcatttttaaaggttgtgccggtgccggcggtgtttactcgtggccgttgggagtgcattgactacaaagacacgggcgccaacccttggccatgtccaccgttgcccatcgacagcaatcggagcgaccaacagttgaccatggtttggtttttaaattttttgtttaaaataaggggcttcacccccagggcttgggtgggggtaccgatggaaaaaatatgttcagtcaatttcgatttttttaaaatttacccccttgggaggggcaggtacgtacgagtgcccgccggaatcaggacttcggtaatgagtcgtgattttcgctctatctaaatagaaactgctgttgcccgagcggcgttttccttcaataaaaaactacgactcagaaaacccaaaaatggcaaaaaaaaaataatattttttttcataaaacctctcgttttttgcgaaaaccgaaaatccttagcccctcctccctcagtaaaatcacatatattttcttccatccaaaaaaacagaatgctccccctccgccgtcgtttcttgtgccatcctcctccgtatccacctgttgttcgcccagcactttcatcggcagcggagtctctgccgtcgtccccacttttccgcctccatcggcggcgagcaacgccgcttcaacggtcgccggtgccacaacgccggcggcgactgctgtgacggcagcgactgcaattggcggtggtgttgccacggtcgctgtgacgagcggcggcggcagtggcgcaccaacgaccaccgcttcggtgccgcaggcgtcgtcggcattttccaatggcggcggcacggcgacaatgactgcggcaattccctccacattgttcgccgcggtgggcactccgtccgtgtcatcgtcatcttccgcctttttgggttggcaaatgggggcagcagtttccccccccccaatttttccataagcagcatatcttttataaattttttaaaaaacttatcaattcgtcatagaaattttttaaaaaatcgctagaaaaaatttcattgttcttgtaattttcgcataaaatttttcgatttttgaaagatacctaatcaattttttttttacaaaaaatatgaggggggggacgaaacgggggcctaatgcacccggcaaattgctgaggaaggagagatttgaactgaccaatttgaaaaaactttatggatcaactcgtttctatcattttttaaaatcaatgttttctatcttttttaacagttttttcgggaaaacgatacctgctggggggatgtacgtatttcacgtaaaaagtttcttatataaatgtgaaaattcttaagggttacaaaaactgtaagagaagattcaaaattttacgaaaaacccgttacgttattttctttaaaaaattacttaaattttccagagagtgttgcgcatccgtcggccacccctctgtcgtcgtccgaggccggcacgccgatcaccgaattggcgccgccattgatcggcactgtttctgcaacgggcacaatgtcggcaccacaataccaacaacagcaatcggtgttaaaaaaaaaaaattgttgtttgcttataaaaaaaattcgattttcatgtcgaaaaaattttatttgggttcattgtcattaaaatttgcaacaaaaaaaatttcctttttagtcccctccaaatttttcggccaacaccagtgtgccgcattttgacatttctccggcgcattctgtgccgacaacgcttggcactgagtttgtgccatcgtgcaacatttcggcaccggataggtaaacacgtcaaaaaataaaatttttgtttagcaaattttaaataattttcatcgactgtcgtcgaaaattcttttcccgattgat

SEQ ID NO: 16620 - DNA, 2976 bp, Heterodera glycines
ctatgtctaattcatgtgcacatttttgtatttgctttgtgtattttttatcgtttggattaagttttaatgaattccttcgtaaacttattatatcacataatccagaattatttgtccaaaattttattcacaattttccaataaaataattatttccgtttttattcagtaaattttagtgggatggaaaggggattgattggatagtgggaaggtaaacattgactaccactcggtacccggcaccgactatttaccgagagaaactttccgcgtttgcataaaatggtcaactgtgattggctgaaaaggttaatccctccctctcatactggcgaacccttttcctttccactgcagatttggtgaaggttgattggctgaaagacaatttcctttttttttcaaatatgacctctttatttgatatatgagtggaagggcgatgattggcggaatgaactgtcatttcctctccgataatcattcaataataatgatgagtaaatatgaaattttatctataaaagaattatcgtatccgcaatattctggtttaaaaataagaaaattatgcattttattcacaatgaagattttttaaataaaatttattcttaagaaaaatgaaaaattcttcttcttctcctccctccaaacgttctcgccgtttttttatagaagagttacttcgtgaaccatataatgagctttcacttccaaaaaaagctccaaaagattacatcaaaaagctggattcggaaatcgaacatgtgccaaagttcaaattggtgaaaaacaaatcgcgttttattatcaaagacatccctgctgaccctgaggcactcctaatgggcgtcttccaacattgtatggatgaagcaattattgacagccgtcaaagtggagttgaaccgactcatctcggatgtattgtttctagccagaacctttcttccgacatttggatccccatttggcagcttactcctgacaccattaacacaatactaaatcgcttcaacgacgttgcacagagcaaaaaacaggatggtgtgacgctgtggggtgaaccatttactgttacagtaacaacacttaaccgtaatgctctaccggcgaagcgtcagctgaaagggggagcagcccggaaattagcaccagttcaccacaatattcatccaaattgtcttattaaagttaaaaatttataatgtcttaattaaaaataaattttagatccaaaattttgatgatgacaattactgtttattttacgctatccaagcaaccctggttcgatcaattggtgacttggatcgtcgtcgctttcatgattacgtcaatggaaacagtgaaatgagaggaaaacttaaaaatgatgctttggaaatgatgaatgctgttaacgcaccagctggtcaaccaaattacgatgcggaagtatatgtgccaagaattgtggactggtggaatggggaaaaattcgtgggccaatggaaattcaaaacatttctcttcggatcagcaggccattacaagcctttattcaaatatggaccagaggactatgttgtgccgatcatcctttacttcgaagagggacattttaatggtgtgcagaaaagtggcaatttgttcggcaaaccatattgtctaagttgtgaaaagacctacgatcggccaaaacgtcacattgtcaattgcaaagcccgctgcattaaatggtaataaacaattttaacaatgaattaattatttttaagctcccaaatgggtccaatatttccatgcaaaccaaataatggattccgacaaaaatgcaaagattgcaataaattattcttcaacaactcatgctatcagtatcatctttcatcggaattttgcaaaatgagcaaagaatgcaaatattgtggtgtggtttgggatttgcgtaataatacccaaaatggaagagaggttttaaataaaaactacatttctcaataatcaaattattatttagggtcacaaatgcaatgagcgatggtgcgaaaattgtcaaattttccacgaattcaaacgggggtgtttcattcgtccgctggagttaagcccaaagaacgaagcacggggatggagattagtcattttcgaccttgagacaatgcaacacgaaccagtggatccacaaatccctgagcgacggaaacaccaagtcaattttgtcaccgcaaaagttgcttgtcctgactgcatttcaaatggacaatggaaagaaagtttgctcggaaaaaaatgcaatatttgtggctaccatcggacgattacattcagccaaatgccatttaatgggacaactgtagatcgacaagtaattgaccgacatcccctggtctccttcgtcaaatggattctatacaatttgccaaaacaatacgacaccattgcatattcacattttggaggacgatttgacatggttttggttttccgagaattattcatggaagggctaaatccgtcaatgatcaaaaacggcaacagattactcgaaatgaaagtaataaaaatatttttaataatatttatttttataatttttaggtaaaaagtcggaagaaattaaatccaaatatatcattccgagattcttggaatttggttcctggcccattagcctcactggtcccaatgtttggcttggacgttcaagacaagccgttctttccacatttggcaaacaggccggaaaattacggctgtcaaatatttccgacgaaatcaaactatttggccggtgggatgaatcctgagaagcgtaaagaatttgacatttggtatgctcaaaaccaaaatcagccgtttctgcttgatgaagcattagccaggtattttttataattttttgaaataaccaaattttcagttattgtaaaaatgacgtggatattttgatggctggccttatcgccttcagaactgaatttt

SEQ ID NO: 16621 - DNA, 1595 bp, Heterodera glycines
ccccttccccccctggggggtttcaaaaaaaaaatggacttttatctaaaccaaaaaattgtcgcaaaatttatatttaaaacaaaacgaggagtgtccgtcgcgtacattcagctcactttcgctcatcatttcatagaatggggcaggcgttttggagtcctccgccaaaatttcgtagcccaaagtgccggcgccgggggtcggcgattcggcgccgttcagcaaaacactttcgttgtcctccgcctcctgttgcagttcgtcagcagtaccaccaccaatcggcctcggctgttgtccggcggaagaagtacagggctctcaaaaaaggaaattccatgttgagacagcgaatttttgcaacaaaaaaaaagtggcactattccagttcaaatcataaccataaaaatttagcgaatggccatattttcaattagcatgcaaaatttgaaaattaattaatttggctgcagaaaaattatgatttcgtcaaaattggggcaattacattccatttgatttgatttttttaattttaaggtaattttagtagataataaaaacgaatctatgtggtcctaaaaaaaaaatttttttttttcccttttttttggtcaaaattttttttttgtttttacacataatgatgaacattaagtattaatagcacaatcatggtgaataaaaagtatattcacgatttttaaccaaaaaaatttttacaaaacaaaaggttcccccctatggtttttgataaaattcaaaatctatcactttataagtagcgccaaatttgcttaacaggcccaaataattgccatattcgtgatcagcgacctttaaaacccccgggtacttggtttcaggactttttaaacaaaaaaaaattttgaccaaaaaaaagttgaaaaaattttcaaaaaggacaacttttacactagcgccaaaatgccattttttgcaaaaaaattccactgacgagctattgcttcatcttcgtctgcttcttcatggagaatgatgtcgttgttgttgtccccgtccaaagtgatcagattggcctgcggtcggatgacacgaaatttggccacaaaactttcatgcattttggccaacgcattgcagcagcacatcgatgatgacgaacaagaagaagccgtggattgttgctgtctggccattattttggcccaataatgttaaaaaaggcaaatagcttaaattatggggtatttaagtatttgttatttgtccgaagattttttgaaaaaaaaaatcacattattttaaatcattggcgtaatatataaatgccaatgttttcaaaaagaaaacaaaatgtcttaactgtgaccaatagggactccatttttaggcacaaaaatctcgaataggcagaaaaatggacaaataaacatttttattaacactttttatgtagttagaaaacacaaaaaattagtcaaaaaaaatatataataattttggttacatttcaattgtaaatgaaattattaaatgtcttacaaaggaggggtcggcatttttgagaaaattttatgggctctattttttttattacttttgctttt

SEQ ID NO: 16622 - DNA, 1063 bp, Heterodera glycines
  unsure (1)..(1063): unsure at all n locations
tccgccactttttcaattttttcgacaaaacatgatataactttgtttaaagtcaaccaaattttacattcttggtatcattcgatagccaagctttttctctataagcctgccaaattttaaaaaatttggtcaactttagaaaaagttgtgggaaactaaatactatttctgccataacttatataaaatttgataattttatttgaacttttgcaggcttatagagaaaaagcttggctatcgaatggtacgaagaatgtaaaatttgattgcttttatgcaaagttatgccatgttttgccaaaaaattcgctaaaaatggcggattttacgaaacgacctagcaccaccaagcggaaaatgcggttttcatgcttatctgagcgtaataaatgcgcaaaattttaggcatttacctaaaattcccattccctaatcatcaacccggacccaaattcgagcaaaaagtcgaaagttcacatgtttgagttttgcattttcgaatctgatcccattggttggacaacatttagggtgcacatatttctatgaaaatatggacaaaatctccaaaaaatagaaaaaagattctttcccatcaatccaaaattttagcttcactgttcactaataaataagtttccatttgttttctgaattcgttaattatttgtggttttttgtcactaaaaatcccagttttactgataattgtaagtttgaaattaaaaaaatttaaagtaactgatttttgtaaacttttatcaaacaaaaaaaatttttttttattcgaaaccaatttattttcacaatttttttttaatcataaattcgtaaaagtattgaaaattattattttttcttcggtccgcaccgaataacaacaaaaaaactaacattttccatgacgtaatttctccacgaaatagcagctcgcctgatcagctcgatcactttcgctaaccgatcaatgtctgtctcaataaattgtctgattaatatagaccgactaaaaaggcaaaaattaaggatttttatagagtanaacacgtaaaactta

SEQ ID NO: 16623 - DNA, 1586 bp, Heterodera glycines
  unsure (1)..(1586): unsure at all n locations
aaatttgaaaggtcgatccttaagggtcatttttttctctaacgtgggccccgctaagannnnaccgaaggnccggcctattccgaggagcaannnacnaacagannncncatcaaaaagggnaannnnggannnagggaannnnnngaatgagcncttaaattttgacccagcggttttatgaaacgacccaatagatacataacttgtttgtttaaccaaggtcattttttccattagtcctaattttgcatcataatatttaatgttaatttcagttttcttttattcaaatttgataatggcagatgatgaagattatgatgggggagaaatggacggcgatgagtttatggaggaagagcccatagaagaccttgatgcggaacaccaagcgggagaagaagaggaaggcgcggagaatgtccaagttattaatgtaacctattattttacatattatttaaattttggttttcaaggtttctgacaaagttgcatcgtccaaccgagtgacaactccttttatgactaagtacgaacgtgcaagagttcttgggacaagggcgctgcagatagctatgggtgcaccagttatggtcgaaattgaaggcgaatcggaccctttggaaattgcgcgtaaggagctcaaggtgaataaatattccaatttcaataatagcgaggtaccagttaatctaacctaacatttaggaccagaagattcccataatcattcgtcgttacttacctgatggttcattcgaagactggggcattgatgaattgcacattacggattggtgaaaatgattaaccgcgtaattggcattttttctatttatgtttaatgaatttttgattcactaatattttctgcttattttgaccgatttttaattgacgttaataccttatttaaactccattatgcgtttatcaatcagacacttttctagaggtgttttgtcaatgtctattcttcagaaactttctcctgtaaacatcgactctaaaggcgtttttaagtacattctcataaaggtttttttctgtgaagattgaagcaaaatgcgaatttaggcttctgatggcgcaactgaaagatttttggttcgtggttatggtcgttgtaaatttcacgcggatattttggaggaagtgcaggcaagcgaaggagagaaggccattgaattttcttgtgttggcggaggccggataaaacatgagccggaagccaaacgtatcttcgtctacggatattcccaggtgcagaattctcaaaaagatttttatcggttgtttgaggggtttggccgtgctgaccatgcgaaatctgtcgaaatcctgagggaacgttatccaaactacacaatcgaatggtccaacgaaggatattagggcagtaaatctagtatacaatattgtaacgttttttgttttctatatttaaaaataaaattgggttctcggaatgtatgaaattttgtctgttaaagtgatcccgtcttttaacttcgatcttttttatccgcatcttatttttttaacatcagaatgcgtttttatggtcaaaagtcgcgtcg

SEQ ID NO: 16624 - DNA, 1304 bp, Heterodera glycines
caatcatatcttagtaaagaacaaataaaaaacgctcatgtgaccaaattgtctcaatttccgggccaagcgatggaagcgcttggagcaattattttggactgtaagaaaccaccgaaaatactgcagaaagaagcggatgatgtaagttaataggacgacataatttagaaaggacttcagttgtcaaacaaattggaaatgcgacatttcccggccaaccctaaagaagtgcaaatggcgcgtaaacagataatgcatgaaatgttcgaagagaacccagcactgttgtaccaatgggaggacactaaacaacggcccaccctcagccgaatgtttgacaaagaggcacagaaacggttagcagcgactcgctacaattggaaaccgctcaaattcgacacaaaagaggcggccgttgtttatgcgctttcgcggttttttgttaacagagaaaggcatttataaatgtttttcatttactctagattcggtgggtattttgcagaaatgcggcgagtgttttcggaatttgatcggaatggatttgagcccgagacggtgctcgattatggcagtggaagtggggcagctttctgggcggcctttgaaagatggggtaaatcaaaaggctatgctcaatcacattaaaaaatcattttgcaggtaacaaagttcgtgaatattctctcatggaccaagactatgtgattcgacaattgtcaatggatttgcttagggtctaaaaaaaatttctctaaaatttctttgtccaattcagggaaagaattatacaggagcgggcgaaatgatcactcaaaatgtgttttttcgcaaggatctttttccctctccgcagcatacttatgacttggtcattttgcaccgaactctcatcgaaattcaatcggaagaggagcgaatggaattgatcgaaaagctttggaagagaacaaaaaggtatttaaaaaacaatcctcacaatcatttaataataatttttcaacgctaatgatataattactagacaaaaaaacaaaattattcccttgaaattggaaaatcttttccaattaggttaggtgtttttattttttcttgaatttgtctcggcgacattttgttttgtccttctccaccgtgcacgacgccccgaatctttttttcctcttttttttttgctcttcacagttgaattttttatgtatttatttttactcgaaaaggcatttcattgttttttccggaaatgcatttagatttaggggggtggtggactcgcatatgccggatgctttgaagca

SEQ ID NO: 16625 - DNA, 1955 bp, Heterodera glycines
  unsure (1)..(1955): unsure at all n locations
cctggcaggtcatataaaatctaaaaaattttatttaaactaaaactacctccgcccacgtggcttattaaatctcattattttcgtcctcgccctcaaagtttccttcgccgccgatgcctatcattatgattattttttaaaatttcttttaattgttttttttttgtttttgcttagtaatttgagtggaattcgttgaaattggtaaaaaaattttaaaatatatttttgactaaacggcgcaaatgtccgctgcgcaaaagacgcaacacgataacatatgcttttgaaaactgtttgttgtgtttttcttttctttataaatatctaacattttcaacaaataaataaatattgaaaattaattctttcattttcaaaagaaggaaatgaattagttaataattggcatttcgtagtcctttggcatcatcaagctaaaattcaaaaaatgtataaattgttttttgtcgggtttaaattaaattttattaaaacaacctgtaattaattttatttttaataatttttataaatgcataacaaaatttgcgggttaactaacctgcatttgcgcgatgtgccaattgcggcgcggcaatgtccgcatgatttggcacaattctgtgccatccaatgcgcgttgcgtgcacattcgccactgcttgatgacacattatattttggcattatgtttcgtgggtaattagatgaatgccatcgattaaagatatgatgagcagaaatatgagaagcatgacgggttttatggaaattggcccaacgttcgcattgcgaatgccgatctttgcaaactgaaatttaaaaaacatattcaaacgaattcaaaatttttgaaatcattttttgatatatttaagtgataaaaaaagtttttttcataaattgaaatttttttctatgctcgaattttattttttggcatttaatcttttactctaaaaacttttttaaattcttttaaaatgtaaacacaaatccgtattcgtaaataaattttcataataataacaattcagatttttaatttaatttgataatttagatcactgccctggccttagttgacaaaaatttccggtattggggaaaaattcctaactaaatttgtcaggtattgcttaaaaattcaaaaaatgtcgaggatggaattttcgtaaatagatgacaaaatataagaaatttttatcatgcaataaaattgggaacaggaactaaccattggctttacaaatttgtgctggttttaagagggtttttaggacctaaatcaaaaccccaaaaatgggtgtacgagatcataaattatatatggccaatgttttaagattaaaaactctgtctatagcaccgactttggcctgtcggatcttgctggtattggttccactcgtccgggtgcggttggcatccgtcaaattggcacgagcacggacaccacgtgttcatgtaacgcggcgctgtccaacacgcgcccctggtggtccactgtgtacaacactcgtggttatcgtagcagaaacgtccgcttggtggacgaggcttttttggtaattaattgggaatttaggtcaccctttcacaaattttgtttttgacaatttgggattatgttaagaaaataaaaaattcataactttcaactcttgagttgagaaattcatgactttttttaatagttctcgattttgtaaaacatttcttaagttgaaacatttttcataaaaacatatccaaatctagtttttttgttagtttttttaatacttttaaattttaataaatgctttattagtttgaacaatggaaataaaatattaaattttaatagctctttactgtgncgacggagttgtggtatccaaatatacacaatgtttaacggcaaagtgaaaagaaactgatcgactgtattaaaatataattttaac

SEQ ID NO: 16626 - DNA, 2613 bp, Heterodera glycines
  unsure (1)..(2613): unsure at all n locations
atcgcctcctggcataatttttgcacaacatancggtcttcccctggtagtgtcacagaaaagataactaaataaaagtttattccattattattattattatttttattaatttaaataataaaaattaaaatatgaataaaagaattttatttgataacagtgttcccagcttatttttcaaaataaactaattcttcaacttatagattttgaccaataaattaggttttttcataaaatttgtacaatgagatatttattaggaaaattttaatgtttttaacaaaatttatggtgaaattcagtagttttttttacaaatcagtgcatttaaatttctaagactgtaaacaatctaacacagtaccaagttaaaaaaaaattaagccacctactgctgggaatacagttcaatgggattaaaatgtataattgtttttacggtgatccacattgaccggctccattgcatgatggtcttggcgcataagtgtacaaattgtccgtgtacgcattgcttagaccatctaaaatgaaaattactttttttcatttaaatttgataaattaatttctaattttaatttacctctgtttaaaacaaccgggtcctggaagggtcgcattattgcacttagacgataattttcagagccagaacactgtaatgtgaaactttgagaaacaacgtataaatgcataagtgaaatattaggctcaccgatcaaaaatttcgggttcaggaccaaaacaagatagattcattcgacagaaccttacacgaaaatttttcaaaaaattgaatcaaaatcttttcgctattacccaatcatttttaatcgcctaaattcccactgatcgctgatcatttattaaagcgttgaatagaaaaattttaaagttacttaaaaactcactgggacaatttgggaatcaggtggaaattgcgtttcacgctgcgctcggctttgccatttgagtctccattgttcccaaatcttaaaaatgaagggattttaattatgttttaatttattatttaataattatctaattaaaaactgttcccaccaaatccataaaactgtgatgaagaaaaaagagaggatcttgtgctgcagtgttcaatgccaactaaaacccaaaatttttaataaatcgaacaaataaatttttaataattttttaaaaaatttagcagataaaatttgaataattaaaaagatttcagcaagacaatttatctaaataatgattgtattttaaattaattaatcaatattgttgctttgacttaccatgtccccacccacccaagtgtgaacatcactgtgaatgatttcgatcatgttcgctgggtttaaatttggcaatgtgcatccgccatttattggcttaaaatattatttatttatttttagtttttaaattaataatttaactctatctggaaaggagaatatatgctccaaattcgggttagagagtaatgcgtcaatactaaaattggaaaaaaaaattatttaaaattaattatactttaattataattcatccaggaagtaaaattgtttatggttatcttattttcgccctctaaataaacaaatttagagtttttgcatcggagtatttcaatttttattaagtttgacaatttattctacttttttggtattttgtcaatatttgttgcgttaaaaaaaatcgtttttcaataatttaatttacggcctaaattatttgaaatataattaaccaactcttcttctttcaataattgaccatctgcatctggtgtcctttgtatgaaagttccactaatctgtgtacaaaacaaataattaaagttaataaattatcataattttaaattttacagtgatccaattagcaaattcgccattaacaatttgaccaaaatcgtttgttgtgcccataaacatactgctccacataacggagtcaagcttaaataatgaaaaaataaaatttaattaattaaaaaatccactggatttggcagtcgtccgtctaatgacgagtcccaatatgggatggccacggtcgggtcaatggctcgaagtgcaatttccaatcttaaataataaattcattagaaattttttggtatgacaagtcaccactttcattaatgatgtaatatttaaaaataattaaataggaatttttgaatttacattaaatcggtttatttaaatacttcgcaaaaagtttcccgcattacaaaggcggcgaaaataatcgataaacaataatggctttagttatttataaatatttgaaaatttgagtcaaaatccgaagatcttttgctaacttatttaccgtttcagatattcacggtgccacaataagaatgttggcccgctatgggcggatggcatcattcttgggtccgaatgaagagctgacaaacgatcatattcataggagccaaacccacgcttcagctgctgcatagcggcatgcttgaaaattttaaaattggaattaaaagcattttctttaggtttttaaattaattgctttcatgccatcctaaaattattgaagtttttcactattattccaatgaagtaccattaa

SEQ ID NO: 16627 - DNA, 2143 bp, Heterodera glycines
aattcattccatcgggaccagagcgtttgggcccccgacttttgggccccggggtcgtttgggccccgacccaaaaatagaaaaatgtgcttttttaaaaattaagattctaaaaactaagcctgagggatccctcgccacttggcataagttaggtttaattagcattcgctcattttttacaattttacttattccaactcctattattttttaatagttaaccaatttgatgtacattctgatttggacatttttcagaaatggctaacccaattgcaaccaaaatgttgtgttttgctaacacgcaaacaagataaatttatttcgaagtcaacgtcgattactttctggtgctcacgcaaaatattgatgaatttccatattgttgggtgtccttgtccgatcgcatgttgcaacatgcgatggtacgcttcggcgaagttgtttgtgcggtcggtgccgctcattgtgcgctcatacacactccattcttcaggacgaaacaatggacgagtgcgtgtgccattgttgcgaagtcgcccaacgtagttgattacaaacctttaaagtcaataatgaaattgaaaaaaaattaaactcaacaaaccaatcgagaacgccctcaagttcacccggcagatgatcttctagggctgccagcgccggtgtaaggtcctaaagcggcacaaacgccagcgaagtgaccattttggcgaattgtgcaaaggctgcgtcagttttgaacgctaaatttgagaatttcaaaagtaataaaaaaatttcttacgtgagtttgctcgtcggtaagacatgctttcatgttgcgcaccaaatggaataggcaaaagttgattgaacattgtggatgtttggcacggagggcgttgaccatcgcctgctcgaaggcaattgtctaatcgcgaagcaatcgcttagaaaaagcttctaaacatgttaagctttcgaatgatatcaacaatgttggatttggattacatagaaaaaagttatagccaaaaacatgctggcgccgaaacgccagcgccgaaacgccagcgccgaaacgccggcgccgaaacgcagtggacccgttcggagtggacccatcaacaaataactaatcaataaaagtattcgtgtcgaaacttaataatattaaatatcaacacatccaacacaaaaaacaaaaagtaaaattgtcttacgaaggccacttttacaccttcgctaaatgagttctgatgggatgacaaaattttggagatgcgaattcaaaaaatcaatttcacattattttggagtttctccggggaatttctcgcaactatcgaatgaacccgtgattttttgttttattgtccaaattaccttatgaacccgtgaatttctgttaatttttacattttttattgttaaaattattgttgaatttatttttaaaatgtttattttacatttttatgctgaaatttaaaaaagttgtttttactgtgatttttcatttttctgtacttggggcccaaacgaccctggggcccaaaaacgagggcccaaaaacgggggcccaaacgcccccgactctccctgggattttcatccccatcttccagttccaagtcaaatatgagaaaaaaaaaataccaggtcccatttaggcacgaaaaacctggattttctggataatattttagaatttgtgattactagggctgggatttttatgtggtaaaaatcctgaaatatgtaataaaatatgtgctaaaaaaactcaaaatatgtgctaaaaaccaaaaaaaggcctaaatatgtgttaaaaaatgcaaaaatatgtgctaaaaattggaaaaaccaagtgtatttacgcaaaaaaaaatcatatttaatatcagtctttatcaatttcgtgagaacaaatgcaaatcagatgccgctgttccgttgtcaaactaatacttggtgaaagcaccgttgacaaaagataatttttccctcagttgaataagttccttccggggacttttgaaatccagtgacgatttaacacagcgtttgatttgggctgctttaggcatttaaatatataaagaaattttccaatgctttagaaaccgaaagtaagcaatttttaggggcattttca

SEQ ID NO: 16628 - DNA, 414 bp, Heterodera glycines
ttctaatattcattgctttcgcatatttcctttattctttcaaatgctatttaccagttgttgttgttcatccatcaagataggttaaacgggaattatttattattatttaatttgaagatttttattctgttggtttaaatttataaattataattttacaatatagaatattaataattatttatatttttttatacaaaagataagtaattaaatatcatatttaattaaattttataaaaaaacttaatgcttaaattttctatttctaaataaaatgtgtttctactttattctgataattcttgcagaatatattccaattcgattttcgacgcactaaacaaattttttttttatgatttgaaaagctggagttgcgtaaaaaatgtttgtttcttttttatattt

SEQ ID NO: 16629 - DNA, 2243 bp, Heterodera glycines
  unsure (1)..(2243): unsure at all n locations
ataatattttgctatttttttgttgttctcagcacgttttgtcatttcaaattaaagatcgttgtaattatatggttggggaataaactggcgattcagaacaatattgaaccgggtttggacattctctataggcaacaatttttaggtgttcgagaaaggaatagtcacaatccgcaatctctctctttaactgctttaattgatcagttaaagattttttcttcttcttaattttttgcttcaaatctctaatttcttgttggataggatcaaagatcacttacacctcatcactgttattgacttttcccctccccctttctctgtcttacattatttccattgtctccctctctgcctatctcctccacatttctctgaccccgcgtctttataagggtgcccattccctcactcatggctctccgctccattcattcgcattggacatttatttattattttgttctcctccgccgctgcactcctccgacctcaccattttgtgcatttatttttatttgtttattaataaattgttgatacacaacaattttggcgcagtcagcagcagcagataaattctgcacatcatcaagccaaatcaaggctaattctgcaaaatcttcaagccaaatcaaggcatattctgcacaacctccaagccaaatcaaggcataattcagcaagcctaattttggcaattcaaaagcctgggcggctttcatcggacatcgacaaaaactgatcacctgggtggtgtaagttccgctgggtgcggtttctcatcaacaaaaactgatcacctggggggtgtaaagttccgctgggtgcggtttaatcaacaatcaaaatggacgcacaacaacttcagcaaattttggacgcggctctaaaaaaatcagccgaagtttttgccgccgcactcaacattcaaaatcaaaacccaaacccagggtcatccacaacggcatcacttgcggcatcaatcaatgtccacctcgaaaaattcaattataatccagaggttggacagacttacgacgcttggctgaatcgatatggcaaaatcgttcaacaagacggcgcttcgctcccagagcagtccaaagtccaacttttggtcggaaaattagacgaggaggaatacaaacggtatgttgacagcattgcaccaaaagccacagaacaattcaactggctcgaaaccgtggcaaatctgaaaaagatttttggtgagacgaggtcgctcttcctccgccgtttcgattgttttcaaattcgccaatgccaaaaccaagacctttcgagtcttttggcactaatcaattcatcgtgtgaaaatgccgaattggatttgaagaaagaagagctaaagtgcatgattctcatcatctctttacgcgacgaattttcggatttgaaacagcgatgtctccagcgaatggaagaagcccgaaccaatgggaaaagcatcaccctacaggaattgggcgaagaatgcaaaaagtaccaaattttgaaggaaagcacattggcactcagcacaaaacagtacaatgccaatgccattcgtgccaagccacaacaagtaaaggacaaggcagacgcaacaaagcaatatgccaaaccaaaagcggttccaaaaccgtatgagagcaagcacaaattgccaaaccgtccatgccaatcatgcggaagcacaaatcattggcgctccgattgtgggcacagagatgccaaatgcccaaaatgtggtaaaatcggacatctcggcaaagtttgccgaagcaattcttcaattcgccacatccaaacggtgaatacaactgaaaggcatgcacaaatcaacacagtcatcatcgacttaaattgcatggaaatcaaagcagaccatccaaaatggtggaaaatactaatcaaagtgaatggcgcagattatccaatgcatgtcgattccggtgcacaaatcacattgttcacaatccaaacatggattcaaatgggcaaaccgcctttgacgtcagcaaatattcgcgtcaaaaattgcaatgaccaaacatttgcaattaatggacaattcatgtgcaaagtgcaatacatggatcgtccaccaatgaaattgttggcatatgtgagccccgaaatcagtcataatttattgngcatgccatggatagaagctttggagggtgatcccaaagagattatgcatccnaatcttcatcaaaaaatcaata

SEQ ID NO: 16630 - DNA, 1921 bp, Heterodera glycines
accgacccactcaacggactgccaagcagtgcggcctgcgccccgaggaggcgttgcgccttcggacgtaacgaaattcctccagtgcctccaaaatcgttcctccgttcggcacgggaggcgatgcaggacgtcacttcggtcagtttcgcctccctttttagctttgaagattgaaatccctttttaagctcatccttttggcagcagctgtcatttcccttgtgctttccttttacaaaccgccgaatcgagaagaaatcaacgcaatttcatcttcgcacctcgcaacgacaacgccgaacagtgccgaggacgaacaaagcagcggaataacagaacaacacgcgggatggatcgaaggggcggccattctaatcgcagtcagtgggaaggacggcggagggggggggggacccggaaaggaatggaaaggcggaggaggggggaacgcggaagggcgcgggagagggcggaggggggggggggaccggaaaggaatggaaaggcggaaaggatggagggcgggggggggggaatttgtcatgacgggaagaggacgggaagagggaggcgacacgaagcggacggacataggctgatgaatggccaattcggcactttcgcatccgcccaatggccacggatactcattagagtaaataccgctgacttactcttttaggttattgtcgtcgttttggtcactgcgcttaatgactggagcaaagtaaggaacagaacattaattaaaaatgctttaggctttcttcccaatgctttcgttgttcaggagaagcagttccgcggtttgcagtccaaaatcgaaacggaacataaattctccgtaattcgcgacggaagggcgatggacattgtgatcagtgaggtagggaaggaaggacacagcagcgaaacgcattgtttgtctgttattcattttgttttcgattgtcgttggcgacatcgcccgggtgaaatacggcgaccttttgcccaccgatggcattttgctccaaagcaacgacctcaaaatcgacgagtccacgctgacgggcgagtcggatcacatccgaaaacaccccgagacggatccgatccttttgtccggtctgcggcgccctcccgcctttttgtcttacagtcaatttaggcactcatgcgatggaaggcagcggaaggatggtggtcacggcggtgggcatgcactcgcaaacgggcattataatgttggagatgggccatgggtttgcacttcaattcggtcttcaggagtctgttgggagtgactaaaagtggcacgacggaagcccaaacgagcaattcgagcggacagaacacgcaaaattcagtgtccagtgtcacgaaaagtgccaaccgaaacggacaacgtacggcaggcactttctttgcaatgccaacccctgactttcagctttgaacggcaatttgttgaagtgcgtcgccaatggccaaatgacttccgccgctttgtccgccgatgtgccgccgccaaacggcggggcgacgacggcacacgcggcggtggaggacaatttgaagagcaaatcggtgctgcagggaaaggcgagtcaccgcgccgcgctcccttcccccaccccccccccccgcccatcgtttagctgtccaatttggccgttcaaattggttacattcggttcggtggttgctgctgccaccgttttggtgctaattgtcaaattttcgcttcataaatacggcgagtgatttgttcacttttttaccgattcgcttctttttcagtgtggggccccgaggaaaaaaaacatttcgaggccaaagacattgccaacttcgtcgatttcatcatcatcggcgtcactgtgctggtgatcgccgtccccgagggattgcccttggtcattactctcgcgttgac

SEQ ID NO: 16631 - DNA, 1828 bp, Heterodera glycines
tggatttttcgctttttgaccgttcgtttgccttttaggtgtgccttgcttggctttgtgctcgacttgggccaaagttacgaggaattccgtcgcaaattccccgaagagtctttgctcaaagtttgcctctgctcacttccctttccttcatccccccccccgttcctcaggtgttcactttcaattccgttcgcaagtcaatgatgactgtcattcggcgaacggacggccgtggctttcgcttatacgccaaaggggcctctgaaataattctgtccaggtccgctgattaatgcctcactttggccaaatggtgcttgttcaggtgcacttacattttgggccccgaggggcgtgtgacgtcttttggggagagacagcaaagcgaagtgattcaatcggtgatcgaaccgatggcatcggacggactccgaacgttcgtccgttttgttgacagttcttattgtaagcatctgctactgtttagcatcgctttggcctacaaagattatgtcgtcgagaaaggagaagcgaacgaagtgcgcttttcattttgaatttcgccctttggcattgtgccattcccttgacattccgttttcttcagattccgctcgaaggagccgatgtgaattgggatgacgagcagattctgcgagagggaatgacggccatttgcgtgttaggcattcaggacccggttaggacggaagtgccggatgccatttcgaaatgccaacgcgcgggaataaccgtacgaatggtgagtgatttttgaccagtcttgctaatttagtaaacaatatgtaaaatgcgcctaaggtcaccggggacaacataaacacggcacgttcaatcgcaacacaatgcggcattttgaggcccggggaggactttttggcattggagggcaaggagttcaacgcacgcatcagagactcggatggggttgtggaccagcggaagttggaccaaatttggcccaaactgcgggttttggccagagcacagccaaccgacaaatttgtgctagtcaaaggcatcattgagtccaaatgcacgaagaacaggtcatcaatgattggtgggctgaaaatgagtcaaacgctgcagggaagtggtggcagtgaccggcgacggcacaaacgacgcgccggcactgaaaaaagcggacgttggctttgccatgggaattgccggcactgacgtggccaaagaggcgtcggacatcattttgacggacgacaatttcacttcgttcgaccatcaattcgcatttatttattgtctgctcgttttagcattgtgaaggcggtgatgtggggccgcaatgtttacgactccatcgccaagtttctgcagtttcaactgactgtgaacgttgtcgctgtgaccattgcctttgtcggcgcgtgtgccaccaaagattcgcccctaagggtgtgccgtgccgtcgtcccttgccctcgtcctcatttttgctactttaggccgtccaaatgttgtgggtgaatttgatcatggacactttggcctctttggcgttggccaccgaaatgccaaccgaagatttgctcaagaggaaaccgtacggccgaacaaagtctttgatttcgcggaccatggtgaagaacatcatcgggcacggcatttaccagttggccgtcctcttcggacttctcttttttggtcattgaattttgcctcttgtgccattgagtccattttaggagagaagttcatccccgggttggagaaggaaaaggcgcgcgaattgccgcacgaagcggggccgacgatgcatttcaccatcattttcaacact

SEQ ID NO: 16632 - DNA, 3091 bp, Heterodera glycines
  unsure (1)..(3091): unsure at all n locations
agtcgatctttaggggtgtatttttcgcttttttttcccaccacagttgttaaaatttccaaaaaatggccaaaatatcccttagccctactcattaatccaatgcaaaaatatttattttttttactgcattaataagacacaccgagttcaatggttggaccacatatgctttgatctcgtcgtcgtccatttgctgcgcaattgccgcccaattgcgcaacggcacttcaaatgccattttttggcattcgtcgcgcgcctcgcggtcaaatgccgcgtcgaccatcagcaaatgcttgacgtcacgggccaactgttcatttgtgtgattcaatttggcatgaatgtgcagcggatgcacttcattgaataagtcttgaaaatggcgaaattttttgtcaagaaaaatttgtgggttttgtcgagtttcgcgcactcgaaaatattacaaatattttcctacggtacaatgtcggcaaaataataaataacacgatgatgctaattagaaacgccggcgaaattaatttttgaacaactttaatggactactgtatttgatactaattgtaaggcaatcaactcgttctcggccaactattcttagttttcaattcgtttttttagttgaaaaacttataatcgagtcaaagcactaaaatttaagatgttttttgattaagaatagtttttatgtcagttttcgtgattttggatgacaacaaataaacttttttttttaattagtacgttaatttgtaagttaaaaacagattaatttttttcatcgatttgaactcgatttgtagttttttcaaaaaaaacaagttggaataataaaacgaatcgagacaaaatgagaatttgaagtttcttttactatttttgcttgctaagattttcatatgaagggtgaagaggattgatgccatttatttgaataaatttaatgccatttaaacccataattttttttttaattcgacttcaatttgatgaataagggatacgatttttaggttctaaaacccaaaaataggtgctaaaaatggaaaataagtgccaaaaaattctaatttaggggtgtaaaagcgtaaaattttatccaaaaagcaacaaaattaagccaaatcagtcaatcaattcattgatattttcaaacattggtttgctttattaaaagaaatttcaaaaaatccacgtccaggctgggatccaggcctcgagtgcctggatctttcatggaccttgattttcctgggtttttgtcaaggaaatcctgatctaacatggaatccaggtccaggtccagttttgaggtttttttcaaaatgtcgagcactagaaaaccctaaaaatcgtatccctattaatgccaaatcccctattttaggcttttcctcccactcacttgtgatgcctttgtcctcatttgtcgaatgatttctcacccaaaggcgcaactgatcacagttccattcgcaccgttttgtcctctcccaattgatcaacagctcgtgcaacgcccgcgggttgtgccgttcgttcattttgatgtgaatgtaaacggcaaatgtgaagggctcgttgctttccgccttgttgatcagttgattgatttcacttaaatttggaaataatttttttaattaatatttatttatatagtaataaaaaaaatgctataaatttggtaatttttatacaaaattttggatttttaaaaagttaaataattttaatacatttattctacattttaaataattttattttattttttttacgaaattttttactttattatatttaatgaaaatattcgcatttttatacgaatatttaattaaatattattttttttattaattaattattcttttattttaattaaatattatgttctattaacatataagttattaatttttatacagaattttaaaagttaaataatttttaataaattttttatattttacattttaagttttcgttttgttgctctgaattgttcaattctttcattcaattgggcaacatattgttgctgaatttcttcttcttctaattgtttggcattatttaatagtaatatctcttcatccatggcattctaattaaatttttaaagcaacattaaaaaaatttaaaatttaaaatttaaaaaataataattcgaaatgatttatttacaaaaacaaattgaatttaaacaaaggtgttctaattaaatttttaaaaatgcattaataattaaaatataattaaaaattaataaatcataattcttaaagagaaatattatttgctaaataattaatttcaaaaacaaaatgaatttaaacaaataattgacgtaaattacttttaaaaaatggggttaaaaaaaattaggaaaatttaaaaaaaagttagaaaatatttatttacgaaaatttattttattaaatttatttttgccatttttttttactttgaccaatttcaatgcttgagtacaatacaatgccaatttcaacacctccttcagcttcaacatttggtcagggctttgtgctctgacaacctcaagcgcaagacgcactgtgtactcattggccttttttgggtgaaaaaattcaaaattttaggccaaaatttaatgcgtatttttagtgaaatatttctatgatttaaaagtttatgagaaaaaggcacgaatgtggaaaaatgccataaaatattagtaaatgtaatttttgactttaagaaaattccagaaaagctgtcgaataaatttaaatttgaaaatttatttttatgaatttttttaaagaaaaacatgcacataaaattttagaatgaattcggaaaggcaaaaattgataagaattttacttttcaaaaatgcatcaaaggattattaacaaatttttagccgaaatgggaattttttgaagttttttgaagaaagaaataaggccaaaatgggagctagggattaatcttctaaaatttgtatttaattaaatttgcttccccccctttttcagggtcncttcaaacctttataagacgtgtcgccattgcgccttttcccttaaag

SEQ ID NO: 16633 - DNA, 1802 bp, Heterodera glycines
  unsure (1)..(1802): unsure at all n locations
ttttatcaaagttataccatcacacgaaatgcttcaatggatgatgtgaaggatttgaagctgcacaaaagcactcaaattattttgatcggattgnnccagcnaaccggacaaagtgtgaccagtagggaaagcagcggcacggatttgtcattggacgatttggtcaaaaatgcaaaaaataacaataatttaaattgttgtttctttaaatntagaatggaacaattggccgccttttgggctcagtcgctgaacagtcaatcaatggaagttgggcgaaatcaattcattttattccgccgtctgatagatttatggatgtttttttccaaatacgaaacccgcctttttcaagactgatcagcagcgaaacggatttggcgccatatcaaaacaatccgaataatgcaagaaatagaggaataataaaaattataagcgaaattaaataattattagtaaaattaaataaaaattcatcaaaaacgggttcattaaacaataccaaaataactgaaaaaattatttatagacaaaattgacgagaacaagatgcgatttgatgggaaaagaatgtgagccgactcgcgaactcttacggaagattcggaaaatttcgaagtgctgctccccgtctaatgctgctggcccatgcatttgtaaacttccgaaacccgatccggtaattcatcttttttgtactttattaatgatacaaattatatttctaattgcacttgtagagtgaattcgcggcacccccgcatcattataattggaatgaatctccttcgctcaaatacggtaacagccaatcggaggacccattggattggacgggcgatgttttatatacggaagagcaggcgcaacgtttgcatgacagatacaaaagcggtacttaccgtatcattaaaacaaaaaataccactttaattggctaattaactatttacgtcttttaaattaagcatgcgcacagtgttacccaccagaaaagaagaaatggagaaggaaaagacaggcccagccaaatttgagcaaatggaccaaatttccaattgctattcgtttcaacagaacatgtatgtatatcaaaaagaaaaatttacagaattagtttactaattttcagtgggcgagccgactccacctcaatttattgacgctgtcgaacaagggataaaattcatcatgttggtgaattttgcatgttaaagttaagtgataaaagtggcttctaagggacaagacttgcctaaaatttaccacggatctgagccatgggccggaggaaggcatcgaaattaacaacgaaactggtaactactgtggtctttcttggattggacgacgcacttgggaaaaatggcaaataatttccatttcatgtaccgatgttagtttgagttttttttcttgcttgtattttttaaatttattcattccagccaggaactgtttgccatgagtttttacatgcgattggcctcaatcatgagcaacagcgggatgatgcgcgtaaatacagcaaactgaatccagaagaacggaatgtagttttaaaaattattaatttatggacatataataattaaagcaatggaatgaggcatatgataaaacggataattatgaccttccctacgattttttctccataatgcattatcctgctacgaaaaaaaatgggttggtaaattttggttaatttgaaataaaattcgattttaattattttaattaagagggaaaagttattgactttcattttagctattacgacatgattgcattga

SEQ ID NO: 16634 - DNA, 3012 bp, Heterodera glycines
  unsure (1)..(3012): unsure at all n locations
agatgaaaaattttcgctattagtttatttattggtcgatttatgaaatcattggcttcataatataaataaattaaataattaattgctataaaagtataaattccacttattggagaatgttatttagtttttgaattttactcaatttcaattaaatttcactttccactaatgattcaagtgaattaatccgttttttgttttatggcacggcatatcccattgcgtgtttcccattttttttttcaattttggtgccaacgctgaagcactttaattaattcgtgggtaaaaggaaatgaatgctccgttaaatgagaattaataatttaaatgaatgacaaaaataattaatatcttgtaaaataatggaaatattattacaaaaaataaccaaatgaattcgcagaaatggattttccatttctagtaaacaatccgttttaattacccaaaactgctaatgacgtgcttaaagtaccacaatttgttaactatttctttataattatttgcaaaaaaaatgtttccaaaaactacattttcattccttttggctttctgaattgtgccatttttatttttattttttaatctacattattttaattaggtataaatgataattataattaatattttaatgtgccaatttggaatgtataaataattttatattaagaatccaataaattttcctgcttccaacccacataaaagtaaaataatttatattgattttaatagaaaacatgtattttaaaaaggctctacccgtatttcgtaaacaaaaactcaggaaaaccaaggcccaggaaaacccaggatgaaaaaaattcctgaactatggtccgtaaaacccaggacgggatcaatgaccctcgtttatttctagttttaaagcctgcacccgaattttgtatagaaaaattcaggtaaatccagtcacagtaaaaagtcagggtgccaaaaaaatcatgaacttcacgaattttttgccaaatattttttgcgtaaaaaacaaactcgatgtttatctggcatatggcaacaggaaatttgtcgtagtgatctgtgtcaattaaaaaggtgtgtaatttaacttcattatgtaatttgggaacaattaattaattgcatgctaattgttacaaaatgccaaactcggccctttcaataaaaaaagataatattttccgtcaaaaaaaaagatcaattatgaagcaaataatgttaaattttttattaaaaaataatcaatcaaaaatggagctctcattaatcgcgaaatatggcaaattataggaatattagttataatatatattttttatttatattttatatgtcataaataaaaatattttaataaaataaatatcatcgtttttacataatatttttatttttatttctgatttagaagataatccatgaaattgactcataataataataataattttaggcaaagtatcattacaagaatgaaattgtgccaaatattcattttaattatatttttgatcgtcctaattaatattaattatgttggatcagaaaagaaaaaattgcgacaaaaaacatttgatgaaatatttggagaaaaatgggaagaaaaagaagaaaatcaacgaaatgaactcaaaaaacgagaaataattagaacattcaacaaaataaaagagaaaataaagcaaaaagggagaaaatattcaacaaaagaatgggctaaaattaactcaaaaatagcgaagaaattggggacaaatcgccaatatatttataaatggatcaaagaatttggtcttcaaaaaaagaaatgctacaaattaagaactgatgaagaaaaaactgaaattgtgcaaaaatttattgaaatgaaaaatagatataagcaaaaaagaaagttttcagaaaaagaatggaaacaaaattatgccgaaatttgtaagaaaattggagttggctatggcacaattaaaaaatggaagaaacaatttggaattcactgtataataacggagaaagaaaaaaatggaaaaaatgaatatttattggcaaacaaaaatagaaaatccgaaaatgagtgagaaagaaattgcaaagatgttgaaaattgatagaaatagtataagtaattggaagaaacaagttgagatggaataatggacgattattaattcggaaaaatttaaaaaaattttaataggcctatttccgataaagttactcacattttacaatttatatatgtcgatttgttagaaggttataataaaataatatttagcgccatttttttaattatatttattatgaataattataatttttaattttttgaaattgatatttttattttttcgatattcaaaaacaaaagattataaaacaacaaaagcaaaaaaaaaaaatttttgaatttcataatttttgtcataatgtcacttttatgagaattttttaatccaggaaaaatcgtaccaatttatataaaaatttattaatatttaatttttgcaaaaatacgataatttaaaaaaaataaacttaataacaaattcgatggatttaagaaaattaaatttattgaggtttttttggccattacttttttgtttctgagataaattttttgaaattttgaagacgaataggcactgtcaaacgctttaaaaatcctgccaagtttatttaattcgtatgacaaataaaaatgtgtatagcatttggcgccaaatgggatggacggttcccccaaattgtttgtattcctaatgagcgttttgtcccagttttgcaccgcttagcatcatttgctaatatgcctttaatccatttaatttttgcccatatcgaaatcttaatctcgacgnaagaaattcctgnatgtcctcgggcacatggtcagtcttaatcagccactaatacgntattgactgtanaaggtgccagaaactgatttatgatatttctcgagctcatggctaatttcagaacccatca

SEQ ID NO: 16635 - DNA, 1216 bp, Heterodera glycines
gagtgaagcggaattgccgagcgtgcgacggctactgaaaaagtatcatagtgcaccgccgggaagtgttgagtcggagcgactattcactgcgcaggatttattttgaatgatctacgacaaaacctatcgcatgaaaatctcgaagagcttatttgtcttcatcataatgttatcctttacaattttgattattgattagactggaaatttttttgaattatctggaactccttgcaattcccccccccccattcagtcttcccaaatttgtatgcatcggaattttaattaattttttatataagaaaaaataaaaaaaagtgtaaaaaatggtttaaaaaataggaaaaaaatgcgcgaccgcgatccgcgattcgcggtaatttttttgcgcgatccgcgatccgcgaccgcggcaaattgaatccgcgatgcgcgatccgcgaccgcgggatttttctgtgcgcgctccacccctgatgtagactctttcagaaaataatttaatatttaaagcaaaaaatatttgtcgtttggatattttatttaatattgcaataattttttttaaaatttcattaaaatagtatctatttcattcaaatattcatttattaattatcacctataattatgaattagtatcaattaattcaaaataaacatttggaaccatgaaaaataaataatttataattatggaaaaaaatttatgttaaaaattcattggttatttatttcttattaaaaattaatagaaaaactagcttaatcaaaaatattatttatatttccaattaagcaatattttttattttacaggaaatcaattgaaaggcgattttaacatcaataaatagccaaaataataatcaaaaattatattttacaagaaaaaataaaatttattatttttttaatttgtgaagaagatgaaattccgcctaatattcattccaattttattttttgtgattgaaatcaatcaaattaaaatagaaaataaaaaactaccgcaaaaatcatttgatgaaatatttggagaaaaatgggaagaaaaagaaggaaaacaacgaaatgaactcaaaaaaagagaaataattgaaaaatattataaaataaaagagaaaataaaggaaaaaggaagaaaatatccaagaaaagaatggaataaaataaacacgaaaatagcgaagaaattggggacaaatcg

SEQ ID NO: 16636 - DNA, 1098 bp, Heterodera glycines
  unsure (1)..(1098): unsure at all n locations
ggtgggtggacaaagttntaatataaaatatgctntaaaaaataattttcaataatttatttctttaggaagagcataaagaatttgcaaatgttacgaaaacttatttcgcttctcttcatgcatttgttcttttgacggacctaaattatgaagagttcgcccttaaattacatttccaaattcaaaacagccaagaaaagtttgctgaatattacacgtaaggcattgtttttgtgcccttttcaatggctttctcagaaacctaaaatcaaaatgtgacaattggaccatcgacaaatggcaaaataaaatggagagaattggcgaaaaaattgtggataaaagtagcaaagaaaaatgcagagaattcgctgtcaaattggacgaacaacggaatcggagccaaaacgaacagtcggaaaacatcgaaccgcccaaacaaagtttgttcacaaagagacgaattggtattaaaacgggacaaattttaatacggattgtaagagttggaaacagatttaacgatgactttttcagcgtcctttcatcgcacctcgtttaaacgatcggtaaaaacttccaaaatatttgctgatcagcgaatcctccgaaatcgcctcatcagcccactcgacgcccaattccgtgctgaactgttccaatttctggactcgcttttcctgcccaatttgttgccctttcccaataaattcgttgctggcccaggcgacttggcccttttggacccttctctgtccgtcgaattcgaccgttgtttttctgattgtgaacaatccgatgagattaaacaattggacattgtcaatgtctatcagttgctcgtctcccatgattccctttattacacttttcctctttcgactctccaagaagccttttgtctattggctaaaccaattgagggtttggagaaagaagcacgctttttgtctgcaattgctcaggcaattagagtttttaatctgcccaacaaatgccattttcagttggaacacatcggagttgtcaaatcgctgcccaatgattttgtccgccttatttatttgattcgtgctatacttaaatgagaggaaa

SEQ ID NO: 16637 - DNA, 1068 bp, Heterodera glycines
tcgcttggattgcctatcggtagcaaataccacaaaagtgttttatgttatttgttttatttgcgtatttaattgtaaaacaaaagatcaagggacgagactgaatttgccaaggaagtggcgatttctgttgctgaaggagaaggggacaaaaagacggactgaagagagagagaagcggaaaagcggcacaattcaatcaaaggtaaagccattggtgggaaggggaaaggctttttcacgatcccatacccaaaagaatttggagacatttttcccctttttttgccttcaattttcactgtacgctttttgtctgtttaaaattcttttcggccagtcgccaacagttcgaaggtgagggaggacagagccatccgacagccaatccaacggacgcttctcctccgcccccgcccaatcacttcacccatttattctcattacagcaatttgtgtgtgtcttccttttttccaaatttcctatagaaattaacgtcttcacagatcagataatccctgttttttgttgcactttcattttatggcataaattctgtcgtttttttaatttgattttcgctgttattcgttttaacgagattttatttcatttttgttcccattatgctaatatcttttgaactttcgtttaatgatggaagaaatcattccaaatctgagagatccgttggtgaaaaatcggatgaaaagtctgtttgcttacagttttctgattttgtctgtccctctcggctcaatgtttctgttgaaaaattgcgtcttcgaatgtgggtgttttcgggacccaaaaaatgccaaattaattgtgcaactttcagccattttcggttggcattcgcgcgactcaatgctttattcggcaattgttgccgttgtgatggttcacctggtgctgttcgtttggatacggacgacttgggaagacgggaaaccgtccgaaaagattgactgactgatcattgatcacttgagggagggaggaaatttccaatgtaaataaacaaaaagtaaatgaacagcaataaaaatctaaaattaattcca

SEQ ID NO: 16638 - DNA, 3517 bp, Heterodera glycines
  unsure (1)..(3517): unsure at all n locations
aaaaaatattctttcttttgattactaaatcaaaaagaatttccgatntaaaattgtgtggaaattggcccaatttttgacaatcattttccccttccctgcgccaaatttttggcaacgaaaaattaaaaactcaaaaaaatatttaactataatttgcttcactactttcccaaacatctcaaaattcccaaaacaataataaaatttattttacttcccttttaaatgcattgtcaaaaataaattccatttttttgatttaactaattaaaaacaatttccgatttaaaattgtctaaagttggcccaatttttacacgcattgccctcccccgcaccgcccaaataattattggatttaatgttgtcgtgttttggcgatgcgctcgctgtgcacatcatttatgttggtggcgccgctgcgtacatcattaacggaataatcattgtccaccacaatcaaaatttgtgttgcccatttgagcgccgttcccggcggtgaaaaggcacgggactgaaacggacagtgctggttcagcagaaaagccatttcagcactatcaactgttaaaatggggcagttcaatttggccatagctaatcccgtacaaatttatgtcccacactaaaacgccgatggccatggacgtagagcttagtaataaaatgtgcccgcgctgaaacggcactatgctaaaaaggacacggtctcagttagtaatatggtaaataaaattggcccatgccaaaatagccataggctaattgcgtacaaaaatgggtcccattgtgaaagtgcccgaggccccgtaataaaatgggcctcgtgctgaagcggaactgcaccaaaatggtggacattgtctcacgtactaatatggtctattctaaactggcccttgccagaatagcttaaccgctaatctcgtcccgtacaaaattacaaaattggcccatgccaaaattgatctatagctaatcctcatcccgtacaaaattggcccgcgctgaaatggctcctcaaaaatcaaacagaaaataaattatgcgtacgtcgacggcggtgtgttgctctgatcagcccccttttacaaaaccaattcataaatattaaaataatgttaatacacacccaaattattggcggaccgtccgtccgtcgtcgccgggcggggtttatcagcagcagcccattttgcccccatctcatcaacatcatccccaaaaccaatcacaaacatttttttgtttctgtcatcagtcgcccccccccccccaggggcgataggccacggaaaattaaaatgtaaaatggcttattgatcggcgctttgtgtttgatgataggtgatgatttaattggcgagaaaaataaccgaaatttttttttgttgatgaaaattctttttaaatgttcatagatctttttcatttaaatcatttaaatgattttaatttcttttctagaaatattttaaataaattaatgatttttttaatgagagtaatttaagcctttttcattagatcatttaaattgtgctaaaataaatgtttaattcaattaattagaacttttggattattttaatggagtttttatcagtaaatttttctggaacttttcttttttgtcagattatttcttttatgtgaatttttgtttggaaagaaaattccttgcgattcactgaatgcttggaatttctactcatatttcaacagaattgatcttcattttcttattaatgctttttaaaagacggatttttttttgttttgaaatttttaatttcttttaattaatttccgtttttaatcaaatgttttaaatggaaaaatttatttaaatgaattatatacctaattatttgtaaaaatttatttcatttttatatattatttcccaaaaattttacgccaattttcgtaccaattccccgcccccctcccatgcccatttgggggtattatcttttcggaggcaaatttgggcgaaaatccgcccaaatcggcggagagttagttgattgtcatcggctaagcattttggatggtcatttgtggtcattttctaacttttttcttattccaataactgaaaaagtatagtttaattattttaaatttacgcaattaaattttcaaaatttttggcgttttcaacgagttacgaatttacgtttttaagcaattttaatgaaaacgaaaatctggaaagcctaggagaaattttagattccgaattttgtacaataaaaataattaaaaaaatatttccacttttcattaaattcccatttttaaaaaattataattaaaaatgaaaacgaaaatttttattgtaaaattagatttttttgaaaatttagcatagtaaaaacagaaaatgttaaaatttcaaaggtctgcatcaaaaaatacgaccaccgattccccgacaatttcacgtcgatcattgcccgaccgacggagttcatttgtgtcaagtcaggtaatgaaataataatgaattgcctaattaaaatactaattaattttgttttcccaataagcttggccacagccgtgccgttgttgtgattcggaaaatcagtgtcccattggcatggcctgtcgaagaatatttcagtgccagaagaggtgattgaaaataattgaatttaaatgtttaaacatgtttttatccttttaaaatccaaataaactcaaaatatgaaaaaaattgtaagaaaaattccataaacattttttaaaataaaaattaaatttaaaaataaaataaaaattaaatttaaaaataaaattatgaatttttagattggagagaattctccttgcaattggcattccgcacttcaaatggaaaggaatatttctcaaaatcaattgagaaaattaacccgtaattttaatttattaattttcaaataaatatttcttttttaaatttagcacttttactgacgtcaattttcccgatgaatttgttttcccaaaccaaggccatgactttgtcattgaagtgagttttaaattaaaaaaatataaatttatttaaataatttaaattaatttatttgcagttaaccgtttactgcaaaaggaccgacaaatcgaggccaaactcatcgctggtacacactttttcgcgctcacttggccgttcgcttggacagtcgtggaaaaagtattttatccgtatttccgaaaataaatccccagggggctttatttttcaacaaccctcagaaggatggttttatttcagcaggggtttagaggggggcattaatttaggggcgggaatgtgtttatttttcaaaccccctaaaaaggggggggggctctaatttagggtggtaaggcaataatttaggggatctatttttcaattcagaaatactgtataataaatggaaattgataaagttctataaattattttaatatatatttattaattaaataatggagaaatttatttcattaagatgatttgtctgttcttaat

SEQ ID NO: 16639 - DNA, 1505 bp, Heterodera glycines
  unsure (1)..(1505): unsure at all n locations
tcatagtcggttggttggactttgcatttgttcattccttncctttgtttttctgttcctttgtctgtccgttgctgaacccattcggtgtacgcgtacatcggtccgtccaaaagaagagcaccgacaataaatgcaccaatggaaaggccaaacccgcaaacagtgaagccaatcgaattgggaagacgaaggatttttggcaaagaagacactgaaaagccgagtgattggaaagcgaattctaattgtaagtacgcacaaattccgccggcagccaaagtgcccaatgccacgggcgcaccgtaagaagccattttaaagtgcagcatcagttcattacggcgccgttgttgtaactaataaatagggctcggaattacattgaccaaaaatcgtaaaaaacctctaaatggctgattaaggtttaaaaaacgtttagaaaaagacaactataaaattgtttgtaatgtttttgttccccggcctaatcttgaacttacaatcaaatataaaatattacaaatatgtacattcaccatttgttctgcaatttttgtttcttttgattcaaaggcgttggcattgaaacgatttcgaagccaccgattgttaaaaatatgaaatgttgtcgaagtgacgaggccaaaacccagcggaatccccttccaattcatcagaaaacgatcagtaaccgaagccatttctaaatatatacacataaatggaagcaaagcaatgtaaaaaatgtaaagcaaaataaatgaaaaacagcaaattttaatgtgaaatttaaagtaacaatggaaaattaataatatttatccataaaaaatggagacagaaaatgtaaatacataattaaatatttgtcatcggtcggaaatttctttggcgttgtttcagctgctgattgttggttcttttgtcaaccgcgcatttatggccacagcccggcacaggacattcgtcccactgggcgaaccattctcgaatgtgttccaaatggccaccatggccacagccactgcacgtcgtccaaagtccgcgcacccgagtctcgctgaaatgccaattttttttttttgaaaatgtcaaccagttgcctaactcaccaaatacaacagttatagtcgtgaagtcgttggcacgatttgcaccggggactcgctcggagtgctgcgtttttgcaatgcgtacaccaaactttcataaaagtgctctgaatttgaatttagaagcctaataagcactggtgaaagttttataacaattcgatttacttcattacttagctgactaatctttggacgagaacagaatttgacgaaaagggcagcgacacgccacagacgaagcctttgaagcagttcttaacagtttgattttgataacagattcgcaatgctcataaaatttcaccagatangtcatgaaccanagttcaatttgcgattcactggcaagccccgactcgaccacgcgttctcccataagcatacaaa

SEQ ID NO: 16640 - DNA, 1773 bp, Heterodera glycines
cctgaaaacataacaaaattcataaatttgtggatttgtatgaggttttcattttggattagaaatctttttaatatttattggtaaataacacacgaccattgcgcaacagtggtcaagcagtgcctttagagaagggatggggtcgaagaagagcagtgcggcgctgctgcacttttgcaaagtcttcggggaggaccgtcccatccgatcgcctgcaaatgcaaatttcgagtcaaatcagtccgatcgcttgctgccgatcactttcacttagttgttcctcatccaaagaaccttcactttcatcttccgcctcatctccttccccatttccttctttgctgctttgagttccgtcactttcgaaggccgacgacgagtcgtaagggggcaatgaggaggcgaaagagccattcaaaagagggacagtaaaaatttgggggttttggctgctcacccccgaacttttgctggtcattccctcgtccttttccccgtcattttcattcagcacatcgtcgcttgtacggtttcgtcgttttctgctcctttgtttgtgccgcatgcgaagtgtttctgctgttaatgttccatcggagaccaacttgcgtcttcggttgagagatgtgccgtgaaagcgaggtgcaaaagcctcctctctcagctgcgacaaatccacaatgctggagcttacaatcgaactgcacaaaataaacacacaaatccaaaattaacagtgatatgaaaacgtaccgccgaccgatggaatgcgtcgcatccttttccaattgctgatcgccaaactcagtgataccgcccaaattaagctcatcagcaccgaaaaaaggatttgaggcaccgaacccaggggctttgccatggtgttgatgagcaacagcagaaagggagtcggaaatgagcagtggccgatggacggtggggtaaccctggcagaaaattgggataagcaaaaagccaagggatggaaggggcgagcggactttgtccaacaatggcagggcgaccgttcggccatcggctgacagagagtgtccgctgccgtgcataaggcgactccgatgactgaaccgatggtagccgcccttttgatgatctgtaaaaatcaacttttgcttttccctttcctaaattattttaccatttccaagcaaaaaattagacgacaacgaccgtcggaagcgatggaagtgatcggtcgcggccgcactgccggcgacacttttcagcgacgatttgacagcggatgaaaaatggggccgaactgtgacaaattcgttctgagcacagagaagggcgatcactcgccatgtgtaagcaaggcgacttctgacaatgcgaaaccgtttcaaagtttaatcaaattgaaacaccggaagatcgtctcagcaactttggcattgtgttcacagagttgttcgacagtgcctccgacaattttgtaactttaaactttgcattaagcaattatttatttgtaatttttacttctccgcgaaatatgacacggcacgggaagtcatcaaaaaagggtcggaagggaaagcgcagaacaaattactcggcactttacgtcggaacgggtccacaactgaactgctctttcgaagatcagacggaactgaaaaaacataccaaaacgtaacaatttatgaactttttaatgaccagcgacggtaatttcatcgaacggcgaatttgagtccaagaaagactgaattggcgtagagaatgggatggtgggcatcgtca

SEQ ID NO: 16641 - DNA, 740 bp, Heterodera glycines
  unsure (1)..(740): unsure at all n locations
tctttttatgctttttccctgcttaaattatcncattgagctttaaaaatttattttaataccttcaaataaataatttacatcttttaggtgtgaaattattctccaaaacctttggtgtttatttatttgaatttcgttctttgataatttgggcttcgtttcggactttgactttgtgtatgtattaatccgacatttgccaactttgccggtttgctgaaggtttcaagcccgacccggccctggaagtgacgaccagtaaagagaggcttaatgtatcttcgtcctcatccatttccttcctttttcttagtacttcttccactcctttctttctctcgccttctcacagactcttctctcctgctgttcatcttcctcgtctcgttctgttcctctaacttttttctcctccctgctcctcttcctctctttcccctcttctttttcctccttctcttcctctttcttcgtctccttttccctccatatcattttgttctctcttccctcctcctcctcatcatcctcctctcctctttctctttcttttatcttcctttccatccacgtccatttcccctccttttcgccttcgcctcctcttccgccaatgtttgcttccgtctcctcctcctcctcctcctcctctttcgtatttggttttcctacccatccgtcctgcagcggcaacagcagacgctcgtaaataacgcccaaacggggggggggggggg

SEQ ID NO: 16642 - DNA, 1653 bp, Heterodera glycines
ggagggagggggcagctgaaggattttggaaggccaaattccaattttatgggtatttattggacagaaaacgaagacagaagaagcagaggaggaggagaagaatcagtccattggaaacgcagcgaaaggcgccgcggcatttgagggaaaggcaaacgcaaagggacagcaaaaccaaggcagaaacagcccaaattggaagcggaaaagaaggcctcaggcaagcaatattttgggccctgtacgattggatagttagtcaccattgaaaagagagtctttcccatctccctcaatccgaccgctcggtgattttatcggcacaaaaactattgaactgagaggagggtattatgataagcatgcacattcttgggtgtgctggctttgagtcttggtaaggctggttttcaatccgggttctgacctggtccatctatctaacaaattctgttcctgatcggggcaaattgagcatggcttcttctctcccccccttcctctatttgccttgcataaatttcaacgtaattttgaattttcgatccatgaaagcgacaggacaaaggattgctgttaaattttatcctgcttaattactttctgtccgtttccgattcctttgtcatggctctctcttttcccaaagttttcagcttatactaaaaactaaaagatttgaaaaacgacaaccgctaaaagggccgaaagctgcggaggcgaagcgaattatgctcgagagtcttgtgcttaagttgaagaatgtcttggaagtgatttgactctttccgatcgttgttgcttctaatttagctgttgattttggctctagtgcactttaggcgtccaatgttcagtttctttggccaaactgttttcttacttggccaatgtttacattcttgatatcaaacgaaagcttaaagtcccgggaattcataaatataagaaaagagcaaatattggcaattaaaaaatattaaaaccagaaaacacgaaacgcagctttttcgagtatattcaagaacaattttttgtctgttgtttttagtccaaaatttaggtatacaaaaaattcagacttttaagcttccgtttgataccaagaatgtagggattgattgaacaagaaaaaattatggctaaagaaacttaatattggacgcctcaagtgcactagagccttgatttctgcctgtttctgtcggtttgattttgctgcgttttcggccgatcgacgaatttggcaaaatttgccgattgaaaaacaaaaggcaaagaagaaaaaagatggggcaagtgccattatccgctttttcttcttcttttgctgctgctgatgttatcagtgagtggcgtggcattttccgaccaaaaaaagtgcataaataaaaaagcgaaaagggcaaaaagaaaaaagaaaattaaataatgaaagatatgtatattaaatatcttttgcaacctaaatgatccgagaaatgcgtggtaatggagaatatcaattggcgcaagcgtctcgcgaaggctggtgggaggggagggaagggaggatctccggtacgggcagaaatgtcggaggcgactggagggagggaatggggaggggaagcgaactgaactgaacacaaaggaagcgccgacacacaa

SEQ ID NO: 16643 - DNA, 3889 bp, Heterodera glycines
aaaaaaaaaattttttttttcattttacggattacgtattacggattacgccaaattacggccttttttgacctccgtaatgacggattacggatggccgtaacttaaaaaagtgccgtaattacggattacggatttccgtaattgaaaatcagttacgtccagccctgctgatgggaagggacggggtcattttgccgtccatatttaaaatgtcataattttttcatataaaaaatttaaattttttttcaaattttacagtttagagtttgtcaagcatttttgaatgatacccagccaaatcaataagccatcgggagaataattaatgactagggatgtcaaaaatatgtataaaaagtggtcaaaattcagggttcaattacaaatgctaaaatttaatttagaattccatgtttatttaaattaatttcacactttgttcttatgttacaacaatgacagatgaattgaaaatgactctaaatgtggcgtgattccataaatcagtgcgcatccaattagtgaccagctaggattaacatctttgaaggccaaataaaactgcaaaaataaaatgtcaaaattatggctgtaattaatattttcattcataaaaatagttcgaaaatttattgttattattttatcagtgcttacagtgttatctgttgtgaattttgtaatgcaatatttcagctaaattttcttttttgagaaagcttttatttaaataaatgatttaatcctgggattaaacatagaaagtacatcatatgataaaaaactacttgcctcaaaaaattcaaaacaaatgaaaaatttacccaattaaccaatggaaaatcttttgtgacgtggacaaatacttcctgtgaatgagaccaaaaattgtaagtagaagtcacacgaacttttgaaatatatccaagaactttttgtaacattaacaaaaacgcttgcactttaattctttaatatttaaattcaaacaatggcgcttgttggttggcctcggttttgtatatgtgttgataaaagtaaaattcttaagaacatcattctgaattccgaaccctagacccgaactcgaagaaaaagtcgaaagtcaaaattttcgaaattagcatattactgaaacaaactgaaagtcatcaaccatgtaataaaagatcatttaggccgtttttggatcaaaaatgctaaattcgaatatccatgtttttcgtgcctacttagacagggattttttccgatatgcctatcgtctttctcattttccttctcgtcctccttaaaagattatgtctaaaaatgacttttttgtgattaagagccaatattttaaagaaaatttaaaattttttgttagcgtcgaatggttttttgagaaaaataatccgtttccagaaattttttgtttctaatatgaatatttaaataaaacaatcagttcataaattttctttataaaaatttagaaccaaaaagccgcgagtcgctgtcgcgcagtaaaaaaacccgtggtcgcgggtcgcgcatcacgaatcaagtatccgttgcggtcgcgctccacccctgatgctcccagcccttcgccttcgaccagataatgtaaaaattggtaaaaaaataaagctgattgtttctttttaaatttcattaaaaattacatttatttttttgaataactttatttttcgattagttttatcaaaaaaatttattatattcaggataatccttataaggatatattttgattcaattttaatcaaaaaataaaataatatatattagatttaagaatttagaaaattacttcttcttaattaatacattttatttcattttacttatgcttattaaaggaaaaaagttttgagaaaaaaactagtaacaagcattttaaaaaattacttttttcaattagtcaatgtgccggttattatctactacaattttttgtttacttggcaaaatgaatgtcatgaaaaaatcaaaaaaataaatcatttcaaatcggattaaaataggatggcggcacatgtgccaatggttgccgccaaaaacaaaaaaaaaaccccaacaacaccagctaaaagccaaataatccatcaagtcaaattgagacattttggccattataggcattcgtgccactcaaccacacaagccagcgtaaagttttaaccgaaacaaaaataaataacaaatataaaataacaaatatagagttacgtaataaaaaggcggaaattcgtcaatgaagacgaattcttaaaatttacgccattttctttagacaaatctaaccgccctgttcccgacagaaattgtacttatattccacacattaactaaaaaaatattttgccccagcggatggcacggatttataagacaatgtcctttaagtgcacatataaaaggaagataaaaacgattttgccgcatgcagtttaaaaatattaaaatttattttatatttaaatacaattaattaataaattcatgtagtgctgattaatcagaatttattggatttcttaattaatttattaccatgagagtgaattagtgctgagtgctgtgttaaaaagtttatttatttcaatttattatcaaaatctatttcaatcagcattttaagtttaccaattattaacaaatattaaaaaaaactttctgaatcacttatatttttttttcaaatttttccattttctttttcttcaacgtcactttttctttgccaaaaacatgaacaaggattttttgttcaaaaatattcccaagaaatttgtgacataatgccaaaaaaatatgaaatgaatgccaaaataattccttccattttcatgcatggcgtaatccgaattcccatttcgtgtcaccccgcgtgccgacgatgagtgctggtgggttggtgagaagggcatgatgctaaaaagggcacaaaacctaattgagctgaagaccgtgaaaaattgagttggcattatgtgccaaattttgcggaatttttgtttccttccgggtttgttttcagcatttttttagctgattttatgtttaaggattttttggacttctgaatttatttttattttttcacttgttttttctgccttcataattggaatatttcaccataattttttgtaaaaacaaattttcgaattatgaaatttaattgattttttaataatttaccaccaaaaaaaagttttgtgcaaactttcaaacattgttgtatcattcgtaaataaactatttttgctttatttatattatgcttaacgcccacgtattctctctctctctcattttttgctttttatggcccgaggcgctaaactaaaattggacaaatattctcttttctttttcaaggacacttgcccaaaaatgcggtttaacgttttgtgtgaaatattaaacgagctttttgtgtgggcgccgtgccattgacggagggcattcatgcgcaaaaactaatcaagccaatttgtagggggaaaagcggacgaccaaaagcgaaatgcataattctgtcctatggacttttgtgtagttcgcagagaaagtccctgcacatttccgacttgaccaacatcagccaatgaatggatggccacctgccacgaggaaataaattattaattagctaatttgattacgtgccactatttggttcaaatatttttgaaaattagataatttattaattttaaagagcattttgcgagtgatattatattctattgtaaaatttaacatattcccatcattttcttatcattaatgctaattgattcgtaatatattaattagatcgcaatttcacatacgatgactgtgtaaaaagtgtaacaattagaaa

SEQ ID NO: 16644 - DNA, 2957 bp, Heterodera glycines
  unsure (1)..(2957): unsure at all n locations
agtgataatgatgagaaacgcctaaancttatgaagcaatcaataaataaatcctctatcatattaaaaaatatatttacatttatcaaataacattctgctcatatatttgaaaaagtttctataatttaatatataataagttgaacaaaaataatatggtggcacaataatttccgtcacagaattagcaaaagcatttcgtgtcgaatacgtggaacggcgcagaatactaggcatgttccaacctttttgtaggacgacaatattaatttaaaaaagatttgattaaaacaaatatttattaatttaaatgataatcgttttatatattcttattaattacttgttatttttaatgattttttatatttctcatcatcaattatattaattaatttattttctctaattctttataaaaaatgatgaataaatttaaaaaatgattggatttaaaaaaaaattatatattttatacgcatttaactgaccgcgagaagaaaatattaaagaaaaaaaattctttcaaatttagttttcttttataattttctctttgatttatttgcattttaagaatacgatgggacataaataaaatgctattatataataaaaagaaaaatttattaaataaatacataaattaaaaacagaaaatttcaggtttattattcattattctttaatttcaaaaaattagcaaacattatttttaatggattggaaaaaagttaaagagtaattagtattttctattataaataataaaaaaattcaacaaaattagggaatcattcgctaaaaaaaaaattatgaaaatattgatataaaaagcgaaaaaaagcaggctcaaaagaatggttataaagttataagtttaaataaaatttatgaaaaaaagttttaaaaaatagaaacgaaaattaaccggcacaaaacctacgaattccttagagcggaaaacacgaagaaaacctctagaaataaaaaaaattaaaaatgttttctttttgagtaaacatttatttttaaattatgaataagaaaaataataaataatcagaaaaataaatgcaattttattaaaacaataaatatattaataataaataaatgataaatcattttgccaaaaactaaaatattttttattaatctgttattattctaaccaaatattttgctttaaattaaagttttttccataaaagtttttattcgttacctattgtaagcagggctgggcgtaattacggattcggtttatggattatgggttgcggatttttgcgatttcatgtaacttttaacattaaagaaaaatttagaaaatgcagcattttgttttaagtgctaaaaagttgcattaaatcgaattttttttatctttttaatttgcagattaatttcttcatatacagcaaaaaaattttatcataaagtgacaaaatttgaggctttttgaatttcgttttccctgtaaatatttttttttcaaaaaataaataagacgggcttttcttttcatcataaattataagtatatgaatttttaaaaaagttgcgtttccatcccgttctgcttcccacacacacaaaaaatgccacattttctaaaagccctgtatcattcgccactgacaccttaaaataagatgtcaccttcttctcaaccgtgcaagaacattcccctttacgactgaagtacatgcctaaacaaacggataaatttttaatttataatgcaaaccctgtattccgcatattttgaaatttctaaaaaaatagtaaattaaaattgtatcaatagtttggtcaaaaccttcactttaaaaagaactttgcatttaatatttattataaaaaatcatgagaataatgcttgtaatttaaaaattcttccagtttattctcagcaatcacacggcgtgaagtgtcgaaaagtgaaggcggaagtctatagagtaggtcccatgatcgaaccaaatctctaaaaaattttgaaattttgttttcttttttgtttcctcctatctacacgtttgttgtcaattaaaaaatcaacagggttcaaaagtagctctctgccccaggctttgcccattgctcttagcataggcgtacctttttccgagtcgtaaaaatcttaaatttctcacaatcttacagaaaaagaagaaagagatgcggcgatatgttgcaataaatcagaaaagcggctttcatagtctctatgtacagcaattttataatttgatgactcaattaacaacgcctccacttttttctggttttcggccagaaaaactcttccttttcgagagccttctcgaaatatttttggaacgagaacatcacatcttaactaaaaaattaataaagatcaaattcgaatcaataattattgaatgaacaaaaaattaaaaaaagaaaaaatgaaaaattatttgacaggaaaagaataagtcaataattaaagatcggattaggtgatccattgatcccgatccgtggattgtaatccttttttggggagttttgtcgtctttttttggttatggtaaatgaattttttggagcataaattttttgaagaatgaattaaaaaagtggtttggatcacatatagagcaagcgagtctataaacatgaaaaataaaaaataaataaataaaataagtaaacagaaaatcgaagtgattaatcaattctactgcataattaatttgttcttacaaattagcgttagaaattgatatggactaaaaagcccgaaacatggactaagaagctcaaaaatgacctaattttaaatttaaaaatgcataattttattgtgttcagttgtataaaaaacacctccaagtttaaaaatttcaaaaaaattacattaaaaaaagaagagctctacaaaaaataatgaaaatatttattaaaaaagataaatgacg

SEQ ID NO: 16645 - DNA, 3047 bp, Heterodera glycines
  unsure (1)..(3047): unsure at all n locations
gtacgacggcttcaggcctggtggaggattcttngaccgtatgtcgccggtcgcattggaaacaaccagtgttgagcggggcggcgagcgtgggagttcccggagccaagaaaggggcgacagtcggtggtggtggtggtggcacatcgtcaaagcgggcggagaagagattggcgaggcgggcggaggagaaggaaatgaggcaggtgtatgccgcacatttggcaaagaagaaaaggagagcggaggagaaaggtgtgttgacggattcgtgcttatgagtttgactctttgaacctaaagaaaccggcacggacccaacggtgactgaacagcagagcagttccggagggggccagcaggtgaatgaaggggaaaagggcgttattgaaaagccgaagtcccgtcgcgggagcattgctgggtgaatgatcatagtgatcaatgccgtgatcatattgatctcaatttgtctttatgactgcttatcatattgataaactttcactcttgtgcttgaatctaccttactcttgctttctttttccgattacattggctcgtttccttatgtacgacttagaatagatctggtcaaccccggggggttcgacaaggcgtcggtgttaggttattgggcaatggcttcggagtaagaagcccggctagtcttaacggataggccgggtttgtctagcggaattgactcatccgctagttaggggcggttggggaggttactccgaaagtcatgctgagatagcctgtgctgtggcgccgaagctatgagaatcttatctcctagccagatcgaaagtgcaatgagacccgtagatatcaaccccgaggtattgaataaatgcccgggagggaccagtagagtgggtacctgctggtcctgggtagggtaagtgatcggtggtttttccgcagaggcggtgctacaccaggtcgaacgccagaaccgtactgcatagaataatatggaaaaagttttgataagcaacccgctcgagctttcaagcgttcataactgtgcatgcgatttaaccccaaaagacctctttaggtctgttggtcccggcacgaatggtcagcgtgggaagggtgtcggtgaacatcggtgccccacaagtgactgtgctggtaaagacccccctcagcgggggttgcaaaaagggaacttaagctgtaaacgttggactcctagtgaagagaaggcagtctttgaagaatggtcgcggttggaggcacaaaccaggctcgatggtagtgcggcccggggtagctgcgccataaataaaagacagtttctcgttcactgggatggcgtgaaagagtcacggtcctcggcagaaggtgtgcctacttaccccgaaaggagtgagagggcatatttcgagaggatcagactcttgcgaaagaagcgcggatgggaatgggattgtgctaatgaccgaatagtcacaggccaacccgaagtaccaggccgcggatcgcgaacgcgagtgatagccgcgaaggctgatttgagtgtaaggagaaagctggtgaaggggaaatgcataaccccgccccaccgagatggtacggaagaccaggagagtgacgacgaggaggttgcaataaccgtacctgtcgacattatccaggtggaagaacccgagtgtacaggtgtaaccgagggccaaataccaggtgaccctacggggaacccggaaaaagaagccgcgggggagccagcacagaggagcgtaccaattagtgggataatcagcgatggtgaacggaagtacctgaaggtacgattttggagtgcctataaaaaggcccaggggtcagtgggaaacagacccgctctaaagatcgaaccgagtaaggtcaaccgtgcccagtgggaagtactggactcctgtgttgctgcggtactcaagaggagggaaacctccaaagggtgccggggttgtatcctccggacattgaacgtcgctgtatatgcggcgggacaagtgctggcggaaggcgaccgggaacgaaggcaagcgatcagacgtcagtcgatggaatggttgcttcgccaaaagtccgagatcagcaacatccgtagacacattggttggattactgatgagttaaaacggaggaggacaggaaagaacccaactttaaggcagttaaggaattttcagtggctccaaaggcgttaccaagtcttagggaaacccgtgagggagactagggacttggaaacccaacgggagaaacttgttgttcgtcttcatatggccctagacagagtgtcggtaactacgcgacgtagcgaacgaactcaacaacgattgttgcctatgcggagaaaactggaggaaccaatgggtgactcaaagttggatcctgcacaggcgcgagagttctgggctggtctaattggaaagcggaaggaattcgagagaattccagagcttgaagattgggcagaagaaacgaagagcaaggtcccaagtgatcaaactttggacgaagaccgaaaagacctatttgcctggaagaaaatactgggaaaagccagaccattgaaagcgccaggaccggatggtgtgcctaacttgctttggaaaaggctaccgtccgcaaaccaagcactttttaagtggttaatgggaattaagcgtaagcaattacgcgttcccaactggttcaccaggggaagggtggtactccttccgaaagggggagatccgatggacccggccaattaccgacccatagcgtgtttaaatacacaatataagctagtaactgggatggtaacggcatggatatcggaccacttgaccaagcactcaattttgccttcggaacagcgagctctggtggctggcacttggggttgtacccatgctatggtgatagacagagtaataacgtcgtatgcgaaggcatccgggatcccgctttatgtaggattcgtggactttngcaaagcgtttgactcangtagtcaaccttggctaagactgcccttaaggtggccagagtccataagc

SEQ ID NO: 16646 - DNA, 2898 bp, Heterodera glycines
aactcttcctgctgatgaaagcagagattgtgtcaaaaaattgacagaataagcatttcaactcactgatgaaaaaagccttggtgttctaaatgaatcattaaaacaattagcgattttttttttaattttgggaaaatttttttaaaaattttaattttttaaataggtcatcatcgtcagccggccccgttgcaattcccgcccaacggtttgccaattcagcccgtatttgtgtcaagaggcaacaacaaccaataccagcaccagcagcagtacaactttggctgtccaagtcggttttgtattgttttgttctctttacaatctgtctgtaaattaaaaaataaaaataaaattttattttaataataattaatctcaacattttaacaaataacggaaatatgcaaattaattaactattaaaaataaatttttggcttttaagataattctgaaaatggggattaatttatttgggaattatttcaagccctttcgaaaattaaattttttttcacaaattttcacctctcaaacttattcaaaaaatgttcaaaattaaaaatatctttgtattatatataattgttgcaaatagatggcatttgttcacgaattggtgcccaactgaacaccttcaacaaccataatgacgacgatacagtaacccagccaccgtgtgctgctcgaaagagttccgacccatgcgccccgcgcattggtacggtaacccgcgttgattaaattacagtattcaaattggatgccattttttttgttgttgaaaattttggcaatttataacagggcattttttaggaaattcatcgattaaaaatcaaattttttgtacaaatttaaggcgaatcaaccgatcgcgaaaagaacaacaatctgtggacagaatggacggaatggacacagtaaaaaaatgcaataaaattataattaaaaacaaataaaaatcaaaattaaaatgtgtttgatttgtcattttttgccagttgttcccgcagttgtggtggaggaaaacagatgaaacgacggtcatgcaaaagtggtgttgatgaccaatgtgttgggccaccaattgaatcgcgtccatgtaatgatgaacaatgccctaccgtaagtgaacttctttgactgtgattacagtatgccataaaaaaaataaatcaattatacaataaattttatagctacaatatgtcatatgcattttcatttcaatttgtttatacataactaactaacaatgcattgtgatactgtatgcttttgtgtttatacgctctggttctttacagtacgcttaataattatattgtaatcaaaaatatggcaaaataatcactcaaaaaataccattggtttagagtttttctttaaaataaaaataattgagcaaataattaagtggtcaaattggggctcgtggactgagtgttcagcgacttgtggcactggcacacaacgaagtgaaattttatttagaatttggtcgagactctcgaacattgaagttcattaattaataaattaatgaaggagtgcgtgagtgcgagtctcctcggcacaatgccaatgctgcaatttgtccaattggctctggtgttgaacatcgtgaatgcgaattacgaagctgtcccgagtggtcccaatgggaaccatggtcggcatgttcaaagagttgcggtgccggtgaatcggtacaacatttattggacgattctgccttgctactcttaaacggcccaataagcttgacccgtcaaagcgtcgaaggctaaattttgaaaaaaaatttttgcaggatcgatcatttttaataggctaaattctcaaacattcaaagaaatataaaataaaatacaatacaatataaaaatcaatttacaaacttttctccctaaaattcatcaaaaatttcgaaaaaaacgctagaaaaatttacaaaatctttttcttgtaattttcttataaaaaaatttctgagattttttgttgaaatttccaagtttgaagaaaaatcggcgggaaatgacggggggggggaatgaagttgcacccagttataatcaattatgtcacaaggttcgtcgtcgacagtgccgtaatgctgcgtcgaaggatgagtgccaaggcggcgacgtggagcgcttgctgtgcaacactcaattatgtccggcatggaccacatggacagagtggtcagcgtgctcaaacagttgtggcaccggtggcacacagtcgcgcaaacggtgggcacaaatgcctgttctgctgggggctcgaaaattttcaagaaacccggaattcaaatttcctgttaattaagataataatgtgaatttgtctcctccccccccttccgtcacccatttttcgaaaaattatttttattttatgtttttaagacaaaaaaaaaaattcttgaaaaatttgggtgtcgcaagaaagaatttctgatcaaaaaaattttccagagaatgtcgttatgctggagagttaagcaacgagtgcacaggcgcggccaaagatgaaaagcaatgcaaacagttggaagcatgtccaagctgggccgaatggggcgaatggtgtgcctatgacgtcactcaaaaaccacaaaaaaaaacaaatttgcctttgcttaaaagcaatcaaaattttaattctcgatatcattcaatagctctaagggttttctatagtcttgcaaaatttcattaagttttaaaaaagttatggcatgaaaacccatgtttatgtgtcctttgggttatacttttttttttttaatttttcgaaattttaaaatttagctgattaaaaaaggttattttaaactttaaaaaggatattaaggactactcaaaatttggttacttt

SEQ ID NO: 16647 - DNA, 805 bp, Heterodera glycines
  unsure (1)..(805): unsure at all n locations
aaaaaatcttagaaanattttcatanaattaaagaaaaaattttttaaagaattttccgcgattttntcacattntacatatgatgagattactaaatttgttcaatttttcttgaagtttcccttatgaaaaaattctaatatttttgtacaatttaaatattaaattgaaaaagtggaagtcattcgccgattgaatgaaatgcaaaatatgcacataaaaagtgaaaaatatgtacatgaatttttccaaattgagtgtataatttttcaaaatttctttaaattcgctaaacgcaaagtaaaactttcaaaaatgactaaaatatggtattaaaatcattttagaagaaaaaaacacgatacagcttaaattttacaaaaaatcaacctgaaaagcaaaatttcgcttttttgcttattttggacataattaatcaatttttaagaaaattttaattagtcaatattttcgacaaaattttgctaaaaaatgtctttttcggaaattttttcggtctttaggggtcaaaaaggccaatttacctgataggggccgttctaataggggtattttgaaaaaatgcccaaacatacacataaaatatgcacaaatatgcacataaatcgcgaaatatgcacaaatatgcatatggaagtacggcctagaagcttctaatcaagctaaaaacatgtttttcatgtgcgtttcagacatcccacacatcccacagtccaggaaaaaaatatgcatatgcatataattctatgccctattaatgaggattgactcaaaaaaattaaa

SEQ ID NO: 16648 - DNA, 1140 bp, Heterodera glycines
tttccaaaaaaatttttaaaatttttttttgaagatggccccaatcgaatagagcatcaaaaacggttggctggaaagtggtgtccctttttccccgaaaaaatctgttaaaaatactaaaattcaaaaacctcaaaaatgatgagggggcctagctcgaaaatttctgaaaatttcagaaattttaaaaaatggacaagatagagctcgccgagctgtacaaaaagttcagcggcgccaacacgctcagcacaatgcccagcgagttattcccaaaaaaccgaaaaaccgaaaaaatggaaaaaaatttttgcgaatttttgcaggccagggctttgatcctagggcctcgcccaagaagaaaaaaatttcccaaacattccaacttagtcgcctcccagcagacgtttttggctccggcttccctgaaaaaagttttggcccaaaaactgcatgcatttttccccaaaaagccatttcagcgccgctggcgctcagttggcctccggaacggaatgcctatagttttcctggatgcgcctcaaaaagttgcttaagcaatgccacactcccgagccccttccgccagcggttcccgagattttagttttagcaatgaaactcactgtttctttagttatatataaactagcgtgtcgcggcgcagtaattgctcggtgtagacagtatacttttggtatatatgggcggacgctgacatgagcgcttcgcgcaaaggacttcgttgctagtgcatgcgcggttttgaaatgaatttatggatgtgataagggattttggtctacaggcatcgcgagtacgcattcataattttctggaggactttcggccgcttcgcggcctcaaagggcgctccgcacttatcttttttcaaaattttaaaggcgacatttgaagcttcgcggcctcagacgggcgcttttgcgtccgtttcacatgcgtggctccccacccttcctgcgatattggacactgatcgcgtgcctttcactgatctgtgccgaaatgaacacaatgtgatttttagcgcctgggaaaggggggggggtcattaagtcggacaaaacaaatcaaaaaatcattagttagcattccatcgattcaaagttaccccacctt

SEQ ID NO: 16649 - DNA, 817 bp, Heterodera glycines
gggaacattcggccgcttcgcggcaaaaggacgggcgcttcgcgcccgttttttaattttttgggggacattcggccgcttcgcggcctcaggacgggcgcttcgcgcccgtcttttaattttgttgtgaacatttggccgcttcgtggcctcagaacgggcgcttcgcgccatttttaatttttttggggacattcggccgcttcgcggcctcaggacgggcgcttcgcgcccgttttttaataaattaaaaaataataaacacggcctgggtccgaacatgccgccccacccctcagaatccccaatcacacagggattctgaggtcttaacgatgtcaaaagtaaaatctgatcacgtattcgtgatcagcggcccaaataacccctaaaatcatatttttggaagatttttggtgaaaaaaattttccactcaaaaatcatggtcacaccccagtggtcccaaattccaaaatcacttttatttctataacttttttcaaaaaagtgataaaaagctaaaataaaatttataaaatagagcaaaaaattgcggattttttgagtatattatttttataaaatacttttttagaagggagttctgaatttttttctgaaaaatcgaatttttccagaaattctggaataacttttttatttaggaagttagaaattccaaataaatttcataaaattctcctaattttttgctatttttcaaactttattccactaaatttgaccaaaaacgaagagagttatgaattttcaaaatttcactggattttccggggctcaaattttgacgatttt

SEQ ID NO: 16650 - DNA, 1308 bp, Heterodera glycines
agcgatggatgatttgaataaagcgcattgtaatggacgaaagtttttgccattttacggccattgggtcgcaatgccaaaagaatttgctggctaataaaagtcttaaataaattagaattagaaaacggttgaaaaatgaaaaggaaaaataaacacacataataaatcccttcgctgtgccgaaggtacaaattcctcattagcgatgcttcgtgagtttcatccaattggagaacattttcaacgatctcaattaggggtttgttagatatttcatgctgtttttaatcacttgaatgctcttccgatgcattggtcgcgcattgaaagttctgatcaaatcaacaatattaacgtcgactttctaaaaatgcttcgagagactgacttttgaggcatatgccttttttctgcgcattagttccgatatattaagcttaaaaacacattttccacttggtttgaagcttctacgaacttttattatgccttttttggcgttttttccgaataagtttagttttacgtgttttgcttcctaaaattcttaataaaaaaatcttaaatgtctattttcgtgccttttaatgcctttttttcaattttttggtgcctattatagtgactttttcgtgatttttggtccctttttagtcggtctctaacgattactttattttttttaatttaatttaatttttatttaaataaatctttttaataataattttcggcatattttttcgtttacttttccctcgtcgtccattaacaaaaggcgcttttcctctgacgccgttcgattgtcactaaaaactgataaaactcgggcgccaatcgcaacgccatcgctcccgtaatttttgttgtccaaccacaaaaagtcgccctcaattaacgttaatgtaaaaatgtacttatttatttttaaagttgaaatacttttttaatttggagtgtccattccatttttagttggttttttgaaaatttataatatttttattattgaataaataatgtgacgctaaataattaaaatgatcaaacgatggattgggtcagatgggtcagaagcaaagcgaagtgatcggcgagggcgtacaaagaagaaaagtgatcaacagagggaatgcgagtgatttgatcttgatcagaacagagataggcgacacggggggggggaatttgggtcaaatcgcagagcattttcaatgggcgacggatgggcgaccaccggcgattttggtgctataacgaagaaaggaagaaaaggaaggaatgtaaaggaagtggggggggggg

SEQ ID NO: 16651 - DNA, 1327 bp, Heterodera glycines
gggaagagaggaaattgagaggggcggtaaaaatcaaaagccattcaaaaggccaacaatttgactaattgcgatgcaaaacaagcagaggatgggacttaggaaatatgaatcatacgctctataaccgataatatcaaaatgattagattgacaatagaaaaattaagatatatattagttgttaattttttgcataaatttccaatttttattaagttattttttattaattttatagtaaaatttttcctaaaacagattttttatgaaaatctttccgtcctcatgggtcagaagggcggttttaataaaaatagccctttaatagaatttacataaataaatatgctcaaaaatgccaatatatggacaaatacatattaaatgagttctagattttttgtgcattttatgctgtttcttgtgcaagaaaaagagaattataagccctagcaattggtaaataattgattgacgcattagaaacaattaataagggcgaagacccacaaaaaattggcatttttaaaaatgaattcaatcaaaattggttgggtaatttaatttgctgctggtattttcctttagctagtctctgagtggggttttcccagtttttcgtaccctttttcataactgtttcgcacaaaacaattcgcatcccaaaaataaatattaattgggtacggtatccaatatacgtttgtccccatatatccaacggtttgtctacgggagtgagtattcctgattttatttcgttttttctgattagcaattttccgtctttgcacagcaaccgttgagcgtacagcaacggcgacactcgcatccggtgcagctcttcaagggctctccaagcatatttttgtttttttctttctcctttgttcatgaagattgaaatatttgtttttgtgtctccgcctgaagaagtggcaaaaaagtcggggacaattgctaaaattggcacatataaaattaggcaaaatgatcatgtttaatgaatcgcgcccattggcaccgccgaacccctcaagcgcgaaagcactaagaattgaatcccaaatgccccacgaccgttcgttgatcgattcctcgatcagtttgtattgatcaattaatcaccgtttgttggtcccaccttgcttttgctgttgcacctgctgctgatgatgccttttctgtgtttgttgtgccaacattaaatgctgtctttgatcatcgcttttgccgccgttgtccgtcgtaaataattctttcccaaaaacatatctacctaattatattaaaatctgaattttcccaaatcactttggcattt

SEQ ID NO: 16652 - DNA, 1736 bp, Heterodera glycines
  unsure (1)..(1736): unsure at all n locations
gcgtgtcgcggcgcagtaattgctcggtgtagacagtatacttttggtatatatgggcggacgctgacatgagcgcttcgcgcaaaggactttgttgctagtgcgtgcgcgattttcaaatgaatttatggatgtgataagggattttcggtctacaggcatcgcgaggacgcattcataattttgtggaggactttcggccgcttcgcggactcaaagggcgctccgcgccttttttatatttaaggtttaactcggccgcctcgcggcctcaaagggcgctccacgccctttttatatttaaggtttaattcggccgcttctcggcctcaggacggcgattcgcgccattttcataattttatgggatcattcggccgcttcgcggcctcaggacgagcgcttcgcgcccatttcataattttatgggatcattcggccgcttcgcggccggctgttaagcctcaggacgggcgcttcgcgcccgttttttaatttttttggggacattcggccgcttcgcggcctcatgacggtcgcttcgcgcccgttttttaagaacattcggccgcttcgcggcctcaggacgagcgcttcgcgcccatttcataattttattaagaacattcggccgcttcgcggactcataacgggcgcttcgcgccagtttttaattttgttaagaacattcggccgcttcgcggcctcaagacggtcgcttcgcgcccgtttttaattttattaagaacattcggccgcttcgcggcctcaggacgggcgcttcgcgccagtttttaaaatttagttggggccagacgggcgcttcacgcctttttttcaaattttgttgggcttgggcgggcgcttcgcgaccgttttttaaatttgtttgggccagacgggcgcttcgcgcccgttttttaaatttgtttgggccagacgggcgcttcgcgcccgtttttaaaatttagttggggccagacgggcgcttcacgcccgtttttaaatttttttgggcttgggcgggcgcttcgcgcccgttttttaaatttagttggggccagacgggcgcttcacgcccgtttttcaaattttgttggggccagacgggcgcttcgcgcccgtttgatcgttttttaaatttgtttgggctagacgggcgcttcgcgcccgttttttaggggtacaacagtgattagaagaggtacaatttgtaaattcattaaattaaaatgaaaatattttttaacaactttaattaaaaaaatacatgaaattctatcaattaaaaaataattaatttaaacttataaaatgtattcatcaaaaaaaaattaatttaaatataattttttatttattaactcaacaaaatattttaaattaattaaaatcattgaaaataacgtaaaaatacacagaaaaataatgttacaccgtccggatccgaacctgccccctcccccctcaaaatgatgcctcagaatccccaatcacacagggattctgaggtcttgacgatgtcaaaagtaaaatctgatcacgtattcgtgatcagcgtcataaaatagccctaatgacatgtttttggaagatttttggtgaaaaaaattttccacccaaaaatcctggtcacccccctttggtcccgaatcccaaaatcacttttatttttgtatctttttttaaaaatgtgatagaaatgccaaataaaatttatataatagagcanaaaa

SEQ ID NO: 16653 - DNA, 2749 bp, Heterodera glycines
aaaaaaaaactcaaaaattccgacttttcatcaaaaatttcggaagtcggaattccgatgccccaaaaattttcggaagtcggaattccgatgccccaaaaattttcggaattcggaccccaaaaatgtcggaagtcggaatttttcaaaaaaaaatataataaattttttaaaaaatatttaataggctaaatttttaaatttttaaccatgtaaaaggtaatttcaaactgtttttagtttatttctatattttttaaaaagatcaaaatattttaagtaattttacattattttggattttttttttgggaaagttacacctttttttgcggcgcgctttatccaaagagaatttgagaaactgtggggaaggaagggtccggcggtgccgatatgcgccgccgggaaaaattttgtaatttttaatgtaaattgtcaacaaattttgtccaaaaaatggaaaatttagcgattttgagcaaattttcaagaaaattaagtttttttttgagtccggcggtgccgataggtgccgtcggaaaaaaaattgaaaatttctatgcaatttattaacataaattgtacaaaaattgctaattttttgaaaaaaaaaactcagaaaaattccgacttttcatcaaaaatttcggaagtcggaattccgatgccccaaaaattttcggaagtcggaattccgatgccccaaaaattttcggaattcggaccccaaaaatgtcggaagtcggaatttttcaaaaaaaaatataataaattttttaaaaaatatttaataggctaaatttttaaatttttaaccatgtaaaaggtaatttcaaactgtttttagtttatttctatattttttaaaaagatcaaaatattttaagtaattttacattattttggattttttttttgggaaagttacacctttttttgcggcgcgctttatccaaagagaatttgagaaactgtggggaaggaagggtccggcggtgccgatatgcgccgccgggaaaaattttgtaatttttaatgtaaattgttaacaaattttgtccaaaaaatggaaaatttagcgattttgagcaaattttcaagaaaattaagttttttttgagtccggcggtgccgataggtgccgtcggaaaaaaaattgaaaatttctatgcaatttattaacataaattgtacaaaaattgctaattttttgaaaaaaaaaaactcaaaaaaattccgaaaaattccgacttttcatcaaaaatttcggaagtcggaattccgaggccccaaaaatttcggaagtcggaattccgaggccccaaaaatgtcggaagtcggaactcggaattccgtgccatccctgatgggtacgcgccagtgtcagacaattgctcataacgccaaatagcgcatttggcgtaaatttttgcgcgttaattcaaaatttacactggaaaatgccttttttgcattttttattttgatctgccataactcgcttcattcccaactaaactgaacaaagttggtatctaaaaaaagtttttgaaaaggagaatctttttctaagcgaatgttaagtaatttgtcatctcagaaaaaagttgtgggaatttcaaacttttatcatgttataactcaagtcctaggcagctctttctaaccaaaatgctaaatttattcttttttctattgattctaaatgttcaaagtgattttgtacccttataaccaaaattattagaattttcgaatttggtgttttttcatgtgttagagacatgaaaatagtacgccaaaaggagaggaaaagaaatgattaattttgtttgagttaaaattttggatcggagcgtaaaaaaataaaactcgagcgttaaaaatgtgcagaattttttgctctataggtatgcaaaatttgatgtggatttaacaaacagaaaaaaagttcaacaggatgaagtaaatgttgttttttacctaattaaaatgaagagatagtacgccaaagcgaaagaaattacaaagaaaaagagaaacgacgagatagtactaggcttttctctgcacagtggggcgtacccatagtgaagccaacgacagacagaagagaaaaggtacggcagctgataattaggttcggaattatatgctctagccattgttttgatatttttaaagtattacataatttttggcatttttttcgattgttaaaagccatttgggtcatttttaaggcatattttatgcatatttggcattttttttattcttcccattagtttcgatatattaagcataaaaaacacagtttccactttgtttgaggcttttctacgctgacttttattatgctttttttttttgcctttttcgggattttcttgcctttcctgtttttttttctctccagcgtttaaatttccaaataacactggagaaaaaaaacgttggcccgatcagcaaaaaaaaggtctgaagaaaaaagatttgagcgttcgaaatttgttttttgaataacttaagatcggagcgtaaaaaacaaagtcaagcttcaaaaatttcgtaatttttttctcaaaaagtatggaagatttagtctaaatagaactggtagaaaaaatgtgtttattgagaagtaaattcagtttttccctattaacggagacaaagaaatattacgccaaaatgagatatttttctttgcactctcaatttattggtttatctccccattttt

SEQ ID NO: 16654 - DNA, 1851 bp, Heterodera glycines
atttgattttcttggcatttgttggcaatataattcgtcatttttggaagaaagtgaaggatgagcaagggaacgggaagagggaagaaagaatttcctgaaaatttgtatttatattttcttaggaaattttgttaaatttcaaaattttcgatgcatgggataaaaaaaatatgaaattttagccaaatttggccattttgagtctatttaaaaaaatatgcaaaaatagggaccgccgtttttgtttcatgatatggacaacaaattgctaaatatggacataaatttttccaaattgagggtgtattttttcaaaaatagctaaatttagtattaaaaatattttgaagaaaaaaaaacacgatatttttctaaaccaaattaagagaattggcagaaatttcaatattttatattcaatttttttcttttaaacaaaaaatcataaaacgactagctaattactagctttatttcttttttgtttttgattttcaaaaagtctataattaaattatttaattgcttttatgatacaattatgccgtctgattattgcactaattataccctttctaatgaggtattttataataaaattacaaaattggcacagaaattgcgcagcggctctctgctcgaactaagcagcaataaaaagaatggcacgcgccaacgaaagcacggctttgccccgtcactgatgttgtcccaacaacaaaatgtttgtcgaccatttgtcagcccccaacccgtggcaatggttggcacttcgtccctggactcattccccaccgaaactgttgttggcgctggtggcactttgtgccggaagcgatcctcatcacatccatcaagtacggtccctgatcggttgtcaatcttggcatatgctattatcattttattactgtatgtattcgtcggattctgttttatgtattacagtactcagtgcacaatcaatatttacccggggttggctaaacaaaaaatttttttgttttggcgtgggacaatcgaccatttttcgggcggcggagggttggcggtactcagtgtccgcattagtgatggtgttcgagaatctcggatttgagtctcggagatccaaattaacggtcttttgctctcgtatatcattattaatccgcatagttgcatagttaatttggcgcttattttcttctttttttttgttaaaggcacaacaaagtgctgtgaaaatttgttgcttatgttgtccgaggatgatgaagacaaagtggaggatgaattggatgaagcaatatctgcacaacatcatcatcataatcagcagctaaatgcggcacaacaaaagcataacaatgggacaatgacgacggcggtggcgccaaagctgtcgcaatgccggcacgacggcacaaagctttttgttcaaaatcatcaggctaatactgttgaggacgaagatgactacgattatgatgatgatgacgacgaagattatgaggacagaataattgttgagccaatgttcaggtgctgtgttcaatgcatgaaactgatctgataggggagggggtcttcttcttggacctgttgacccgactaatgggcctcaataccaacatggcacaagggcgtaggcagggggagctgagggggctaaagcaccccccccccccgaaaaccaaaaaagtaaaaatttttttgaaattttaagcaattttcttaacataattgcattaaaacataaaaaagactttcccggcggcgcctatcggcaccgccggacccctattttaccatatttttgaaaaatggagaacaaaatagcaaaaatagtcattttttggtgaaaaa

SEQ ID NO: 16655 - DNA, 891 bp, Heterodera glycines
  unsure (1)..(891): unsure at all n locations
aaattggcccctcaagactaaaccacaaatactacggtcatcccaggactgggccaattgagggtctcacgactcagcttatcccttcgtcattcatntaagtaagattcttcaaataacattaaatttgaaaatcttaatgagaatggttggtgtacggtagacacagtgtcgccgctggataaattttttgaaattttctttaattttcacttttttttcctcctaaacattggttttataaattaaataaaatattgaaaaaaacataaaattgtttttttaagaaaacgttccatctctttggatgagacgaaaaccgctattgccgccgcttctttcgatgaaaccgattcgaatgaaactgatcagcgccatctgttgccgaggacacacagccgacagcaccacaacattctccgatcaaacccataccttggtgatcagggaaattgcgggacataaatattgtccaagatgcaattaacactgatttttggatatgggataatattgcttttatctcgagactctcgagagcattttatccatgatgcttttcaattatttttttttttgtagtttttgctcatgcaccaaaagcgtcaccgtcgtccaatgcgaacagtgtgcgtagaccaaggctggtgcagcgtgccgaaagccaacagcaccatcctaccggggtaagttagttggagtgaacaatgaccagtataaattttactaccagcagcagggccaaggttttacccgaatcccgaaaccctccattttttctaaaatccatgcttacactgatcactagggacgtgaattttagtgaataaaagtttgaattttgctaaaaggtgatttttgtaattcggtttagcgttctcaganatagct

SEQ ID NO: 16656 - DNA, 964 bp, Heterodera glycines
agttcgggaaaatttgtttgccttaaattcaatgttttaacatggatgagtgaaattttagatgttagacttgtgacgaagaaaatttcaaaaatatttatttggagcagacaacccattaggagtttcgtaattttttttatttataattttaaccccaaaatgcgaaaaaattttagtacccaccagaattagtttaaccaataacgaaatgagagaatgatgatcggttgccaaaagtatcaccaccacgtatttctactaatttgattatactaattaattgattggttcttagtttaaagtatcaaggtggtaaaggaatttaggggtttaccaaatttgaaaatttaaaattctaatgatagaaaatttaatgaaaaattggtgtgaattaggaagccggcgattcggcaaataaaatttcgcgaattatcgcataaaatggcaaataaaaaagtttctgttgtatagggttggagctggatttcaataaaagttgaaaagattccatttatcccgcgacgaaagcactgcccctcggcggagggcattttattggcgtggcgaaaatgcgcaatgaaaaatcgtcaaatttttcgggggctttccttagaagagcaggaaaatccaatccatcccatccatttatcggataatcccattttcatcatcattatcgtccatcattttccggggcgaccccacaaaatctgatgaggatgaatggtgatcattattcatttttggctgatgattgattcgacgacaatttgtcggaaaatgaaagaaagcacagggaatgaatgatgataattgggcagaaaatgggcataattaatggcccagaaataattatatataaaaattaaaattgagaaatggcaaaaaaatttttttaaatgagaacactttgttcggattatctgttatttaggggagcagttttattttttttaatctc

SEQ ID NO: 16657 - DNA, 2184 bp, Heterodera glycines
aaaattgaactgcgggattttgaataccctaacaacgggattcatttttaaaatttgatgacggaatttttgaaaaatgccaacaacggaatttcattttcaaaattagacgtgggattttttggaaatctaaagcacaaacccctaaaggaaatcctaattaatattttggtaatatataaggtggcgtttttaacaaaatcccaattcctatgacctctcaaaattgtcactctcagccgccgcttatcccaaaattgcaattgttgggtcggtcggataaaagagtaatattcgcacaattggccctcctatatgcgtacattttgtttgttgatgaagaattcatcataattcagcgtgggtggaggaattcggcggtgatttatgatgaagaaaaattgggacagccatttaggatttggtaaatccgcggagataaatgtgcgagggattccgagcgtaatttgtgggtgggaaaatggaaatgttctggatttttagtggaacggacggattttatttatttagtttagctaatttcgctttttaggaaagttttttttaattttaaactgaatattgaaaaatcccaaggttgtttgaaatttagatgtgaaaatttagcttttttttttaaatttcaccaaattatgagaatagtgcaaatttttcaaattttccaatatataggaaattttttgtgttattgattagttaattttaataaatttttaaaaagccttttttatcagcttacgtattattaattaaattaatttttaaaattcactgttattaattattaattgtaataatttttaaaaagcatattttaacagcttacgggtaattaattaaattaatttttaaaaattaatttttttcgaaatgcttcggaaggcgtataattttgaactgaaaatgtccttcgtcaaatttaaccttggacgaaggggaaatcagcaccaccatcagcagcaccaatcagtcagcagccagcagatcgatgcatatcgcacatttttggaacaaatttatttatgtacgctccaaagcattttatgggagaaaaaaggcacagccgcaaaaaaaaaatgttggagagaagtgaaaaaaatggacttttttataagggcaaaaataaggacaaagggcacacacataatgccagagaaatatgttgtgttggagaaattggcataaagtaaaaaataaaaataatttggaattaaaacgaaaaaaagaagaacaatgacaatgatcgatcattaaggattattgaagataattaatttacacctattggttgtgaaggagcatgtgaaaatgataaatacaaggatatccatgagccaaaatgatcagaacaaatacaagggctgtgactgatcagaaattgaccaggacgagaaaaggtacagtgacttcagaattgatcaggcccaggacaaggaaagcgactgatcagcaattgatcaagaccagaccaatcagattagcaacggagagaaaactgatcaaaaaaataaagattcggcgggggtacacaaaagttggacagacaattggaaacagaaaaaggaaagggcattatggcacgacgacagatggcggcggcgggggatggatgaatttgatggggcaacatttgtacaaaaaaaaacattccccgggggggggggaaagaataattagcgaaaatgtgttagtgaaggtcatcccattcaattcattcgttcgtccattcatttctatctgtcctcttaccttttttttgttggggctatggaaaatgaaaaatgcgcatgaatttgtgtgaccgccgcgtaacatcaaaaaggaggggatggatgagttttgaaaagtttggttttggaataaattatccaagctttggagagaagcctcaagaacgaaaaatgaaaaattgccgaaaatgtcgggttaaatttttcaaaatttcctgaaaagttctaagaaaaaaattttcaataaattttggttaattatttaaaatttcataattttccataaattttggttagttatttaaaatttcatgaaaataaattttccataaattttggttaattattaaaaaatttcccggaaaaccaaaattttccataaatttcgttgaaattattataaatttcctgaaaaccttagcaattttccctt

SEQ ID NO: 16658 - DNA, 911 bp, Heterodera glycines
attttccggtcccgtacttttggcccagctttttctttaccggagcgggatttttaagatttccggtcccgtaattttggcccagcgcaattctttaccggagcgggatttttaagatttccggtcccgtacttttggcccagcgcaattcttcaccggagcgggatttttaagatttccggtcccgtacttttggcccagcgcaattcttcaccagagcggaatttttaagatttccggtcccgtacttttggcccagcgcaattcttcaccggagcggaaatattaattttccggtcccgtacttttggcccagcgcaattctttaccagaacggaatttttaagatttccggtcccgtacttttggcccagcgcaattcttcacctgagcggaaatattaattttccggtcccgtacttttagccaagcgcaattctttactggcgcgggatttttaagatttccggtcccgtacttttggcccagcgcaattcttcaccggagcggaaatattaattttccggtcccgtacttttagccaagcgcaattctttaccggagcgggatttttaagatttccggtcccgtacttttggcccagcgcaattcttcaccggagcggaaatattaattttccggtcccgtacttttggcccagcgcaattctttactggcgcgggatttttaagatttccggtcccgtacttttggcccagcgcaattctttaccggagcgggatttttaagatttccggtcccgtacttttggcccagcgcaattcttcaccagaacggaatttttaagatttccggtcccgtacttttggcccagcgcaattcttcaccggagcggaaatattaattttccggtcccgtacttatagcctagcgcaatgctttactggcgc

SEQ ID NO: 16659 - DNA, 2394 bp, Heterodera glycines
caattcttcaccagaacggaatttttaagatttccgcttcccgtactttggcccagcgcaattcttcaccggagcggaaatattaattttccggtcccgtacttttagccaagcgcaattctttactggcgcgggatttttaagatttccggtcccgtacttttggcccagcgcaattcttcaccggagcggaaatattaattttccggtcccgtacttttagccaagcgcaattctttaccggagcgggatttttaagatttccggtcccgtacttttggcccagcgcaattcttcaccggagcggaaatattaattttccggtcccgtacttttggcccagcgcaattctttactggcgcgggatttttaagatttccggtcccgtacttttggcccagcgcaattctttaccggagcgggatttttaagatttccggtcccgtacttttggcccagcgcaattctttaccggagcgggatttttaagatttccggtcccgtacttttggcccagcgcaattcttcaccagaacagaatttttaagatttccggtcccgtacttttggcccagcgcaattcttcaccggagcggaaatattaattttccggtcccgtacttttggcccagcgcaattcttcaccagaacggaatttttaagatttccggtcccgtacttttggcccagcgcaattctttaccggagcgggatttttaagatttccggtcccgtacttttggcccagcgcaattcttcaccagaacggaatttttaagatttccggtcccgtacttttggcccagcgcaattctttactggcgcgggatttttaagatttccggtcccgtaccttagacccagcgcaattctttaccggagcgggatttccggtcccgctcgcgctcccggaaagtttcgcaatcccgctaccgtcaattttctcatcaaatgtaggagtaaaaatgcactggttgaatcgaatttttaggttaattatttttaagtgaaaatctgacaaaattttcgattccttccacaaaaatattttagaaataccactaaatttcggcttatatttttatattttttcttccattaaattattgaccatcgagctgtgatttgtgcttatttttgatttggtacaaaattacaagaaatggtaatttttagccttaaaatttataattgcatatttttggcgcaaaacggtggatgttcacaaatctctaatttttagattaaaattggacctaaaaagctagaaattatttcggattaaaattttttaatctcagttctatttcatatttttgtttttagtttcattaatttttgaattattcctgctcacaccaggacttcccttcaaaattgaccggatttttcgggatattatgcggcgattttcgactctctttcttctccattctctctctcgatcgctcgttcatttctctttctctaatgcttccgccaccaatgttgccattttcctcacccccgcccattaactcaactgctctgatcagatttaaggggagagatttgggatttgagtcagttgttgatcacttcacctttttgatcactcaccaatttcccttggcttttctttaacttctggtcaataaagtgctttgttattggcttagaaaaaggggggcagcaatttgggagagggatgcgccttcccacatctcaggctctgcctgaaatgctgggaggacccaacattcctcgcgtatttccccgcatattacgggaatcccggcaatgctcgcggaaaagttttggactcccgtcccggcttgcgcatattttttacgggtctttaattaaagaaaaaattagaaaaaaaaactttgcctcgggaagacccgaatgaaaaagcgctaagacatggacagattggcaaatgctgaacagatccgccttttcggtcttaattgtgaaagtgaaacaattaaaggcatttgtattttgtgaaataatttatttatttatacagatttaattgtttttcatgagttctttacttttattaatgggcgaatgaatgggagttcggccaaaacaaaatgttcactgagcgaaatttgaaaagggtcggggccatgggctctttctatcaaaatagtaattaaattagcaattaattttccaaattgcgttcgaccataaaatcgcatcgcttcgtcccatgtggccaattctttgtttgcgtacggaaggcaaagcattcggctgaacagctcaaccccccagaaatttcttctcgtgctgctgcgccaattaaaaagggttttttgaggaaagaataacactaaaaaatatagattttttattaaaaacctaaaaaaattccaaattttgggcaaaaaaaaattc

SEQ ID NO: 16660 - DNA, 5148 bp, Heterodera glycines
agtcccccaaaaagcactccccactctctccgatcacccaatcacattccccgatcatcaaaaaataagcccggagaggcatcgccagacttttatattttcctgtcgttggccacaacagttgttggcccctcgggtgcatttggccaattgttccaaattgaacaaaaaaaaaagtggcccaaaaaatggcagggggaaagcattgatcatctcatctcatccatcaccagcagcagaggaggggaggacggcttcaaaagttcaaaaaatcaaagttttattaaatatgaaaacaaaaatattttttttagcaatttccaacaaaattttcttttaaaaatcgaaaatctttttaaaaattattttaaagcacagatttttctgaaattacttcattttcaagctgttgtcttctctgtttttttattttattttacattataataaatatttatttaattaaatattaaatttttgaaatttaaattgaaaaattgattttctcttgtcggtttgtaagatctcttcttttttgaataaaaattagatacgatttcagcccggaaattgggtaaaaaaatattttttttaagtcaaatcattttaaataaattcaaaagtttatttaaaaacattttttttttgatatattttaattgaaaaaccaaatttggcgttttgttcattacctaactctttgaagtcttcccgccctgatcagtttcaattttgaagccaaattttgcccatccagtcagctgattacggcggactgaggagaggacattgatccgatccgatccggcttctgctgctgccgctgatcagatcggatgatcaaaacggcagccaatcaatgcccatttgatcagagcagcaacagtctgatcaaaatttgtcccgctatttccgatcgcatttttatgaaattcgagaaacattgtctcgactgagctttcgcccagagtttcgattcgatcacttcaaacccaaaaattctgctgatcaaaatgcatacctctgctgatcaattttttttttgccgatagcgcattttcattttggcatttctcgagtccaacgcaaatttgtgccgagttcccaaaatttcgagagttttttccaatgcctttattcccgccgcccccgaaaatttgaaaaaaaattcgaatttaaaattttcagaaagaaaaatcttagaaaatttttaaaaattcaagaaaagctacaaattttcaaaacttttgcctcatccaatgccgtcggacactgtggagatggccgaactgatgtctgctgaggatggccaacctcagcagaccaatggcacggtgccaacaacagaaacggtggagcgaaaaaattttaaaaataatttcggcggcaatttttggtattttgccctaaattaattcaattttttcttctcttaggttccaaaggccaagaaacggctcagtgtccattcaattttggtcgaacgcgacgaatggtcatcctgggccgacttcatcatgtcctgtgttggatatgtacgttgaaaaatttgggaaaaattcatttaaaaatttgtggtaattagggctgaaaatttaaaataaatgttttacccatatttttttctggatttaaaaaaatattttcaacttttaattactattttacaaatggcatttagcatttgtttaacccatatttcgcaatttttcaggctatttaagcgaataaaacaaaaaaaaaaccaaattttttttttcgaaaattgactcctaagaaatggatttttttttaaaaataattaataaaataatttttttttacatattttatgtacattttgccattttcttacatacaattcaaagccctagtaaaaaatttaataattttttttatgaaggcaattggacttggcaatgtgtggcgttttccgtacctttgctaccaaaacggaggcggcgcatttttggtgggtttttaaaaaaataaaaaatttttaatcaaacgcctccttcattctctaaaaatttctatggcacttaaattttcgaaaatttttccagattttttttaaatgaattttaatttggcatccttttcaaaatttttaattttccaagggccctaattgtttttttttacaaattttccgaggccttcccgcaaatttttccaatttttccaaattttccgattccctacatcattgccattttgttctgcggtgttccgctgttcattctggaaacttcttggggacagctcgtctccgtcggcggattgggaatgtcctggaaaattttccagttttttttggtttttataaaaattttcaggttcaaaatttgcccaattttcaagggggttggcattgcggcggttgtgatggcattttggtcagagaatttgttttggttaattatttaattaaaattaatttttcaacaatattttaaatctttttgaccattcttcaggcttgaatataaataagtaaataaatatatatatatataaaatggtggaaaaataataataaaaataaaaataatttttaattaaaaaaatttatttaaatttgtttaaaaatgtttgtattcattattaaaacaaaattttaagaaattaaaatattattttataaaatttatttcaatatttaaataaaattatatttaattcatttttattcttttatatttctttttagctaaaaatttaagtattcattctttattaaaacaaaactttaagaaattaagtatatatatttttaaattttttatttaatttaaattacataattttcaattatttaaataattttaatttaaacattattttccaccaaatttataaagaattttaatcattttttattctttatattctatttttatttaaaattttaatatacaagaactaaaatattattttaatatttatttaacataaaattacatttttttaaattattaaattattttattttattttaaattttcatcaaattaatttttattccataaaaaatcaaaaaaaaaattgtttaggctcaacatttattacattgttgtgctcagctgggccatgtcctaccttttccattccctacggatggactcaaatgtgccgtggcgaacatgcgacaattagtaaaatcaaaaattaaactatgggataaaattaattcaaaaatagcgcaaaaattagagacaaatcgtaaaaaaaaaatttatgaatggattaacgaatttggtggtcttcaaggaaaatattcaaccaaagaatggaatcaaaattatgaagaaatttgcaagaaaattggagttggcaatttcataattaataaatggaagaaacaatttgtgaagttagcaagaaaataataacgaaagaagaaaaaatagtaaaattgaaaataattttaaatcattttgtgatgccagaaggaacggagtgtgggagaaagtgggataaaggacctgagagaacctctaaaagaggcgcccgtagctcagttggttagagcacggcacggattgctggggtcgtgggttcgagtcccaccgggcgagttaccttttatgttctacaatttaaaaatcagttggaattcccctcggtgccgatcagaatatgacccccgtgttgtgtgaatcgaatcggacaattgctggctattttatgttaaggtgaaggcatgaatgaaaaatatttattttattaaaaataatttaaaaatttacaattttaatttaaaataattaaaatttatattttctaatttttatttttatttccaatatttaatttggtcattaaatatttttatcaatttatttttttcattattaattttcatttaaactccttgtggacctctggatccaggcctccgttttcctgtccaggcccagctttttttggcaacctagtttttttttggcctagactttcttagttttttttggcctagactttcttagttttttttggcctagactttcttagttttttttggcctagactttcttagttttttttggcctagactttcttagttttttttggcctagactttcttagttttttttggcctagactttcttagttttttttggcctagactttcttagttttttttggcctagactttcttagttttttttggcctagactttcttagttttttttggcctagactttcttagtttttttttggcctagactttcttagttttttttggcctagactttcttagttttttttggcctagactttcttagttttttttggcctagactttcttagttttttttggcctagactttcttagttttttttggcctagactttcttagttttttttggcctagactttcttagttttttttggcctagactttcttagttttttttggcctagactttcttagttttttttggcccaaaatttcaaatcgctaattattttaaaaaaaattatttgccctttttaataacatattttttaaagtaagtttcttttaaaatattttaaaatggtttatcttaaatttatttcttttccatttgaaattaaaaatttttgttttcaattaaaaatatcatttttttcatttttaaatataaattaaaatttttcaattaaaatttctcagattttgacggacgaccatctgaatgagtacagaaaacagttcttcatcggcccaaaagtgaacttcaccatttgcaccgaagctgacctcagcgtccgttcgccggtcaaagaattttgggagtaatttaatttttaattaattaattatttttaaataataattttatacatttttattaatagtcatcgcgtattgggcatcagtgaaggcattgaacatgtgggttttaaaaaattcaatgtttattctaaaaaaagaattttctgtatttttttttgctaaaaattttttttttttttttttaaatccaaaagaaatttttttacaaaattttcattttgaaaaatccaatttccgaaaatttttattaaaaattttcatttgaatttaatgggactgtctttttttgaaaaatattttctttaaattctcctagggggttttgttttttcaaaatcttttgaaaattattccgaa

SEQ ID NO: 16661 - DNA, 3340 bp, Heterodera glycines
  unsure (1)..(3340): unsure at all n locations
taggaatttgccacacattaatgaaaacagaaaaggtgaataaaatggagcttttaaagtttctttgcagtttttcaaaagaatgcttggtataccgtcaatagaagtattgtttttatccttaagtttacataatgaaaaataattttcagcatgagttatagtaaaaaaaatccatacttttttccagatattttttggaaccagtgggttcgggttcaatgttttgaatagtgaaaactgagaagaaaaattaaaaactgtaaatacttaacagtttctcgaatattatatttggtggtttttttagaattaatgtgttaattaatgattttgagttttgaatatttgctactttcattcctttttaaaggttttgtaaaatttttatcttctaactctcctggaccattttccttaaaattttaaaaaattaacccaagaattctgaagtgtttacacatttcaatttgttaataaaaagtataattttaggccagactaaagtatataaattggaatttttgaatgtgataccaaaatataaaaattttaaatactattgttttattttattatcttttgagtccctaaaagtttttaattaattcctctggatcgtttcttcaattatgacaagatgcaggctgtcagcatattatattcatgttcaatttcaattctttaactcagattgtgtttgattttaattaatataataatagatttatactagaaagcataatatgtctattttatttctttcaacttactataaattaaaataatttaaaataactttttgattagctttatatatatttttttcttctttttagtttaaaatctcattattatgccatagattagggaaaagttaattatcatttttatatgtagagtatttttctataggttttttgaagtatttaaattcgtacggcaaattaaagcgaaaatatccaagtttaagcggaaaaaagatgaaagttaattttatagatccatttaaacttttattcttttaaataaaagataataatattaattatttcttcaatttatgtgtttgttcaacaaatattaatattattaacagttttatctcttgctaattgcataaattattgcttttttgcttaattgaccagcatacgttttttttaatagcgctccttttgaaaatattttgaatctgagtactcgcgtgatattaaggaaaatctcattgtcttaattttgttactgataattcttgttctacgttccgtcttattctaattttccaagttttcgacagttatttcgttttttattataaatttctgaatatttttcatttgtgaataaaaaataaacatatatattaatagcgatgaatttttattttgatctttaaaatttttgttaaacttttataaattttttatttccgttagtgaaaactcaaattgatttttcttttaattatctttgttttaattggttccgttcaactttctctgccgcatgtcgtcgctgcggggtaataaagctacgcccgcacattgtaaaattatttgtaggtacgcggactccacattgacctggtaatgaatgtcctattatatttttttgtaagccattgggtttattattatttgttcagattttatcatactttaaaattgagtataatataatttttctcacatttcatactctaatataaattagtaaaatatttttttatttattaaattttttctataacattttcaattttatttgactaattaataagacgtgtttatgtttttacaaattagctagttttaccctttattaatttaaattctttctaaaattatattttcaattttattgcctattgataaaagatgtttatgttttgagtagttacccatgcagattttgggggttaattttcagccccgccatttcagtcccaatggaaagggacttttcagtaccaaatttaaactttaaaaaacacctaataataattatatataaatcactgaagggtgaaaaaatacctaaaaaaggaaaaaaatatttctaaaaccaaaacatattaaagtattttgaatttatagaccaaatatcaataataacttttacatattaaattattttgcacacaaccaataccaataataacttttacatattaaattattttgcacacaaccagccaataccaataataacttttacatattaaattattttacatttatagaccaacctataacttttacatattaaattatttttcacacttggcctaacaattttcattggcagtttaccatattcaaacaattttccgtagaataaatgaccaatccactcaaagtaataaattttgaataataaattatttttgcactcgcataactgcaattcaactaagaattatgcatattaaatgacatttttctcactataaaaaccctagcatattcacacaaattctctcttactccattcatttgacaattcaaaatctcgtactgcactcatctttccacttttgaaagaacttcatattgtgttttactgtcacaacattttttccagttctgagctacccctgctcactatttaaattattaaaaataaaattaatacgcaatataaattataaatcaaaaatttccaatcttataatgaagcgatcttcaaatacccaagcttcttcctcattcaaaaaatctcaaaccaataaatgtattcgtaaaattgaccaatttacttccaaaagtattaaacatcatttcatccgctcaaaatcaaaatttgttattgatgaaattgataaatgtaccgaccccgctgcggagctccgttcatgtgtgcaccattcgatcgaggaagcaattttagatggacaaaacatccttggaggagcaaataaggtaggtatcataatttcctcggaacttttagaccagggtgatatcatactgccaataactccgattacgtcaaatgtcgtcgacgcagtgtttaatcaattttgtaaagtggagcagagcaaggccaaatacgtcagcctttacggtgccccttttgttgtaaccgtcactgtcctgaatactgatggtttaccccgccgacgaacgaccaaaggaaatgcccctccaattcactcttcacaatcccacatcttcaaaattaacaacaatgacaactactgtcttttttatgccttggaactgatgcggtactattcgctctacaaacgtggaattattacgcgngacaaatggagatggactaacaacaccaaactactngtctccacaaaaaagtcactttactccgtgatgct

SEQ ID NO: 16662 - DNA, 987 bp, Heterodera glycines
ttctgctcttctcccctcctctctctctcactcatttcctctcttttctcctcagtctttctccctcttttttttcattctatctttcttgctctctcacttcaaaccgttctttcattctctcctcttctctctctctttttatgctttcctctttctcacctctttctctctctatcgtttcctctcttctctcctctctctatctcttaatgctttcctctttctcacctctctatcctgtcctctcttctctcctcctctctctttctcccttctctctctctctctatctctctatctcctttcctctctcttatctcctcccctctctctctctttcttttcctctcttctcttctctctctctctctctcttgtcctttaaattctatagttccttctttctctgtattcgtaagtatctatttatctttttttttattatttctctctctctctctctctctctctcacacacacactctctctctctctcccactctctttctctctctcacacactctctctctctcctctctcaatctctctctctctctctcacacaactctctctctcaatctctctctttctcactttctttctctttttctttttactttcattctttcatacataatattttgattcattatttgtttaaaaaaattaagcttttctctcaaaaattttaataaaaaaaacaaaacaatataataattaaaaaatgtacaatttgaattaaattttgtttgtggattagaattttaatgttaaatagtagtatttaattaatttaatttgaaaaagataaaagtaaataaataaaaagaaaaaagtgatgaaaaatctcaaattttattattgcataattttcttaaatttatttacaaaaagtttttattggcattttgtttattttcgcgttaatttgaatcgatattttttgtgacggaatgacacgacccaaatactatatttagat

SEQ ID NO: 16663 - DNA, 1247 bp, Heterodera glycines
taacagagaaaaagcttggctatttaatggtactaagaatgtaaaatatgattgccattaagcaaagttatgccatgttttgtcgaaaaaattgctaaaaattttgaattagcgggatttttggcgtaatgatgacaggttctgtgattgaaataacaggtttctgattagagaccggaaatttcaaatttgcggatcccgctgcgggattggaactcaaatttttttgcgggacgggatcccgcgggattaatcccgcatttaaaatttgcgggatcccgtgcgggattgcgggattttggaaaatcaaaaaaatttcaattaaattcaaagaatttccaaaaatcaaaaaatgctgaaaaataaatttttaagggctgacgggatgcattaaaagaggctgatgggtcgactaagatttttcgattggatccgacggtaaaaagttgatcggaaatcaaattattaacggttcataaatttgactatttttttcttttcaaaaccacttttttgcgctgcaatttttcaaaaaactaggaacagggggtccggcggtccttatcagggatggcattccgaggccccaaaaattttcggaagtgtcggaaatcggatttccgaccccaaaaacgtcggaaatcggaaatttttcaaaaaatatacaatataataaaaaaatttctaaatattttaataggctaaattttttaattttaaccaagtaaaaggtatttcacaaatgtttttagtatattcgcttgaaaaaattgttcaattatttttccgacttttcatcaaaaatttcggaagtcggaattccgaccccaaaaatgtcggaaaccggaagtcttaccgtgctatacctggtgcctatcgacatctgcgagaaattttatgaaatttaatgcgatttgttagcagattttgtctaaaattgaccaaatgacgcagtttttgactcaatttctacaggattattaagtaaaagcctatccggcggtgccgataggcgccgccgggaaaatttcacaaattttgaatgaaatttgtgatgaaaaatgagttaactttaattaaatttattatttaatttatttaaaaatatttggcattctgtcttggaaaattttcaaaaaaatcaataaaatcccgcataatcccgcacaaaaaatcaaatttgcggatcccgctgcgggattggactcaaaatgctttgcgggacgggatcccgcgggataatcccg

SEQ ID NO: 16664 - DNA, 442 bp, Heterodera glycines
agtcgctattttgaaaattatatgtaagtatctaggcaattgacaaaaaataatgccatcatttttttatatttgaactaaaacctggtaattctaaaatattacccaggcaatccaggtttttcgtgcaaaacctggattatttagttttttccaaataacattccacggtcccaatttttgcatcagaatttaaatgtgcgatgagcgaagggacgaatttttgacaagcaaagaaagaaattggttttgcgagatgggttgagaaaagagggagagaaaaggcggttggaccctccgccgaaggcccatggcaaagaattgatgggagggcgggggggggggggtgtgggaagaacagaaaagtactaaaaaggtggtagattcactttataaaataattaattacccaaaaggtttttacaaccacatattgctaatc

SEQ ID NO: 16665 - DNA, 1506 bp, Heterodera glycines
tttcaaacatccatcaaatgtaaaaaataaaatcacttgctttttaaagaaaaaaaaataattagaaaatttttaaaaaccaaaatcccaaagatatattattggaaaataaaaaaaaaagttgttggtttaattttaccgttattctgagcctggtcattgatgcggtaatttaggtaattaatttagaaaatattcgattgaaaagaatgagagagaaattccatttttgcattatttattcataaagggcgatttgatgaatcatttggcggatgatttgcatgtcattcacaatgcagcaggacagcgacaggaatcattttctgctgtccttttaattacatttgatatttgagaatgaaaatattggggaggggtcgggggaaagaccgagggaggaggggggggggggagtgagcagtgttatgccagtaataagggaggaaaatgagacgaggaaaaggagggggtggggttaaatggaacgaaagacagagagagaaagagggaaattcggaataaatttgggggggggggaaagtatgggaaggtaaaagatgctgacaatattggggcatgggcaaacgaatcaaaagcaaaagtgatcggtgggagaaatgaccttgaaaagaggcgcagagtgcgaaataaaacaaataatagcaaaaatatgggggagagacacattcaaagcaacgccccaattggcattggagaaaagccgggtcagaattagggtcaaatggggcaaccgagaaaaagcggccagcaacagggaaaatgccgcaacacgacaatgccaccaaatcatatcaagtggataactttaaactgaaaaataatatacatcgcatggcattatgaaaaaggagagatagtgagggctaaagcacagagaaaagaaaattaagactcactagtgattaattgaattcgccggaaaaatttttgaaaaattttatgcaatttgctataagattttgtctaaaaatgactaagattttggagctaatatttaaaaataattagcaatttttggggcgggcggtgccgataagcgccgccgaggaaaattttttttcttcagaattttaacgaattttgttaaaaaatagccaaatttttagcatttcctcttttcccctttgctagcctcccccgcccctttatgaatgttaatatgtaatactacaaattaccaagaataagtcagattaaatcgaaatatgggtagccttttaataaaaatagaaaaaaaattcattttataaaaaataatcttgcaagaaatcgtctcgaaaaataatcaaaaaagccagttacggatcaaaattacggaaaaatcccaaaaatccgtaacccgtaatccgtactacgcagaacgaaactgtaaatttttccagagctcacttcagtctttttgccagttcttgtttgagtcttcataatttcgtcaaatttctttttgtattcggaatttttgtgcttgtcgcttttaagatg

SEQ ID NO: 16666 - DNA, 549 bp, Heterodera glycines
gcccgtcctgaggccgcgaagcggccgaatgttctcaacaaaattaaaagacgggcgcaaagcgcccgtcttgaggccgcgaagcggccgaatgttcccacaaaattaaaaaacgggcgcgaagcgcccgttcttcggccgcgaagcggccgaatgttcccaacaaatttaaaaacgggcgcgaagcgcccgtcccaaggccacgaagctgctgaaaattcccaacaaattaaaaacgtacgcgaagcgcccgtcctgaggccgcgaagcggcccaatgtcttcaacaaaattaaaaaacgggcgcgaagcgcccgtcctgaggccgcgaagcggccgattgggggggtgggttgtaaagacaaatttattaatagacccctgcgaaaaatgttaacaataattgaaccgataaaaacatttcccacattgaatctcattctcaagattcagtcctcaaaatcctgcgcataaacattctaggtaaatattgttgatatcgaaatgaatcaaagtcgaaaacactgaagtatcttcatattttggcaaa

SEQ ID NO: 16667 - DNA, 1350 bp, Heterodera glycines
aaaaacgggcgcgaagcgcccgtcctgaggccgcgaagcggccgaatgtcccccgcaaaattaaaaaacgggcgcaaggcccgtctgaggccgcaaagcggccgaatgcacttgctcatcacttatcaaacgcgcatgcactagcaacgaagtcctttgcgcgaagcgctcatgtcagcgcccgcccctatataccaaaagtatactgtctacaccgagcaatcactgcgccacacgctagtttctactatatatagagaaaaggtgcaactcgtagaaaaaattataagtccccgtggtttgcccggaggctcctgaaagtgcggcattgcttaagcaactttttgaggcgcatctgggaaaaataaggatttttcggtccggcggccagttgagcgccagcggcgctgaaacggccaaataaaaaaaatcgtcgcggttttcgggctgtaacttttctcagggaaccgggagcggaaaaagtccgctgagagggcacaccccagacatgttggctacaactttgtcactgatcactttttgatcagatcaaatgccgagcctgtagaaattggcgactgaacggcgctcaaaatgccggttttggcttttcgtgaataactcgctgggggttaagcggagcgggttggcgccgcttgagcatttgtgtagtttttaaagctgcatccgatggcgttttcagattttgaaaattttcaaaatttttcgagctaggccccctcgaaaatttttcgtttttgaattttattattttttgcagatttttcccaggaaaacggagaccactttcaagcaaccgtttttcgagctctatcgattggtggcatttttgaaaaaatttcaaaattttccggaaatagaaaaattttccggaattgagctccccatttccgtttgaggcttataactcgtcaggcgttgattttagcggaaatttgtcttagagcatttttgtagagaattttaagctctatctaatgtgctttatctcatgtttttaccatgagtttaaaaaaagttataaaattaattgtgattttgaaactcaaaaccataggggggaccccatggttttgcatttcgtgagaaatttttttgctcctaaattagccaaaatgcatttttatggcataatttgaggtgctgaacacgaatatacgctttattttgcgtttcagactttttggaaggtggttaaaattttttgaaaaatcgtcaaaatttgagccccggaaaatccagtgaaatttcgaaaattcataaatctcttcgtttttggtcaaatttagtggaataaagctttaaaaatagagaaaaattgggagaatt

SEQ ID NO: 16668 - DNA, 1862 bp, Heterodera glycines
ctttttggcctgtttaaaaaggaattaaaaatttttaaaaattttattcatctccctttttgatagaaaaagcatcagagtgcctaaactagcatgtaaataaaatttggtgcgtttcagagcattttgtgaaaaaaatatttatgaattaattatgcaaaaaacaaataaaaacgaaagactcagattttcgaaaatttttttgagccagctagctcggcgctcatttcagtgtaagttagtcctttaccggggagtatccctgcaaagtttggtacgcttctgctcaattagcaaaaaatatgagtgatcgaattttcactaaaaaagttaagcctacattttttggcatatttaaaaagcaattaaaaaatttttaaaatttaataattttcctgcaccgaaggtactcactcggcctcttcgcggcctcgtggtgggccttcgcccccccccccctcccacgcccttcagagcacgacaaatatttcaacaaaaattttgaaaaattgactagagcaatcgaacgctaacggacgacctaatggaaaaaaatccccgaaggagagaatttaattaaatccattccttcgggggaccgtgccgggtgccgcggggtaagcagtgctggttcgtttcatcacggcaccgaaccttttggctagtcagcaatcgttgcttaacttgccagatcggacgggtgcgcatgattccactgttccaagcaccccaccaaaagcaaaacgatataaccaaaatataaggaaaaattttttaaaaaattttttctccatcttccctttttgatactaaagcatcagagtgctaaaattaagttgtaaataaaatttggtgcgctttagagcactttctgaaaaaaatatttatgaaacaaaaaaaatcgattttttcaagtgtccgtttggggtactcaaacatttatggggagcaaaaatccaacgcagaattaaagtacaggctatagggaagctattcccgagggattcggtctccccataaatctgggcgcatcggttcggggggaatgacatttcgaaaacaaaaaaatcgattttttcaagtgtccgtttggggtactcaaacatttatggggagcaaaaatccaacgcagaattaaagtacaggctatagggaagctattcccgaaggattcggtctccccataaatctgggcgcatcggttcggggggactgccccgaaaacaaaaaaatcgattttttcaagtgtccgtttggggtactcaaacaattatggggagcaaaaatccaacgcagaattaaagtacaggctatagggaagctattcccgaaggattcggtctccccataaatctgggcgcatcggttcggggggactgccccgaaaacaaaaaaatcgattttttcaagtgtccgtttggggtactcaaacaattatggggagcaaaaatccaacgcagaattaaagtacaggctatagggaagctattcccgaaggattcggtctccccataaatctgggcgcatcggttcggggggactgccccgaaaacaaaaaaatcgattttttcaagtgtccgtttggggtactcaaacaattattaaaaatttttagatttttattcatctccctttttgatagtgaaagcatctgagtgcctaaaataacttgtaaataaaatttggtgcgtttcagagcagtttgtgaaaaaatatttatgaattaattttgctaaaaaaataaaatagtgaagctttaaaaattaataaaaaattttaaattcagaattactggagttagcatcatagcagtgcttttccttgtctttttgatgccctcgcaaaatctggttcgcttctga

SEQ ID NO: 16669 - DNA, 887 bp, Heterodera glycines
tggagtttgttccgaaattttgttgttttttgtttgttttttgttaaattttttgaatttttcttttaaaatttgccggaaatgaaataaaaatgataaaaattttgtgtttatatttactgttataaatagagctgggatttttatgtgcttcctgaaagatgcaataaatatatgctaaaaatgcttgaaacttatatgctaaatagcaacaaaaaatgccaaaatatgtgcgaaaatatatgcctaaaattggaacaatcaaatgtatttatccataaaaatcccagaaaaatctcattattcaactttttcgcccgcacaattgaaaatcaaatacatttggaggtattcgggggtaattggtcctttttcccactagtcaaaattttggcgaggtcaatcagtttgtttttcggcgtttattttccaatttgcttgcatttttcttacagtttttctcaaaaatcgcgaaatatggacataaaattaccaagatatggatataaattttccgaattgaagggtaaattttccaaaacttcttcaagttacttaaattttattaaaatacatctataaatggctaatatggtattgaaaattattttagaagaaaaaatcacgataaagctaaatttactaatttttagcaaaaaatcaacccgaaaagcgaaattttcgcttttttgcttaatttgccataaatttatcaatttttaagaaaattgaaatttattcaatattctcgtgaaaattttgcttaaaacgatttttttttgaaattttccggttttgggggtccaaaaggccaatttagctgatgggggtcggtctaattgagggtttttggaaaaatcccaaaatatggacaaaaatgagaaaat

SEQ ID NO: 16670 - DNA, 3038 bp, Heterodera glycines
  unsure (1)..(3038): unsure at all n locations
cattttcctgcaaaattatttaaaantctgaaaaagttgcttactttcccagcaaaaaaaaaactttttgttgtgccgcaaaatcctcttaaaaaacgtgccaatgtaattaacaatgtcttggacaaaatattgtataaatttggaagaaattgttcaaatttgtaaaaaataaaataaattctaattttttttatttagaatagagtgcgccgggaccgggaattttgggcaaaaccaggaccgggacttgccgggacctgagaagccgggaccgggacctcgatttttgttcgggaccgggaccaaccgggaaatttctgttggagcgacccacaattcaaataattgtttatcattgggtccgttctttgaccgaccaaatattgatttgttcccctctcccatccaattccttccactcatgtccccaattcattccattccaatttgccttcgcattgttttccctcctatttttgctccattcctccgaccaaatatgtgtattttatttttccattttcttcaataaaaatattttattgtgttgtccaccggcacaacataattggcgacgcccgaactcaaccaaattacaagcaattctcgtgttgaattgcttgtttgggaaattaaaaaatctcgtgttgatttttaaatttcgcggaaatcatcaaaaaaccaatcacttatcttgtgtgcggttctgccgtgtgcaatttaaaatcatcaaacaaatcgtcaataaaaattcgtcaaattaccgacggatcaaacattggcagaaatccttcaacagctgaccaattccatcaaacaacagcagcaacaaatatccaccaccactcaaccaagtcaaatttgcactttgccggacattcatcaattttcggcagacatttctgaagaatttgaggagtggatggagcgttttcagtttgcgctggaatgcaatgcgccaaatatggaggacatgtcaaaggtcaagttactgatgacaaaattgtccccggccgcattcagcgaatacaaacgctactgcttgcccaacgaaattaccaaattcaatttttcaaatacaaaggatcgcctgctgaaattattttcgcatccaccgtccgtagcaatcaatcgctacgaatgtcttagagccagcagagaggacggcgaagaattcggaccatttgtgaaccgattaaaagcactgctcagaaagtttcgtttttcggaattaaatgaggagcaattcaagtgtttggttctacttacgtcgctcaaatcaccgagtgatgcacgacttcgccagcacatccttgctaggctaacggctgaagacgcgaaatccagcaaaacagcaaaattattcgatgccattgtcgatgatttgaatacgctgttaaagacggaggctgaagcgaaaatcctggagcggccaaatttcaaaatcaatgctgtccagaacaacgatggccaatcatctccaaatgacgcagcaaaaggcaataaatccgacaaaaatcgcaaattttcggacacctcggatggaaaattcctcccaacaattgttttcgttgcggagagttgcactgggcgcaaaattgcccaaataaaaatcaaatgtgcagcaaatgcaacaagagggggcacatcaaacaacaatgcgacaaaatccaggcctaccatcaaaataagaggaaaattcttcctaaaatcaacatggtaaatctgcctgcggctttcaaaaatcaaggcaaattttcgaagcttttgaaagcgaaaattttggtaaatggaaagccaatcaaattcaaactggacagcgcagcggatgtcaatgtcatcaataaagctgcattcaaggcaatcggccaacgaaaaattcaatattgtccagaggaggcacaattatttgatggcacacgtttcaaattcattggccgtggaatcgccaacttccaattcaatgggacctaagcgtaacaacaattttatgtggccaaaaatggaacaccaaatattttgggtgtggctacgttggaccaaaattggtttcctggaagaaatgaagcgcctgatcagtgccccgaatcccaatcaaattttctccgaaatcccggccaaaattaaagtcaaatttcaacggtcaagtgcgaaaataagaggggagggagccgtcagcagtaaaaatttcgacaaatttcgccctgtccttcgcacaccgactgtcacggccacggaaaatatctcaaatcaccggaaattcggcaccaaatatcaatttacactgccgcactacctttttttctttgtgttcaattccctaccatgaaattgatttattttaacgttttttcgattaaatctttaaatttaaatataaaaatatatttttcgctttctcgcctttgttgggcttctccttctcgcattttgcgcgaaaagcatgaaatttatgcacttttaatagttggggttagaggagtgaaaaatatgttgaaaattgagaaaaaacaaatttattgaaatttaatttaatttacctcttcattcgagaaaattgaatatgtgattgcttactggttatgcttcactctttgcttcggcttttgcattggttcaattccctcgtggaacattaattgcttttttcaagaatatttttaaagttattgaaaatttcaatataaatttatattgaaaattgttggagatatgcatttaaatttaataaatttgctatttttttatctatattatttngatcaatcgtccctcctccccctcccccccattttggcattatttccggttcctttgggtgtgccgtgcctttatccattattttgcttacggcttacaaattagcgataagaagccatccccataaattccgttttatggtggcccacaatgtcataaaattataaaaaccaaaataataaaaattanatatttcttnatttatattttggataataaatccntttgaaatcatgaaattgatagagcacaaaatgtcaatcatcattaaacct

SEQ ID NO: 16671 - DNA, 2253 bp, Heterodera glycines
aaaattggaaaatgtaaactcgcctcctttacgtctccgtcccccaccaaaaaagtacgcatccgccccttttcgccgtgctcaacaaatgcttcatccgatccgccaaattgcctgattttgatgacgacatgtaaaaaacgcaaagaaaaaatttcgtttaaaattttttttgctaaaaaatacagaaaatttaaaaaagccaattcgtacttaaacaagaaatctgagagtgcaggtaagtaaaacattagacagattgttcattacaaattgggggtcgtccgtttgggagaccaacatggacggtaaattttcaaaaataaggttttaactctttctactacatatttttcggaaaatcctcaaaaaattgtcaaattctgctacgaatcgaattaaaatttagaaaaaataatataaagaaaaagagacgaaaagaaagttaagaaaagaaaaagacacaaaggaagtacagaaaaagaagaaattagagggagggagggaaggtgtgaaataatgcactgtctgactgtctttctatgcggggcagcggcggaggatggaaagggcagacagtgaacagacgcgtgccgctgcggaaaattcataatttttaaaaattaacttttgtgttagaacccgcacagaatgacattttatggtctttcaatgatttgtgactaatttttagcattatattctattttagagcaaaagtgagaattaaaaaaaaaaaaaaattaacttttcgactttttgttcgaattcgtgtccggggttcggaattagccaatttgttaattatgcacatttgatcagtgaatgaaaagtttagcacggactcgacaataatccgttgcttttccgcttcaccgtgcgtttacaaatggacgtgaaatccatgcacctttttgcgcccattttggaggtgttcttgacaaactttggcaaattccttgctgaccaccgccgtttggcctcctgagtccggtaaaaaaaaatttccgggagcgggatcgggagttcaaaattttccgggagcgggagcgggatcgggaatcccgtgaaaatcccgctcccgttaaaatcccgcagaaattttacgagagtcccgggcgggagcgggagtaattcgaaaatttaattaaaaactaacaaaaatatttttaatgcacaaatttgaaggaaaatccttttattaaagaaaaaatagataaaaaaatttataaaggagaaatttgaaataaaaaaatcacatttatgggtcgaaaatcagtattttttcaaattgcttcaaataaaattttttaataatttatttgttgactccctttattaattttaacaattttttgcggcttattttttgaaaaaactttttggtgaccagggaggaagagggagccggcggtgccgataggcgccgccgagaaaaaattgatatttgaatacaatacagtgtcagattatgtccaaaaatagccaatttttgaaaatttgaggcattttttaagaaaattaaggattttaagattccggcggtgccgataggcgccgccgggaaaatttttttgaaattttgactatatatttaacagattttcaatgaaaaatcattatttttaccaatgaaactcaattcttaccagtgcatttttactcccgtttttgggtaaaaatttccgggagcgggagcgggatcgggagttcaaaattttccgggacgggagtcccgaacgggaatcccgtaaaaatcccgctcccgttaaaaatcccgttcaccgaaaaaagcgggagtcgggagcgggaatcccgtaaaatcccgcgggagtcccgatcccgccggactctagtgttgaacatgtttatatctatatttaaaatggaaacattggaacatataattaatgaaatcaaattgagctatattatgaaataaatgtgtacagtgtacacaatagagaaaggcaaaacaactttttcttatgaaaaaaattgtttcatctgggatcaacctttaaggggtcggggtcgttttcgtatgggccgttttcgtacgagcacaagtttttgactataacttttttctttgccaaccaaatccaacattgttggtgtcattcgatagccctatgtatcctctattagcctgcaaaatttcgaaaaatttcattaaggttcaaaaaagttatggccagaggaattcaaaaaaccaaattttccaacttttttggctcgcactttttttga

SEQ ID NO: 16672 - DNA, 1447 bp, Heterodera glycines
  unsure (1)..(1447): unsure at all n locations
aaagcgacgaaggataagcatcantctgctgatcatcccgttgttccatctccatctctccactttttattccgtctaatcatcactcatcgcttccctttcactattttctcccctttctcttcctcttctcctcatgtttcttgtttctctttcccttccctttccctcttttcccctcttttctctttccattccctaaattatcgttccgtttatactttttgattgttttgtttcgtcctcaaaacaaacaatttgttccgaaaaatgcaaaatgtgcggtccgtcgtttgtcggcggaagaaaccttccaattaatgtccgaccgtccgttccgtttttcccttggggggtctttttttcccttgtaacttttactttctttccgcagcgaaaataataaagaataagcctctctttcttttctatttcctctttgtcgttgactctttgtctcttcctttttctccttttccttcactccgtctctttttctttcccttttcctctttctcttgtttctttttcctttctcaattctcctccatttgttgctttctcttccttactaattactaatccgactaattggattaattgcggtttatggcgcaaaatatttttgtaaggtcattcattcgtcgaacgacggacgaacgacactttcgttgtgtccattcgctttttcaaaataaccgcccgcgggaaggctaatcctcgccgcatgtcaaagcgaattagccaagcaacggaaaaaaagacaaaacattacggtaatgggaggggaaaaagggaaaagggaaatgaggggagtgaccgccacgggcggcactttcactggcatttgcgcactttacaacgcaaatgaacagttaaagcagtgaacggtgtgcgagaaaattattgacacacaataaaaggggggggggggggtaattaagaaaaattggaaaaaataattaaggaaatgattttgaaagtgaaaaagacaatcagcaggcaaacaagggatgagaaattgaggagattttaatggaaagagtggccaaaaagaaattaatcaatccatgaaaagaatgaatgattcattgtgaacattatgccaacaattacgaaacacccaattgtttcttcaatttttggtaggatttgttgagggaaaactgataaaaaaatcggcggaatgaattaatcaaacgaattgttgagaaagggtgtccatggtgctgctggtcaagttcatcactgctgctgaagagaatccaaccgcaatttgttcggctcaatttcaaattccctcggaatttcccccccccccccgccaaatcgacctaaattaattttcaaattactcatcacacgcgggaaactccatttatcattcatttcctttccggttcattcattatttgcgtgaaaatggcgtataatgagaaaattgatg

SEQ ID NO: 16673 - DNA, 1512 bp, Heterodera glycines
ggggggggacgccgggggttcagagaatggaattgatcagacagacactgatcagcggacgagcagaagggaagaagcttgatcagaatggaatgggaggggaagatgcgccaatttggtgatgcagtgataaacagacaaattgtgcgaatgcgaatgtcgcgacatcgctttcacatcatccatcaaacgccccccccccccgcgggcaattggcggtcaattcgcaaaattaaaacaaattattacttaaaatgtttaaaacgctgaattttgtttaaaattaaaaaacaaatcaatcacttttattactgcgctaataattttgaatttcttatgcaaattcaaatgaaattaagtgtaaatgcgacggttgcgcaaacaccgccgccttttggacgtcgcaatttgcaaccaccgaatgaaagaaagaatgaatgaatggtccattctgaaatgttcagctctttatttgtttgtccatttacggcaaataaatgaaaagattaattgaaaacactaaaaaatatattaaaaggcatttttataattaaatgatgctcactaattaattcattaattagtgtttctaattgttgtccaatttatgggttaagtgtcaaaggaaaagggaagagaaacgaaggaaagaaagaaagaaccattcgcaacagcactcaaaagtgaacgaatttgaggaacataagtgatgactgacttaataatgcatttgaatggatgagagatgagctttttgaaaccatcggaagaaatatcccgaaatgggaaaatgaaacatttaaaaggaaaagcgaaaggaaaagcaaaacaaataaaagggaagggagagaaaatgaaaggaataaaaaacaattaattaaaattaattggttaagaggttcgggatgggaagggaagagaagagaaaggtgctgtgatccgtcgccgatcagtttcagtaatgaatcagtcaatcagtggttttgcgggggggggggggggagggaattgcgcgagattcgccgggggcgaaggccttccccaaggaggaggaggatgttccgctgctgtaccccgccgcactccctctgtccctctgctgatatcagccattgactgtcacgtattctgtgcccaattactcatccccccgggggctgatgacagtgtcagccgattgtgtctcagcggagtgaaggcggccgccggggtcacttttgtggggcttttttttgtctccgcggggcattttggccctcccgtgggctgttcacgtgcgttttgttgtgatgcttttgcttaaaaaagtgaacggatgtcggcccattcggtagctgattaaagtgattgatggctgagaagagaaattggaattatttaccaatcgtttcttcaaatgataataaattaattaaattgtaatatttgatggaatttctcaaagcaaaaaaaaacttcgaaatgccaacgaaagtgtgaaaatttggaaaggaaatgaatgaatgtttctct

SEQ ID NO: 16674 - DNA, 2069 bp, Heterodera glycines
  unsure (1)..(2069): unsure at all n locations
ttgcatgcnnctgcaggtccacaaanttctttcaaaaatgtccaaattgtgagtctctgttttgggtcggcgcggcaaaatcaaattccaacttggcattggacgagtcccggttttagggaccttgccaagaaaaatgtgtttgagggatctgccaaactttaaagattgtgtcaaactttgaacaatgtgccaaattcttctagtctcgaaagcggctcttaactttgatattttgttttgtcatttatcagcaaatcacaacacacacactcaaaaaattcaccacgaaaatgatttgtagttgttaaggaatgaggtgttttttttaatcaatcattgtagttgacatcatcatcaagcgaaatgaaaaaaaattgtttgatcaaaattttatgttgtctaagacacactgacacaatgaaaatcatttggaagacagcaaaagtttgaaagaaaaaaacaccggcaagatggtggtgaaaagtgtttgaatgaaagttggtgctgatcaatcaaaatagaagaaactgatcagcgccgtgatcagccgggcacatcccatcattgacgaagtgatcagtagccagatgcttgctgcttagcgggctcggctgccggcgctggcgccggttgctcggccgcgggttgctcagctggcgcaggcgctgccgcctcagccgcaggtgcagcagccgcttcaccaccaccaccaccgcctgctgcgggagccggagcggcagcctctggaaaaaaaaggctaaaatttcaaattcgattcgtgccacctccgccagctgctgcgcctccttcagcgccaccaccagcggccttggcttcatcgccatagctgttttggttgcgctttcgtcggtaaccggacgcttgctgtttcgcgggctcggccgccggcgctggcgccggttgttccgccgcgggttgctccgctggtgcgggcgcaggcgctgccgcctcagccgcgggcgcagcttctgagaaaggaatttaaattttatttaaatactgttaatttaaatttgtttgaaaagcatgcctcctccaccagatggggcaggcgctgcagcttcgcctccggcagcgccagctgctccttcggcaccaccagccttggcgcctgcctcatcgccatagctgttttgtccgcgcttttgcacttaattaaaattaaaatatttaaaaaaaaattaaaatttgctaagattttcgtacagcttctcgcgtaaattgcgctgacacacaacaacacaattagcaatttcattttgttgttgttgctgattattaagcttagtgctgctgtgttgttgtcccttttgggtggtttacgctttaaatttatttaaaaaatgaattttatttattagtattttttagtattatttatttatttgttgatttgtggcgtatgtcggctccggccaaccccttaaataggcgctaggcgccccgatggccttgtttgggcaagaggagatggaggcgcagtggtggcgtgtgttacagtcccaagcgcgccaccagttgtgcccccagggcgggtgtcattttgattgaacctctcgattagagaggggtccacccgcgccccgggggcaccataggggggcgggaccggccctgcccaactgtgcaccagcaaaatacaggtagaaaaagtttggaggacgatgacgggaggggctggggggacgacgacgaacgacgacgacaccgtgatggaacgaagttggtgattccccgccccctcccgggaagggatgggttaaggggggggggggggtggaaaactcgaatgatataataatagtcggcactgtgagtgtgtggtatgattcatggaagtgtgtaagacaatttgaaaatttgatttatgtttgatgctgagtaaaaagaaagctataaggtgtttagcccccgcccatcgaagtgggctgaggaagcgggactccaaaatgcccacggtgcataaaacgccatcaacattttcggcaaaattcttacaacaaaatgtgtgttgtctatccccgtctctctctctctctctctct

SEQ ID NO: 16675 - DNA, 1649 bp, Heterodera glycines
gatatcatttatatcagccctaattcattcaagttcacatgaattagtcccaattgcctccggcaacaatggcagacacaaatgccggtggcgtttcataacactaccgaattgacgacatactgtagctaatgataacaaagccctgattgatgaaacagagagcgttagaaagagagggagagagttagctaacatagaaaagagctagagagaaagagacagagacagagaaataagcatagaggcagaaagatttagtgaaaaattgattgaccacaaattgattgtaaaatatataaaatatgaaacggcagacggaagcagttggcgaaaatggccgtcggcggacgggcaatcaatcgctggcggcggcggtcggccctgcgccgatgtgccaaaaaagtgataatcgcttctcaattgaaacaaaacagtggcggccgcctctttaatgctgagaaaaggagagggtagaagtcaccccattccccgcctaattagctaattagggcgtgctaattattgcttttcctcggccccccctttcttcaatcatcattttgttgctaattatgcactactttctcgtcatacatttttcttgcccaagggccgacacaacaaacatttcggcaatttggctagacactctcttttgtttgtcctccttctcctcctccaaattgtttttggcgatggtttcccttgccctgagggcacaatcatcgtcatcatcagccattaattgattcatcatttttaaaaaacgccactccaattttttttcctttttgtgtgtagttgtgcgcgaagcgagcgaaaaattggtaggtaaatgagggccattaggcaaatttaaaaaaaaatttttgaggggggggggaggctaccaaattttttttggaaccataacaaccaaacaaataaacaaacaattattattaatgggagcaatttgggcacgtacacataactttgctgtgctgttctttgccgctgctgggctgtttgttggttggaattggtgttgttgtaatgtgtgacaggacaatttttttaaatgtgtgaacacacaaaaattggagtaaaattggagaataaggaaagagagatgcaaaaggcaaaacaaaagtaataataaattgagagagaaatgggaaaaaactccaaattcttttgaaaattaaaaaaaaaaattttgggccacaaagctaaaagagtgaaaatgtgaaaaatgggtttcagagggggaaagcatagtaaaaaaaatatatatatatatatagaccgaaatttgaagaaaaaaaaagccgaactcagacctggcccggatttacgaaatggacccggacaggtacaaaattctgtttttaacaggtttcggatcctgaaaaaattaaattgttctttgaatcaaatttcgaaccccagactcccccctccctccgctctcccgatttctaaagcattttgtgagttagttctacagcatatttttggatgaggcaaattaaatagatgttttattaatggatatattatatgtgaaagaaaaatgggtgatggatgaccttggaaaaaacaaatacaaatacatatattatgtataatgcacacaaaaggcgaaacggacgaatgaataatca

SEQ ID NO: 16676 - DNA, 3770 bp, Heterodera glycines
  unsure (1)..(3770): unsure at all n locations
cagtcggctcgcggcataaatcgggatgcccttntttggatccaaaaatagccactaaaggcttgtggtccgtttgcagaataaattttcggccgtacaccatgcggtgaaatttttgaacggcgaatacaatggccagtgcctctttttcaatttggctgtaattttgctgcgctggtgtcagtgtgcatgcggcgtgttcgaccactttttccttttgtccgggaatgtgtggcttaatgtggcgccgattccatccttggacgcatctgctgatacgacgattgggcgtgccggctcgtagtgggtcagcaatagatcggatgtcatcatttcttttgctttttcaaaagcattttgctgttcgtaagtccaattccaagctacgtccttttggaggagtcggtcgagcggtgcacgcaactcacgcatgcatttgacaaatctgccataataattcaaagcgcctaaaaatgatcggagagtgcttttgtcgatcggtgcgtgcattttccgaattgcgtctgaacgcgacgggtcaggacgaatgccgtttgctgacacaatatgcccaaggaacaaaagttcgggctgcaaaaatttgcatttgtccagttggatgcgaagaccgtactcttttatgcgcccaaaaagtataaagtgcggaaatgtgttggtccagggttttcgttgcgatcaatccatcgtcaagatacgcgaaaacaccagggatgccagcacaaatttggtccatcaaatgctgaaatattgccggtgccgatttgactccgaacggcaggcgttggcattggaaaagccctcgatgtgtgttgatcgcacacaattgcttggattcttcatccatttccatttgcaaatacgcatcgcgtaaatccaaatttgagaaaaattttgcgccattcagtgaggcgtaaatgtcgtctggccttggcagtgggtggcggttcaattccaatgcattgttgaggccggtcgagaagtcgatgcaatcaatcggcttaattgcgccaatttgaagaagacggtccaattcggcattcacagcttccatggcgccgtgtggaatggggcgagctcggcaaaatacaggctttgcatcagaccgcaaaatgagatgcgcctttgcctttgagcagtgtcccagtccttcttcaaagacttccgggaaatcgttttggagtgccgctttaagcgttgacacatcattgatcgatttgtttggcggcttcactgccgaaaaattgtcaatcacttttgtcgcctgatcagccgatttgctggacggaaataaaatttggcgggggatgacctccaaagcttcgatccacggcaatcccagcaaattgtgtccgacttctccgctcacataggcgatgagagtttgcggtggtttgtcggagaattggacagtgaatatgaatttgccgagcaaagcgaatggctggtcattgcagtttttggcatcgatgtcagctggagacagatccgggcttcctaactcctgccacgtttgcaaagaaataattgtggcttgagcgccggtgtcgccattcatggaagtttgccttccattaatcaaaatgcacaatttccaccatcgtccttgagtcgtgccgacatgcaggcaatttgcgtcgactttgacagtgtggaatgacctgtggttgttcggtggtgcctttgtcttctttgaccggcaaattgttgaaatgtgcccttttttgttgcacttaaagcaagtggcacccttgaatgtgcagtcggagcgccagtggtcggttttgccacatgatccacacggaagcgttggttgaccacgcgttggctttccgcttgaattggcatttggagtttgcctttgattggagccgccgctttgtctttgcgctgggtcggtccattgccgtggccttgtgcgaatggcgtttgtggcaattggtgggttgaccagcgaaagggcgctctccttgacaagctgaattgtccgaagttcctcctcaattttcttgagcgaaatgttggtgccgtttttctgcgcgtcctccaacattttcaatgccttttgtcgcaaatcatggtgttcatcgttgagtgcgatgaccaaaataatgcacttgagctgctcctttgtcagactcaggtcggcattttcacataatgcgttgatctgcgcaattagtgatgagatgtcttgcccttgttgctgtcgaattttgaaacactcgtagcgacggacgaacagcgagcgggtttcagcaaaaaggcttttgaggtgcgaaatggtgtcattccaattcacttggtccggctgtgtggggctgatcgtgtcccggtatttgttgtactcctcctctccaagtttgccgagaaggagtcgcacttttgaggcctcaggcagagtgcttccgtcgtcctcgatcaattttccgtaccgtttgaaccagcattcaaaagttgtgccgacctccggattgtaatggaacgttgaaaggcgagcatcgatggagcttgccaaattggcattgctcaaatttgccggtgtggcgttttgcggtgcggcatttgtgaccatttgctggagagcatttagcaattgttgaagctgttgcgcgtccatggtccaatggcttataaatccctttaatttgccgaaatcggagaaatgatgtgccgtaaaattggcttgaaatagacgataaccgtgcctcgagatttggcaaaaatcggttcttgtcgaagatgaaaccgtgccttgagatacggcaaagattcggtttatgtcgcacaaattgttgataaaccgtgccgtaagatatggcaaagatgcggtttagttgcacagattgttgataaaccgtgccgtaaaatatggcaaagatcggtttatgatgaatcaccacaagcaatatcagcacgagataaagcttggaaaataaacgctgtcgttgagttgctgactgcgccaaaatttgttatgtccgaagataacaaattaaataagtttatttgccgaagaaaataaaataataaaaatgcagagaaataaattgggaggtcaaaattggtgggcacaataaccaactgaatgaggggaatgggagggggaagatggcgaagtggcgtggggtcatacacctaatcaataattacttccttctctaacaggtgaagaataaaaatttttaaaaaatttttccttatattttggttatttcgttcaactttcggtggggtgcttggaacagtggaatcatgcgcacccgtccgatatggtccaccagcgggacgtggttgctcataacaaacattcttgtccaggacaaaatttatgccaaaattggcgattttgatccgtaccatttcatttattcggtgatgtcaatcaaacgcttttcacaaactgtttaaaaacactaaattattaacgacttgaaaatacgacgtgtgattagaatttgggattgggacgaattgttgctgttgttctgatcacttctgattattgagaaatgagcaaaaaaattaattattttactaatgtgacacttaaaaattgtataattttattttatattatgtgattgtctttacccttcaggcatacataattcccatgacaatctaaattacagttgtagccaaagtaaaaataaccacgatttaggtcggatgagattatcttagtcaaaaaactgtacagtatgccagagaatgtgctaaaaaaccggtgtgtttgacgaataaaatga

SEQ ID NO: 16677 - DNA, 402 bp, Heterodera glycines
tgatcgcagaatgatttacataaaaatgggtgaaatttcgcttaaaaatagctaaaatggaatgtagatcaaaaaattacttcgttgtttattcgaacgaattataaaaataatttccagcccaagttatatgaataaaaataactactatttatcaaaattactcaaatacatttatttatccaattaagaatgaagcaagaaatgcagcattgtgacgaggtgccgctatactatgattattaaaattaatgatgatgattagcgggattgagtgatggggaaaattgaggggagatgcataataagcagcgcttccagctgtgtatggttgggagggggggggggggggagggatgaggaaaggggagagattttgggcgaacgggacggggatgaaaa

SEQ ID NO: 16678 - DNA, 2298 bp, Heterodera glycines
atcccccccccccccctcccccgcgggggacgaatcgacggaccaacgcccccccccccctccccgccccttttcgctccgtttgaacccctccctcgcgccccagcccaaatctcgatgctgttatgtgcgggaccactactgaaattgcgttaaatattatgccaattaatgttgtatgaaaatactacaaatttaatgaattattaaatttcaattttaaattataaatatttaggtaaactaattattgaagtgttaacaattaaggaatgcaaaggagagctaaaaattgcaattgaagaaccaaagaaagccgagaaagtgatgctttttcaaatttacggtctttaggcaaaaaattacgcctgaaaaaatgaaaattattcgtaacatgaatattttagcgcaaagattttatttggcattctgagaaacttttgccgtttaaaaatgtcaaaaacagagcagtagcagatgcatccacatctctatgtattcaaaattggtgtttattgttgtgaattgaaaggccgaaaaattccctcccccccccctaaggggcacaaaagctacgacggcgcggctatggtccgaccaaattcagccccgagggcatcattttcttcgtcttcattttgctcgtcttttcggccgcccccgagggcgcagatgtgccgccgctgcagcagcagcacaaaatgcgattaccattattattgttttggttgttgttgttgcacatgcacacacattgaggggggggggggagagaaagtgaaaagtattagggataaaattaaaattaatttatttttatttttaatatttaccaccccttctctgaagaataagcggctcttatgtagtttatgccccaatattttttatatttttcatacaaagaattaaaacttataggttttcagggtcactcaccacgaattcggtatctaatccaacccattcataaaaaatgtgaattttaaaaattggcatttgatttttcgtttaaatacgggtttgggaatcaaattgggctaaatggatgtggaatcgttatgaatttgaaagaaacaaataaatttttttaaaatgaggatggaattacgtgggtggaaaggttaaattctgttaaagaaaaaaaaggttttctaattttgagtcacaatggttttttacactaaaaatgaccttatttagaaacaacaaatctcgacttagctgcagtcaagcagcaataatctgctaaataaatagccacgctcccatacttcagtggtcaagccaaaaaaatgaataaaatttggggcggcggtggatggcattttgttggtcaccacggcacggcaggtggggatcggcaccggcaccaaaatgagtgcttttttggacgggggggggggagggcagcacagcagcagctgaaatggactcataattggcacattttgttttgttgccaagggatgagcaagagagtgcctgctaataagtggtagtcccaaagacggacggacggacagtgccaatgcttggctgactgactgaagctaaatgaatcggggcaatacaaaatgtttggttgaacctctctcctattttggggggtggcattttgtggcatggaatgaatgactgctaattgtgccgtgccaaaattgttttttaattaatttgaagtgattttcatcgtggcataatgttttgccaagtaaacaatagattaatttgtactaatattaagtaggctataccacgtattttacagtatttttgttagggatttatgccattgggagcagttaagccgtgatgaaggggagaaataaatgttataaaataataaagaaaaaaaatttaattttaaaaaattcattaattcggcatggcattgcatttttaaaatggcttaaatatcaaaattggcataagctttttgcctgtgggcatgggtggccctcttccacccgtcagcaattcatcatttccgatgaatgggccaaatgcgtcccacggggctggaaactttggccaaatttgtttcccaagaggggtaggcaccagccaaaagtccacccatcataaaagcgtggaaaagataggaaaaggaaaggccaaaaagcgaaagatttaatcgatggcaaaaaataaacaaaattaacaattaatctctttaatacatttgcatttaaaatttgacgttaatgaaaagatacatttatttttaaaatttagaatataataataacccaaataataaatggaataacaaatatttataaaaaaaattacaaa

SEQ ID NO: 16679 - DNA, 1874 bp, Heterodera glycines
  unsure (1)..(1874): unsure at all n locations
tttggaattttttaaaaattctttattttttggcaattttttggcccttgggaaatccacgggctaatattggaaaattcatatctagcctaagggttgactaattttgagcaaataaagctttaaaaatagagaaaaatcaggagaattttatgggatttatttaggttttctaacatcaacatgaaaaaagttattccagaaattctggaaattttagatttttcagaaaaaaattcgtaactgccttctgaaaagctatttgagaaaagtaaaatactacaaaaatccgcaatttttttctctataatataaattttatatttatttgggacttctatcttccaaaataaaaaagttattccagaatttctggaaaaattcgatttttcagaaaaaaattcctaactccattctgaaaaagtattttataaaaataatatacacaaaaaatccgcaattttttgctctattttataaattttaatttagcttattatcaattttttgaaaaaagttatagaaataaaagtgattttggcattcgggaccaaaggggtgtgaccatgatttttgagtggaaaaattttttctccaaaaatcctccaaaaacatgtctttaggggttatttgggccgctgatcacgaatatgtaatcagattttactttagacatggttaagacctcagaatccctgtgtgattaaaattaaaaaacgggcgcgaagcgcccgtcctgaggccgcgaagcggccgaatgtcccccaaaaaattacaaaacgggcgcgaagcgcccgtcctgaggccgcgaagcggttgaacgtctcccaaaaaattacaaaacgggcgcgaagcgcccgtcctgaggccgtgaaacggacgaatgttctcaaaaaattaaaagacgggcgcgaagcgcccatcctgaggccgtgaaacaaacgaatgttctcaaaaaatttaaaaacgggcgcgaagctcccgtcctgaggccgcgaagcggccgaattcccctcaaaaaattaaaaaaacgggcgcgagcgcccgtcctgaggctgcgtgaattgctaaattacatcactttctagcgacgcggcgaagccgcgtcccatagcgcgatagcgctttaaaacttcacactaatgcaattaatgtttgtctgtttaaaataacaaatgagcatgtccattttctcttcatccaaaacccaacggcccacgccgcccccgtcaattcccacacgctagttactatatatgttatattgacaaggagtttcgttgctaaaaccattttctcccggccgaaggccgggagcgccctgaaagtagtggaagggtcttacaactttttgaggagcatccgggaaaaataagggttttccggtccggtggccaactgagtcccggcggctaatttctcacttttgcttgcatttgaaggcccctaactttttttgtaaaactcgaatcaaaaagtgcccgttgtgagggcactccgccaaagtgtcctctaaatgctggtattttttaaaattttttttgagcaaacccctggcctgcaaaaaatggcaactgaagcgtgctcaaaaagtacacttcagtaccaggtgaataccgcgccagggtttgatctgagcnggggggtggtcagcgaacttattgtagagctttcaaagctcgattttttgaaattttaaaatttcgaaaattttcaaaatttttcgagttaggcctaaaaaacggtttttcgggtttttgaattttaggattttttaacgatttttccagagaaacggagaccacttccaaaacatagtttttcgagctctatcgactggtatttttttcggaaaaatttcgattttttcccgg

SEQ ID NO: 16680 - DNA, 3900 bp, Heterodera glycines
atggtccattttttgtccgtcggatgtccgtgcggacttccggaattgaagagctgagatcctttctaaacattagctgtattttctcaaaaaacaaaagaagtcgtactcgacactttcactgctaatcgtggacagttctgatgaattatgcttcttctgaagtttctgttggctactgttgctgttactcgctttcgacaccgatttgggcgttctgctgggtgaagaggtcgactcatcccgaactaacgaattctgttgttttttctttgctgacaaatttcgcgacggcatttctcagatttaaataagttaaagtaaggcgtttttaaaaaaaaattgattgtgattttattgtgcttaagaaaattacgcataattttattcagtcaataaaatatctacagaagggcattagccacttactctgaagatcggtgaatacaaaaatggagaatatatggagatcacacatgaaaataaagtcagatcacaacaacgacatagtgataaataaatatataaataaaaatatttttctcatgcaatgtaaatatttttattgtatttaggggctttaacccattttatgactttgtttttaaaactacatatggaagatgatgccgtaattttagaatcaagattgttccattgttttattgttctattaataaatgagttttcggttttgttggttttgtgtttagatattaatctaatacaattaaatcttaatctttttgagaaagtgtaaagtttttgagggtctaaatgagtatgacagttgattattttaaaagcagtggtaagatcaataacttttctacgggtttcaagtctgtcaagtttaaaaagttctagtcttttattatatgagatgtatggaagattacattttttaagagctatcctggtaaaatatttttgacatctttcaattctgttaagtgcatttactgacttaggattccaaatttcagtggcatattctaataaggatctaatatatgttttataaaccaatgaccatattcttattgttttggatttaattaatttaaagagaattttatacggaaaaaggtattttttattaaatatgtaatatgttcggtgaatttaagttcattatcaataatgactcctaggtcacgcactgacttggcttcactaattgtaaaatttccaattttgtagggacacttggggttattagtccccaaataaagaacatatgttttatctattgaaaatttaataccccattcttcagaccactttaaaacattgataagtgccaggtccataatttttctttcagtatccgatttataaataacatatattttggtatcatccgcaaaaagcttaattccaattttagacggaatgtaagacggtaaatcattaatataaatcaaaaacaggagtggaccaagaacagagccttggggaacaccagaatttattttaaaaattttagaatatttttcattaattttaacttgaaaagttctttctgttagaaaatctttaatccaatttaaaacttttcccctaattccaattcggtgaagtttatataaaagtagattatgagggactttatcaaaggctttttgcaaatctagatataacgcatcaatgttttttctatccctgataccatcataccagtcttcaagggtagaaataagattagtgatagtagatcttttatttacaaagccaaattgaaattcagaaattaaattattttcagtcaaaaatacataaattcggtcaactaagattttttcaaaaattttgcataaagaaaaagtaagtgaaatagtctataatttttaacatggcttttattttcctttttatgtacaggaaggataatagaatgtttccaaatttttagtaatttaccggtgttaaaagatagttttgaaagatcagttataggccaacaagaggaagaaaagagattttaagtatttgattgttaataaaatcaggagccgtattattttttccatacaaacgattaagtttttcaaaaatatcagaaacatcaaaagttatatcagagcgacaaacttgaaattgatcccctcctgggtgaggagaagaggagataatatcatttgaaaaggtacgagaaaaaatttcgcaaaatattgtgctttttcaaaatcatcgaaaataaaaccacttcagtttcgaagggtggaatagaagtgctggaaatattgtattttttaataattttataaagattaatcggatttgcagaaaagaattttctttgtctgttttcgtaaaaattttttaacttggattttaatatgaagaactaaggaatcataaatgggtttaaatttaacaggatatttttttattttgcaccaaatataagctttttcttttattgatgatctaagtgctaaggggaaattaggagtgtctatttttgacaaaagtagtttttggaataaaatgttccaaagcattttgaatttcattagtaaaacattatatttattcaatgttttgaaaatacaatcctttagtttaattgaagatattaaatcatgatttgtaaaaaggcaaagatcaagaatttaatttccccttgtttatcctataattttagtgttaagtgaaaatttattaaaaaggtcaagaaaagttattcctagactggtatgaatataggtatattgttgacccaagttatatctttgctgtcaatgttaaagtctcctacgataattgtattgtttgttatatacttttctagaaacaaaaaaagagattttgaaggttttaatttgatacttgggggtcgatatagacacataatagttatattttttgtattttttagtttaacgataaaaatttcgcccaacttttgaaatagtttgtgtaaaatatggttcaattgctttattaattaacagggaagttcctccccctttacatttttgtcttatagcggaaaataaaacgtaattttttcgtttataaattggtctgagaaaattaatttttcattattagtaagccaagtttcgcacagacccaggatcattattcagcacttaactcattaattttatttttactcgagcgggcattgataagcaacccgttacagaattaggattatttatattggcataagaaaagttttgaaaggaggtatttgtcatttgtttagagtcagaggaaacaatgacaggtggaagtttaagggaaagcaataaatttttgttaggtgaaaatgaattgaaatcacgcccctaaacctcgttacaggtgttggaaattaggcgttttatgagagcaggctaggtgtagttgggaagaaagagcgattgtttttggcactgttggcatcatttcggagaatcactttcgaagcgtagatcgtttcatttcgtttcctcttgcattcctcatgcagaacatgctttgccgaacgaaagttcctcgagggacaacgacgggcgaacattcatgcgttcattcttggtttgcaaacgtacgccgaactgtcgtgacatgctttttccactttgtgagtacatcgcgctggaaatgacgagcgggaagcatcacttttaagaatcgattgcagcaccgtttgtgctgggtttttgaaagagtttcccattcatatacagttaccgaggaaacttggatgcccagctcatccaaaacctgttcgaccattgcattgtctcctgggcccgggcacttggttttgtcgcattgctttcaggcactcctccgatgacgaaactcctctgtctttccaggtcgtgcggtgtgagcaagtcgtttgtcattgatcgaagtagtgttagctgtgtaaaacaaacaaggagttgcgcttga

SEQ ID NO: 16681 - DNA, 1261 bp, Heterodera glycines
ggattcgagtcgttggcaccaatgtcccgttggaacctcccacgggaattaggcgcaaacataaaatcgctggtgaaactgtgactttccacgtaaagtcctgaaaattaaaaagcaaaaacgcattatttggtcaaatcggagttcacctgtcgcgagactgaaccaatttgggtacgattgggtggggaacacgggcctaagtgagagggcctccattccattctgaggcaacggaatgaaaatggaaaaactcggtcaaacctcgagaagtgtctttgctccgggcttcattctcgcgttggtctgattgaacagattcgcgccataccctcaaccaattaattaatgattcgttaatgggtcgtacacggcggacggggggtctgtctttcctttcaccccccccccccccgccccttctctctgtccctttctctccctctcttctctctgtccctttctctccctctcttctctctgtccatctccctatcaccccttatcttccccctcccccttttcacgttctctatctctctctttctacttttagcctatctctctctctccctctctttcttcccacacctcatactttcttccctctctctccttccccgtatctctccgccccccccccttttcttccctcgttatctcgccccctcctctctctctctttccctttatctctccctcccgcgcacttaccgtccaccaaaagcaaaatcagattctgccctgcgggttccttctggtaattgcaataacaaagctccaaaaagaagaggaaaacagcaaaagcaaagaaaaaagacaatcgccgcatcggaacaaacgccgcgactgaaaagaaaattaagcgaatggcgaaagaaaggaaaagggccaatggtcgacagaaaaagacatgtccgaagaagtttaaattgatgaggtgacatcgttttggtgttgtgtaacatcccaacccccgggggaattaaattcgaccgaatgggccaaagggaagcgaagggaagggacggacggatcagcagccgaaagccaacacacagcagcggcgcccccgccaccctcaaatcacttcgcccaagggctgctgcctcttctccccattccgccggctttcgtcggatgttttggccctaggcaattgcccttcccaacggaccttttgggtattaatccccccccccccattcttccgcatgaaccaaacaatcgccgtttgaaagacgaatggaggggggggggg

SEQ ID NO: 16682 - DNA, 2323 bp, Heterodera glycines
  unsure (1)..(2323): unsure at all n locations
tgctcgcgctgntttcctctcgatattttctcgcgttgccgctctttcgggactgaccaattcagaaagcctcaaaaaagttacgcagaattaatttgagtaaaatgagttagggttcgctatacaaaggttttttgttgttcggcttgaattttaggaataggaaaaaataaatgtgcttttctaattagaactatcgagtcatttcataattattatcctacgaattctatttaaaaaaatattttgcatttgatatcattagaattagaatacagagctgaattaattgaagctttataggcaaaaatgaaaaatttgataaagttattgttttaaattttccattttattggtttttaaagtcaaacacaatcggtctaaaacccgataaaattatttataagtttttccgagaagcgcgcatcaaaatatagctgacccattaggctttagaagaacatcaattatgtcgagaaatagttgataattcaaaagtttgccaattataatcgaagtggaaatatttatgaaacgaccaaataattaaaatgagagagcctagcatatgttttcagggagcaggtcgttgtttcctcccgaaaaatttttaaaaaatttttttcaaacctagaaaaaatttttttttttaaatttattcggggggggggggggaatgaagtgcaccctgttttcatgccaatagctatttccaatcggttgcattaattttcattgtcacctcaaaatatgcgcttccgccttggcaagagtgtacttccgattctcttcttttgtgtcttcagcggtgagttttccatttccattgacagcatttgaaccatcggagcttctggtggaaaataaacggaaagccctttctttcacagtcctaaatatgagttgatttggtaatagtttatgtgtgttattttgaaaagagacaacaaaccctccgcatttgagtccgagtgcgattaacgccgctttgagtcggtcggcgcctaattcctccaattcctcggggctgttgaagttggacacatcgatctctgcggacggttgcgcgaactttttcattgcgccgcttggcttttcgttggaccacccaatcactttgccttccttcaatttttcttcaaaatcctttaaacgtatacaatttaagtccatgattaatttttgtgtccttttattaatttactttgtccacacgatccaattccataacaatgtcaatgagtggcttggcccgggaaatgaaatccctcagatattcctccagagaaaggacatatgttttgtaggcacccgtcttcttcgttttttctctggaaagttcgtggagatggtcgaacttcgaaaggtatgaaatataatcaacacgctaaatgggaaacacgttaatacaatagttaaatgttgaattcactactcacagtgacttccttcaggttaacatattgctcgtgcaaagaatggaggtccaaaaactttccgtatccctcctcatccgtgaaacggaccatctccttttctaatcggtcggggtcctggatgaaattggccatctcttgaaactcaattgtcagtgttcgagcagtgtcgtttgggttttttcgatgaacatccttcaacgtttttaaacgagaataaaactcggcgaattcatttggaccgccaatggattggacttctttgctgcgttccccgtgttcgtctttgtaggcattgattagcttttccgtagccaattggtttctcttaacacacagttttgacattacctattaagaattaaaccacaaattacctcaatcaaccgttttatgcgttgatcggaattaattctttcgcgttgctaaaaaaagttccaattactaaatttataattttcaaaaaaaaatttttggaaaataaatttgttttataggttttcggggtcgggaaaaccgattctagcatctgttttgacccaattcgaacccctaacccggattcgaacaaaaaagtcaaattccatttttcaaaaaaattcatattttatgcacaaaatcgcttcaattatttaaaattggttaaatggatgtcagaattggttttcccgacccggaaaacccctaaaaatcaattgtgagcaatgaacgtgaattttggtgaaaagaattttcgactttttttcgaatccgggttcgggttcgaattgggtcaaaacagatgccagaatcggttttcccgatcccgaaaaccctaaaacaagtttattccaaaaatttttttttgaaatctgcacacagataacagacaagtaccaaagaacatt

SEQ ID NO: 16683 - DNA, 1288 bp, Heterodera glycines
agcagggctgcacgcaactggatttgcaattacggaaatccgtaatccgtaattacggcgattttctcagttacggaaatccgtaatccgtaattacgggggtccaaaaaccccgtaatttcccgtaatccgcaatccgtaatccgtaatttttaaaaatcaatttttgtcagaattttagaaaaaaaattttaaatagtgattaataaaaatcaaaaaactgattttcttgatggagtttcttcattttttatttaaattttacaaataatttataattttgtgtctgatcaaatcattctttttgaatttatgggttgatttttgaaaattttttaaaagtctgatcattataatcggatttatgtatatgtatataattatttcaacattttaatagccagaaaaaaattacgggtggggggaatccgaagaatttttttggttaaaatttatttagtgttatttaaaaaagttcagcgccggacagcaaaaacaggaattgtaaccatttttagccaaaaaagactactttttgccattttgtagtcaaaatttaaaaaaataaggtaaaatcgagtaaatcgtggtccggcggtgccgataggtgccgccgggcaaattttttttttaattttaatgattttattaagaaaaatcgacaaaaaaaatttaaaagtcccaatttttcctgtaaaaatttttaatttttcatttcgggcgggggagggggggggggggggaattcctcccctcacctggctaaggttttatgaattttcataaaatgcgtgaaaaataggtgtgacaaaaaagtgatgcctctattttctaggcgaactacccaaatagccttaacaacaacaaataaaaaattatacatttattttaattcttaaataaatcgaaatacgggtagccctttaaataaaaaatagaaaaatttttttttataaaaataatcttacaagaaatcgtctcgaaaaaataatccaaaagtcaaattacggatcaaaattacggaaaaatcccaaaaatccgtaacccgtaatccgtaactcccaaaaccccgtaatttccgtaatccgcaatccgtaatccgtaattgcgtgcagccctgatcaccactgtcgaaaactaacagcaccaggattgagcggtaccagtactggtactgaaaaaagcgtacaaatgagtaccggtttttccagccaaaaagtaccggtttttcaacccgaaaattaccggtaccggtttttttacaattacctgttaccgctcaactcta

SEQ ID NO: 16684 - DNA, 1761 bp, Heterodera glycines
ggaagaatccggaggagatcatcgagctgatgagcaggttggacgaccaaggtgggcctttttacggaacaaaaaatcatttgccaattaatctgtgcatttgtccgttcagagttcgacccgcaaagggaactgtcgctgaatgtcatccaagaaaagaggcacaaactgcgcggttcattcttccaggttgattttttagaacaaaattcaacggcggattttagggtttattttcattgacttacattttaatggatttacaagttcattttatatggaaaacattgccaatagctaattgaataatttaaataaattatccctttttcatttacgcaggtagtcaatttgtacaagcaggaaaaggatgacaagcgagtgaaaaacttggagaaaatgctggttgaatatgaagtggaacgtgccaagaaggaggagaacttccgtaagttctattcatttttagcaaaaataaattgcaaaaaatggattttttcagaaatttctcttttattttattggaatttcaattttttaaattacatttgtttttgctctttaggtgcccaacttttctcggaaaatgccaattttgaggaaattccgttgccgttgggtgcgcctggcgctatggacgctgccaaaacacccttttctttgccgctgccgaccggcattacccctggggacgtgccgctgccgtcgggtgtccaactgcaggcggcgatgcgggccggcattttgaagaagacgggcgcgacggcaccgtcacaaaaacggcacaaacatccgccaggcgagccttccattcttttttcgtaaattcaatttgttgttttgaatggcgctttttcaggccctccgccccggtctgccgcctccgctcgccgtcgccgcttcttctgacagcgacggggaagacgcggcgagtgagcgcaggcgcgtcgtccgtttcagcggcgacgagcgcatgcaacagaaaagacgacgagaaaaagatggagacgcagagggagacgacgacgaagaggcggccgaggaggaggaggaggactacgcaccggtggagagtgagtcaacgggggccaccattcacttttttgagtcccggcaaaaaatatgccattttcagtccccgacagcatgctgtctaccgacacgatgcccccgccccaacatcagccggtgtacgccagggcagcgccgccggtgatgccgccgccatcctcccaaatgccgtcgatgggcgctggtggagttgggcgggcaccgctaccgcccggcatggcaccgccgcctcccggttaccccccaggtaaatggtgttggctaaatcgaattaatccgcgcaaatgctactttccccattaggttactacgcgtcgaatgtgccgccggaagtgcatgcgcaagcgatgcgcacggggcgaatgccaccgccgcccaattcgtcgttttcgatggccgcgcaacagcagcagcaacagtccaagactgggctcatctcctacacacacgctgaaccgcacccctccgctgtcatttcagccgccccacaggtgaaaaacgcaggatttatcggaacccgtcagttgggccccggcacgtttgggcccagcggttttttggctataactttttgatttgtcatccaaatcaaacattgttggtatctttcgaaagctgcaaatgtcctctattagcctgaaaattttgaaaaattatgtaaaggttcaaaaaaattatgccagaacaact

SEQ ID NO: 16685 - DNA, 2437 bp, Heterodera glycines
tgctgtaactttttcccggaccaaaacaagttttaactttcaaatatgcatagtatttttcgaaaaactgaaaaaaagccaacacaaaaattcgatggatgagcagggaaaatttgtcgggagtattattcaccccgaattttaatcttaattattaatctgattttttccactcagcaggaaatgttgcctgttttaaatataaaaaatgtatttgttattaaataatttttattccaaaaaaacctttaaattaagaatattcatttttgtttttctttatttttcactttaaaattaccaaaattttgcttttgaatttgtgccgtcgcttcgttatgcattgaaatgaatctgttgtaattgtctcattaattgttttttattacgtttttctttatcattgtaataaattcaacgatatatgcacattttaatgacaaaatcaatgtcgactttaataaattttataacaaaaaaaacatttttctattaaaaggattagcctaaatcgattaatattttttcttattaaaatgaatttacctttttcgtcgttttttgtgtgtccattaatttgtctgttttttgtaaacaaacgttctgtcgcattaaaatttatcaaataaataataatcggggaaaaaataaacaaaaatatatattttttgttgttgccgatatccgctaattcatcggcattggggcagtgtctccaactgttgtatttcggcacattttcaaccagctaaaaacactgccactttgccaaagaaagcgatcggcataaaaaaaggataaaacataataataatgttggattaagcctaaaattaatgaacaaaaaagaaaaatgaaataaattaaattaaaattaataatactttaaaaataaaattgtaggtttgtgaaaatatatgttttaagattgaaatggattgtggaaaggagaattaatctaactaaataaaagaatttgaaaaatatcaatcattcttctcaatcgagaatgtacaataaataatgaaatatataaattattgcagccatatattattaaataaattttttataagttgctaaaatcaataaattttataaaacgaataattgtaatatgtgatttattttttcacaattctccattttggataaataatatatacagcattgcttttaaagttttaatttgtcgcttttcgttttgtgagtgccgccatccccaaattattcgctcattttcccgtcaaatgcgtttttttaatagaaaaacaattaatttttttgccctcccaaaaagcctttttcgcgtcatcattttattaatttaaatatttatgcattatgatgaacataaaaatgcacattaaaattaaaatttgcttgtgaaatggcgggacggtggaggagaagaggacggaggcacagaacggcgcccgcctcaaataaagaagaaagagaacggttggttatgcggcggcgcctgcgtctgtcacacgcatcccccggggcggtggccccttttgcttttgccattccccccccccctcccccctctcccttttatctcgttctcatctgccctctcttttctctcttactttctcaattttctcagtctttttccctttttctttcccttttctctgctcttaccctctctcctccctctctcgtctgtctccctttctttctttcccttttctctgtctctctctttctctctcctctgtgccctttctcttctccctatcttttctttgtgtgccttttgcctcacgttgtcacgttgattccctcctctccatcatatggctaacgtcagcaaagaaaaaaaatttttttttaattttctctatgtttctgccgccgttaaatttcgacgttcattttttctctcttcggcacgcttcaccactctctgaccctttttttcctctcttttacctataccttttctttctctccctctctctttctttcttcccgtgtctctcaattcaacacattctttcctccattctcgtccaaattgctgcctctttgtccctcatttcgccgccgttctgtcggtcgttgttcgtcggcgttagcaaatgttaaattgaggcggcgaacacatctgtgaagaatgagtgcggcaagtggtttatgttcttttctcgtgcttcccaatccgtaaatatttatttgtaaataattgacgagagtcttttgactctctctttctctaaatgttttccgaacattaatgacataattaatcaattgttctccccgagtcagttgttccccccctcccccaatttagagtgttgaattcggggccattcttggaatgcgaaaatattcaatgtatctatctatctatcaatggcttaggctgctgatgctcgagaccgaaaatatcaaatgatttgaccccagagattctcga

SEQ ID NO: 16686 - DNA, 867 bp, Heterodera glycines
tcactaattgcctctccgatcactaattaactctcgcatttcacttgtttggttctacaatctcttttcccctttggacacttttctgactccctgctcttctactgatcactcttttataactcactattattcattgactctctttctctcttctgatcactttctgttcctctccccccccctgtctgatcagtgagtgttttttttgtttttgtctgtcccttcatttttctgccattttccttctcctccctcttcagttactctctcgtgttggtcgacgttgagctgatccgtcgtcaacagcagcagcttttgctcagtcgcaagcgcaatttgtcgctgcagcagcgccgcgtgtccgcctcgtgcgccgcgggcaaaacgcaaccgcagcccaagcggagcatcgccgccgcaatcgcagtttcgggcgccgcttccgcctttcttctgaccggcggaattgcggcggaaaaacagcgaaagtgggcgagaaattttagagttttttaaattgatttttaaaattttgggtattttaaaacaaaaattggaaaataatggaatgattttgaaatttagcgagaaaataattgaggaaatggaaaagatttaacagctgattggattaatgtttgcctttggaaatgttgcgtcatccctccgatccctcgggcacatttttttcttgacatttccttttttaaatggtccgttccgcctttaaaacatttgccaaattatccggaccgcatggtcaattcaaatcaaatcatgacttttctccggggattcattcgtttccaaattagtttttgtctcccaccccaaaatccaattcgaattcacatgccgtccaaa

SEQ ID NO: 16687 - DNA, 1757 bp, Heterodera glycines
ccccccccaaaggaatgggataaagtcccctctgtgtccccccctttttttcttttcgggggttttccactcaatttcgctttttccgtccaaaataagtgaattaagtgctttttggaccgggcagaagagccccgcgtcaccgcactgaatggccctcttggaaagcgaaatcccactattctcgtatttatgggggagggggcggggaggacaaagggggcagtgccatccccgacacggggaaagacgaatggacagtgccatccccggggacagtgccatccccgaccggggaaagacgaagggacagtgccatcccagaaccgactttccaatcccaccagtgtaatcccttcccatccaatccccgactttctccctcttctccccgtccgtgccgctgttccttcaccgctccatacccccccccccccccgccacctttcttttgtcctttcccgaacacctttcttcccccttctttctcggcacctttccctcttccccgaatgggccatttgcccttcttccaaggcacgacatttggcactgaatgagaagatgtgctttcctggcacagaaattggaaagggtgggccggtgggaagaacaaagaagggaaaagcgggtgccgtgccgttgtccgttcggccgttcatttgttggaccattgtgccgttcttgtgcatggagggggggggggggagcgatggttccaaatttgtatctttcccaccccagaggcgaactcaaacattttttaaatatttttagttccttaagcacgccattcagtcacttttcttaaagccaaagtgcccttctctccgcttctctgttcgttatgccaaattcagatgtttttttcttaaattttaaatttttgtatttttcattaaaatttacctgaattcagtgggctttatttagcaattttggttgatattttggttttttcaattaaaatcaaaatcgaattccctttttcaataagcaactcaactcaattcgtgccgttaaatttggcattttcaaaacatggcatcctaattaattttatttgtcttttttctctaataaaaatattattaatatatattttcgtttcgaacaaaggcgttttttctctcttttttggtgccgcttggcacgacaaattgcacttcaatttatttttattttggcacgtgccatgtcagttttttacatgaaaatttgttcatcaattttaattttctgctgcttcattatttgacgggagatccttcaaaataaaacaaaaacaaacaaacaaaaaaacagcagaattcatttgtcacgcgtaaaatgaaaattaaaaaaaggatttaatttaattccaatgggggagggttctttaattagtgttaaaagtgccctcttcagacgctttgctttggccggcatttcggtgccaatcatcgccgccccgccgccgccttccaacggcattctgccaaagacttcgtccacctccatcacttgtgccaacaataacaacaacttcgtatagccaagaacagaaacagacaacggcacatttcatcaccttctactgattggcccccttaaattgttctccaatctaacaaattagcacatttgtccgacacttggcaggtgatcgatcactgatgactgatcatggccattggccaatatttgctacttttctcttctttttctctaccctttctttgtcgtctctaattgcgcattatttcttccctttccat

SEQ ID NO: 16688 - DNA, 3055 bp, Heterodera glycines
gaatagacccccaaaaattttcagaaaattttttaaaaggcatttgatcactgatttaattatgatcggtcggtcatttcttattaattcacaatttgtcatctcctctcccaatcgatggcaaagcgaatggcaaatttttctcctcctaacaacactgcccccaaaaaatttctgtctgaccttgaccaactacaaatccccaaagaaattgacactgacaactccattcccgactacgccaagttgcttattaagcagcttcactcccttttaagcaccgcctcggccctaattcattgtcaggttgcggctgtggacgcggtcgaagaggaaagacgactgagaactgtcgttgtgacaaatgtgcccgaaagtaaatcggacaaagcggcggagagagcccgggaggaccatgccattgtggaccacatgttgaatgccacggacgtcgaccaggcaccaattgtcttccgtgtcggcaaaaggatggacggtagaccgcgccctctcaaaatggaattccccagcaaacatgcagcgagacatatcatccgcatgcgtggaaaggtgcaagccttgaatggtctccacaatgtccgcatccgcgaaagcatgaccaaagaacaactgtctgagcggcggaaattgatcgaagaatgcgggaagaaaaggcaggcggacaatggtgattgggtgatatatgccaatcaagttgtgctgagacaagacattgaccaaattcgaaaaaatttttaaattgtccaaccaaatcacttcaaattacccataattattacacaaaggtacaaaaatttttccggtcagtaaaaaatttttacaaaaaaattaatcatccaaattttttaataaaaaataaagggaatgttaaatgctgtctagtaaacataaggtcaataatgaataaaatcgatgaaatagcacttattttagaaaccgaaaaaattgacatccttttaattactgagacttggaccaaagacggggaagaaatcaatttttgcccttgggtaaaagatcattacaattatattttttcatcaaggaaatcaaaaacttgtgggggcggttgtggtattctaatcagaaaagaaattggattttttacaaaattttcggattcaaaatttaattctgaaatcttagttattcagctgcaaaatttacagtgtatcagatttgttttggtgtatagaccacccaaaacaacactcaagcaaacagaaaatttgtttaaatttttgcaaaaattttttaatgaaaatacagtgactttaggagattttaatttaccgaataaggatttggtatggaaaaatgggcatccctattcaatgagtaaatgtggtgaaatattttgtgactttttcaatagattttcttatgttttggccacgaatgagccaacaaggattaactcctggctagatttgatttttacggccaatgaaaaaattattactgattgtactgttaaaggaggcatattttcatcggatcatttaacacaatttttcacattaattactcctaaaacaaaaccgaaaacaaagatcgtaaactttcgttggttttgtccatcgaatgtgttacattttaatatagtcatagcatcaaggctaaatgccttgtcatatgaatgctttagcataaatcaaaaatattccgcctttaacagtatgttgttagaaattttaaatgagtgtattccaataaagcgtttaaccaagaatgatttgactcctaaatacccacaacatttattagcatccatcaaagaaaaggctaaattattcaggcaagctaaaactgacccatccaaaaaagcactatacgatagcatttcttgaaaggggccaatgacagcgcaatggccaaaggaacggctgagagagtcgtcgtcgaccttcgttaaatgaatcaacggaatgattgttaaattaaattaccattttgaaacattgccgaagtgaatcttccaaattgaaattgtaataggcactgtgacagctgaccaaactgaggggcgaatggcgaagttgggcgaggagagagtcgaaactgaaaggggcggtgggggggggggaaggggcgaaggagacgaacattgcgggacagccccgtgccatcacgaacattttctccaaaagtgcgaaatttccgcccgtctcacaaagaatggcatttatccgttcggccgaaaatgtctcctaaaaatgagtggtttcttttttgacattacaacaatgtcttggcactttaatgccgtaattcagcgccatctgtgccaactcttcgccggagcaattgtcggacggcacttcaaatgtttgtatattctccaacccattaaaaagtgttctgctggtgctggtggccaaaattttgcacatttttccctaaattggttaaccattggaaacgcaacaaaaccgttcaactcactttgatttgatcgaagaatttgacactatcggccatttgcactccgtcgacgatcagaagggtttttgcctaaaataaaaacgatttgggaagaaatttgaacaattttgcaaacaaagttatcgttgagcagagagtgcagagaatgggcgacggacgaaagttcgccgcttttgccagccgattgcgagcatccgaaaaaagcatcgcactgaaatgaaaaggcactcaaaaggagtgaaattgcgtctcgcgcctcgtccatttgcgaaaagttcgtcggagagtttagtgaagccgccagcaaaagagtgtcggccgccaattgactcaattccgccggatgaaagcgtcggtcaaagagttattagataacagtgattagataatgtttatttaatatagtattagaattggttttgcttagacaaatctgttgttctttgggttcctcagatcagtacgaacacaattcaaagtaagtcattccttttaatttcataattaatcttttctacaaaataattgttcataacacaatcgtactacctagcgggggatgcgccgaaggcgctgacccccgctagtt

SEQ ID NO: 16689 - DNA, 1062 bp, Heterodera glycines
tacatttcattcattcattcattcattcacattcatttgtcctgtgtatggatggatttgttgtgtttcttggcgaagtggcgcactcaaatcgcttcagcgctttgttcagtttaaaattgttcaagaaatatgccatttttgggtaaaaacggggccggcattttaaatcgattttagttaaattttgtggcattaaaattaataaaaaattaaatttaaatatttttttatatgggcgaaggtcaaaagatgtgtcacaccacaatgaacgagcattctttcttccgccaatcagcccaataacaaatttccattcgcaacgcaattttatgggtccattcattcattcggtggtcgctgaaaaatcgggccgagcccatcaaatgtttacgcatttggccttgggcggtttcacgccgctctttggtccgttcggaattttctcgttccttttcttccttttttttatcaaaacaaatataaaacagcacacttttaaatgatttgaaatttattaaattcctaatgccgattttccgaaatcattcgagtcactcccattaattgtcctctattaattactattcatcattcacttatttgttagctaaaaaattccatattactttcaaaaaaattacaaataaaaaaattaatccaattttttcgaaatgaaatttttgtttgaaattttaaacttctaaaaagcagtgcaaaatgactaaaagcgaagtacttttgttggggtaccgtacctcagcacagcgctaccgtagatatctgttttttaacccaatttcaaatttatttattattgttttcttttctacaataaattttcttgttttttcctccgtgccctcttccccctctttttgccactcgtccatcccaatccgtccgtatttgtcccattgccggctcgtcgtcataaaccggttcccctcccccccccctccgcccccaatttgctctccgatttccttgcttcgcctgcggggattattttccgaatcgtgtgaggtgtgggcgattgctgtgaggggtgagcagagaccc

SEQ ID NO: 16690 - DNA, 2040 bp, Heterodera glycines
  unsure (1)..(2040): unsure at all n locations
atattcaaggtcaaaaatcgggattcaagaacaaattttggatttattggccgagacatagccattttttataataaattttggtttttcactttccaaaatattgcgacaatttgttgcttttcatttcccccatttttgaactgtctccccaccccccccccccataaattccacgcttttcctcccccccccccccaatccgacaaaatcaatccgcttttctacactttcttcgcgagaatgtcgtttcgttcgttcgttcgtcttcagacattcccgagaaaaattaagggggaaaaatagggagcagaaggggtgggggggggggaaggagtatttgtttgtttgtttgttcttgacgaaaagattcattttcagtcgatggattgcctttttctatttttattggcctaagaatgttttgtattattacaatgagagaatcagtaattatattgggacagacaatcaattatctatggataattattctctgatcaagattctaatcagtttgatcgggaatttcataattaaactctttcattttcttacgctaatatcccaagtttgaaaaaaactgctctaattaccttccaaatttttttttctatttctaattagttccttataaatgaattagcccataaaaaatatttatgaaaataattaatgttttagaagagagataatttaatgatttaatcgattcaaatcgtaattaagtgataaatggaatattttattggccattatcatggccatagtttttgtttgcttaacccttcttcttctgactgcaattctctcttcattatgacaagaaattttggcttcgtttctttctgatcagtcaaaatgccgacaattcgattgatcgatcatttcccctaatcatttctaaatactcttaattgttaatgcttacttatcagtccaattatttcttgaatatttttaaattcttatttttgccttattttgtctgatcttcccaattttcccattctcaggccgttggtcgtcgactgatcattcccgcaattccctcccaaaatgtcttcggaatacgaaacgaccaccgaatatcgttcgaccattcagccgaggtcggcacacacgcaaagtcgccagtccagcgccgctttcccctccggcggcggcacgggcggcggaggtgggcaaaaatgaaaaacaattttaaaaataaaattataaaaatgtcatccaaaatcatgaaaaatgaaaaacaaaaattaaacaaaaatcctgcaaaatttcaaatgcaaaatctcgggttcatttgcgaacaccagctgaagtactttcaaaacaccacttgatctcgaccatcatttccttggtgttttcttcccaaatttttcgcttcgccaatacccgaaagggaaagggaaattgccgtgccccgatgtttttgccccccccccnccatttggtctctgagttggtcattggtttgtgctcgtcataaaattgccatttgccaagtgttcctccgctgcttttccacacgctgccatattcaattatcattgtttgtttgtttttttgttgtgctcgaatatatgtcgcgctgttttgaacccatcgccggcggtgctctaaaaatggtagggaattcgacggcgaggcgatcgccccgaggcgccccctaattggatcatcagcagcagcacattccgtccgtccgtcccttcgtccactcttcgccgtcgtcgtcgttttgtttgtccctccgccgccaatcggccgcccccccgtccaattcattcattacacaaaagagcagcgcgcaaatgaggaattaattaatttgaggagccaaaaggctgccgacgactcgtccacccattcattcgttcattcattcgtccatttgtcaccgcagtttttgctgatggggcgggcaaacccccaaaaattgcgctggggaggcaattaatgaatgtaatggtggggtgaatcactcgcgcaattgggggggcactgaggagaaaggcgacggctaatcaaaag

SEQ ID NO: 16691 - DNA, 2394 bp, Heterodera glycines
  unsure (1)..(2394): unsure at all n locations
cagatgttaaaatcnagtcaaagagagagatttttgaacctgctaaggtaaaaatattttaaataaagacataaaaattaatttgagttttaattgccaacatgctaacatttccaaataaaagtaattcaagtttaaattgcaaatacggtattttttttcatacttcacacaaatcaattagtcagattttctaatttcgtaatagtttggaattcgccaaaagcaataaaaccgttgatttggggccgaacgatgacccgtgattataagtcaggcgccgactggtgatcacaaggggtcgcctgggtaaatttcgagggaaaagcagagttcgcgagtaattaatgagcaaagaataagaaaaatcttcccgggtgatcacgagaaaataacaaaattggaacaattaaaagaaatgaaaaagctttgaagcaattaattagctaattatcggccgatatcacattaatgacaaagactaaaaaatgatgaaagattaaagttttaatgggccctcgaaagccctaggcattcatttgtactgtggaataactaattggcgaaaaattcgacaaattgctcctcttgtcgaaaatcacatattagaaaataataataaaaattaaataatttctaaattaatttttttaaattatcagcaatacagtaattttgttctaccgtaacattttataatttagacatttcaaatttgtcaaattctctcaataaaccgttcaaacattcattgccgtgcactgcgaagttttgctgcaactcatcgaaagctgtttgtgccgagaaagcgttgaattgttcccgtcgctgctactgcgctggtcgaagtcgtgaattggtggacacaaatcgccggaggaattgcgacaaggacacacaggccaattgtgcaggtggaattttctgaccaaattcacacaaagttgagcaaacggaaaaatttaaataattggacggttacacctgtaaattgagtgtaaatttttccggtgaattaaaaaaaaaatcacaaaagggaaacaaaattgaatcgacttcggaatattcccgaccctttaaaaataaggaactaagtaggcaagaaagagataagagaaggcttgaaagggagaaaaagttgcaaagtgagaaaattagtgacgaaaaagggcaaaaaatcgaaaataaaatggcttttcacaaatttctccgtgaatttaatatgctggcgacagcatcgaactggcatccaccggactgcgtctgtcttttgccattatttttagaaggggaaaccaaggagatctatcagaatatcccggcaaataaaaagaataattggcgttccttaacggaggaattggccacaatgaccaaaaaattggatggcccgatgtgggcgcgaaaaatgttggcaaaaattaagatgggcacagaaagtgtaacggaatacgccaacaaaataagagaaatggtggaaattgcttctccggacccgcattacagtaaggaagcaagagaaagtgaaacaattcatatatttcatggcgacccttggcggcttccagttcacccagcagcagcagagaagcgaaaatgaagagagaggataaagctggcactggaagtgatcgaatctgcaaccttcagccgagcagcagctgacgcagagaagaagaagaatggacgaggacgtccataagagaggcccggaatgagatagagaagaagaagcttccccgagaggaagattaatggatcaattgaggcaacaattgatcctatatgatcgagcaaagtgggaagctggagagggcagggtcggtagttcagctggtagaacactggtccggaaagccagagacgccggttcaaagccggcccgccccatagtttttccctcaaaggcttccccgctcgttcatatatttcaatggcatcggagaagtgggagaagcggaaggaacgggggagggagagggccgcaaaggaaagcatgggagaggatcaccgaaatacactaatgatcaacctcaatttcttttccaaattgatcatcactttgtcctggtcagagtgatcgcgtcatttgtctgaccgccgcttctccccgtgcgtccactgtcactgcgattcgtctccaaattgacggtgcagtgcgacttttgccggccgaaatttgagtacagaacggatccggaggtgcgcgacgtgcagccgcgcactgcttacgaaagcggagggcgaaagttgatcgttacggtaaaatcgaaatacggtagggaatgaacgccttcccaatgtttggctttggcagggctcccatttggattcggtgctgtcccctaaaattgtttctgctctccgcccccaccgttccgtccgcttcacctg

SEQ ID NO: 16692 - DNA, 1185 bp, Heterodera glycines
  unsure (1)..(1185): unsure at all n locations
cagtgaaagaaaatataaagaatgaaaacttacaatcaatttatataataatctataaaaataaacaaatatagcttttgccaaattatataatcacaaatatgaaaaaacagcatttnaaggaggcccaacctcagaaaaaacattatatggcgctcctgcgcgaatagtcaaacacatatatcatatccataacttttttgtaattcagaattactttataaaaattaataaaatttaaaaaaagaattaaaataaaaatcataaagcataaaaagaattaattggcagtaaaacatcactattataagaaattattaaaataaagatcgagatttcggtcaaacgaataaatacgaaaatttcaaaattaataattttcgtaatcataataaaatttataaaatttgttgtaaaaaaattatttcattattttttaatttaaatgataataaataaattattattctgatagattaattcataataatcttttaattttaccattattttcgtggtataattaggaaataaaataaaccattgtaattgctttacttaaaatgaaacacactagtaatttgattgattaaatattaatttttaatttttacggatatattttctataccatataaatcataaatagttttttataatcatatatattgaccggattataaaacgtaaatgtatttagttatttataagcagataatcaaaaaacatttataaaaaataaaaattaatgaaatcaaaattaactaaattattctatttataataaaatctttgatttttcacctaatttaaaaaagttaaatttaatacctaattaaaaatatattgtactatccatacctgctgcaagaaatcaaaaccctcattccgcaaggaataataaatataatgctaaatcagcttaagcgcaacacaaagtaatgaattaaatattatataaaacattaaataacaaatataaaatgcacaccaacaatactgaactgatacaggtccagcaatagagacaagcctgcccatttagtgcgtaaaaaacataattatttcgcattaaaaatcatttaaatttatttgtttaaagtaaactaatacaaatttaagtgtgttaatttaattttaagggttggattataaaaaaatttattgaaataaaccatcagtaaa

SEQ ID NO: 16693 - DNA, 1000 bp, Heterodera glycines
ctttccaaaagagccatatgctgatcatctccaaacactttttcccatatttgttgtgaatttttaaagttcacgtcaataggtcgcattccatgcacccggctcggtgatttattaataccattaacaatttgatcaattacgtccacccaatttagggtttttgtttgggcaaagtagcgatacacccgatttttgatttgtcgtattgcgcgctcggctaatgctgctttcttctcagaatgtgtgctctcatatttctcaacttcctcttcatcgaaaagttttttcagctgctgatttctgaattctgtacccttgtcggagaaaattctgtgtggtttcattggcatcgttgaaaacacttctttaaagccgtctaccatgtcatcagccttcttggtacgaagaggtgtcacaaaaatccgcttcgaaagaatatcaattaccaccattaaataccgatttcccctgttgtgtcgagaaagggtttgaaagtcagccaaatcgacctgacagtcggtcataaaaccggcagccgttgttctagcgcgcggaaaattgatgcgtcttggacgcatcaatgtgtaggtgcgatgcccctccagataatgttttacatcatttttacgaattttatttccaagttcctttttggcttccaaccacaatcggtcgacaccggcaaacgcagcaggggattttgggtcattttagagccgttctaacaccttttctattgatttgtccatttctttggtcggagacgttggcttttggttggaatttccgtttctactgctgacagagccgtcgacttccgcttgactcccctcgttggaaacggaagtgtcaagccttcttgttccctgcctctcgcctgcctcattcctctgagcttttgggatttttgatttaattctggcgtttgctctgcttgtggcaatctccgtttgggtgcccttggtggtactgggtggagccgtccatgttcgcaaaa

SEQ ID NO: 16694 - DNA, 3081 bp, Heterodera glycines
  unsure (1)..(3081): unsure at all n locations
atgagttgtcgcttagctccctcttcccatgaggaataatactcatttgctttccttttttgacccctatttacagcttggtgggatggagaggctggtactaatggcatttcctcatcgtcatggtaatggtgatgaggccgacgctgtctgcgattttgtgaaacgggaggatgtgatctttctgatccaaaatcaaaaaattgttcgtcttcatcactttcatccccttttttgattagtgccttcatccctttggtaatttctatttttgctggttgattttggtggtcatttctcaggtggagataacgagacaattctttgttataattaatattttttgctgtcacattctccctctttctttttgttctttccagcgcatgcttaacaaaatccaagtttatgtttcccgaatcactgcttgttaagccatgataaatttcttcgggtacgagaataaattttgaagccatgataaaatgatcaattgtcgctctttgagcttgaatttatagcagagcgtgccaaatcaataagaataggagttagcagagctgcaaaaactcctccgagcccacttccagtttgaaccaggaccttccgtgcccctctttcggtccttcgacgagcaagacttcgaacaaaattagtttaaggtaacaaacgttttctttgacgagttgttaatttaaaatgtgaacaaagaatgtttaaagctatttcaattaatgttaacaattgatcggcatttgcacgttttaaaatttctctcctttttttcatcgatttggttttggcaagtaaacgaattaaatcaaaatttttatgtactattgctccaattttacaaaaggccatttttggaatgaaaatgatcttttttccttcttcttcatcgtctttaaatatcccactccttagtcgcaacagggggttagaagcagcgtgcatatcaacgaggagataaccatacggtttattggtcgcaatacggtaggccgaaaggaaataatccaacttccctggaaaaagttgaactccaatgttccgaatcgccaatgcggaatttggagctcgcattaacaccaaatattgggcattttgtctcgcaactttaattcttcgttcaaacaaattttgggtgacaaaaacaactgcaaaattctgatggtgagactttttggtgaatagagcactaagatatgattcatcgatcgaaagcaaaagatcgtcaagaataaacaataatggttttggtagacggttaatcaaatcctcaggaggcactcccgggtacacattcacaacgcatttttggagtgttggaacaatacttgacatttcaccaaatgcataaagcagtgaagcaggtctagggctaattaactccgaagattcagcaataaatcttattaaaaatgtgcttttcccactccctgatggtccggcgataatcatgccaaaaggcatttttaatttagttctttattggaataaaattgattaccaatcatattgaattttaacacaacacaacgaatttaataacttaaatagtttttttattctttacgactaattgacgcaatggctgctgcttcttcatcttctgcttccttcttcccctttttcttcggcttcttcttatgtgaaatgtccaagcatgttgtggcagcggagacactttcaagaaattcgtcaagaatttctttgtccgtttgctgcttatctttttcaataggaatttgctgcttttgttcgttattgctcatccccatggtagcggcagaaatagccgaagcaaattttgaagaatctttctttggttgttttgagttaggttcatgtttgttctgttcgtcactcatccccattgtggatgcagaaatcggtgaaaagaaatcggaggcccttggttggtgttgttttggtttcggtttgggcttgaggtgatcaccaacaattcccatagtagctgctgcaatcggagaaaagaaatcggaggcattagtctgcggttgtggaagcgcttttttctctttgttttcgtcgacttccatccccgcggttgccaccgaaagagcatcaaaaaattccttggcttctccgtgcttcttttgagaaacatccaatcctgtaatagctgccgtgatagactcaaaaaactgttgtgtagtttggtcttctgtttctccatccttttcctttggctttagttgaggcggaggcggtgggggcggtaaattgtagacgggagtctcggtctgagtacaaacattggagcggaaaccgtggtcgacattaaaaactcgacctttgttacgaatatgaatattattttaaagaaaagacatataatattttaaaaccttgaaaaatgtatagcccggcaactcataaacatagtcaaatggcacgaatcgaggactaattttgaaacgagtacaccaaattgttactccttcttttgaaatgcaccattccgtctcgcactcagtggccttgcattctcgatacttgccaacgatgtcaaatggaattgttctagcaccgcaatcctctcgctgatcagtgtaatgccattggtcgtatgactgatctctacagccggcaaaatgttgtccatgataaattttatcgttataattaatactcattttttagatgaatgagtttgaccataaatttcgacttttatataccttcccccaccccatgcccattaccccgtctttattcactacagatattttctccatattataaaatggtccctcatgtttgtcgttcttgagtgatggaccaagccaacgagaaagtaggtcatcgctcgagaacggaaaacattttgggatgatatcactccagcgttattcttatttgtttttcctctcttttctacctttttttcttaatttagcaatggcacgacaaatgagccttcctctgtttaaacgcaccaaaccgactgtaagacattttcacgttgagagggtacataatattttaatatttttttcaatctttctagtgaagaatatttcagttgattctttttgaaaccanaacattcag

SEQ ID NO: 16695 - DNA, 3416 bp, Heterodera glycines
gtcaatcaatggtggcaacttgtacaatttctcctcccccccgcttatttcttgagacgaatctcggtatcgaccttttcgagcatcactattattccagtggccgtgctataaaattatagatcccatttataagtatactcaaataggcatgggttgggaaaaaattgtttgaaaatttcaagaaaaaaggtcagttaaaaattaaattttttttagttgatcaaaatgccaaaaaatgcggccaaaattaaaccaaacagacaccaatttttgcagcttttcagttctgtcatccgacaatccgtggcagttgtcccagctcagctgcatgtttgctgtccccagtcagccaacaatttgtttgctgcgaaccgggggccagcgccgaggatgatgataaggagggtaaagtaaatcaaaattttgaaaaaatttttttatttaaattaaaattttttataatttttttggcaacaaaacttatttaacctagccaaatataccctgaaaagttattacattatgctttatgcttataattttttaaatacacaaaacaaaatacaagaaacagatttaaattaatatttaaaaataaataaaattaaaaatatattatattgatttttcagatattcagattaaaacatttttaaattttaattaagtttccatgtaaattttaactagaattaatgtaaaaaacagatttaatgcgccaccatttgcggcacgggcgtcgccaccgcgcgcggcaccgcgaccatggccgccagagcgcacgctccgtgtccatgcggtcactgtcctgtccaagtccggacgaccgtattgagctgttgggcaacgggaacccgagacactgtaccattgacgggcgcgtgccctgcggcgatgggtaaaggaaaaattctaaaaacagaaaaaatttttagcgcctgccataaaaaaaaattattttctgctaaaattcaactcttagaaatttctgtcaattcgaggccaaaaatttgtctgaaattttgcgtattaaagtaatacaaatggatacagtagcaagaaattttatacatacaataccggtaaatacagtatttacaatcaaaaaatttaatacaggttcatttgtgaacagtccgtggaaaatccacgcattggggtgtgttgcagtgcacaacggacaccaaataggctcatctttcaacaagcgcaacagcgacagttgccgccagtgtcgcgcggtcgcgccgactcatacggtagcgactacagtgacaacgtcgattacggtaaccgtggcggcgaacgtccgtcaccctcgtcgtcgccattgttggagttgcccgcgccgcgacggacaccaaattcaagcagtagcagcagaagcagcaacagggacgagcccacctaccgttgcccatccggtgctcaagtgcccgtgctaataaatgtaaaccctcgacatttgaggcccaattttgagaaaagtctacggatttaaaccgtatactgtagccaacattagggtatggtcgacaaaagccatgagttacggtacaagtataatctcactaaaataatacaaatgttaattttaaaacaaaaacgatttgatttcatgagttgtttcaccgctaggactcaaaaaattctcacaaaggggctatactgtgataaattatttcaaaaattccgtaagattttgtccaaaatcttaatttttaagggccaaaatgtattctgcgacttgggcgcccagcgttgtccaagtggcagcagttgcgtttcggcactgaacgccttcggcatgatgatctgttgtcgcaatgcgcggcaatctttgccagtaaaaataaataaattcaaaagggtggttttgtaattggattccatgacaatactcttgataaacactcattgattcttcaaaaaaagtcttgacatcaaaaattaaaatggaaataaacaggcaatttcttaattttattttgaaaaatataaaaattaagacattctttttcttccaccaaaattcatgtccttgaaaacaatgatttccacatgtccttgaaagtcccaaattaacaataatccctttagcaattagaacaaattaattttttcttttttttccaaaaaataatgattaagctatgccctgtcggaatgcagccggagccttcagcgattggctacgtgccgtgcgatttacttgcgcccggccaatgcagcgaagggtaagcacggggaatgattccagattttccggaagcccaaaaaattagaatttttcacaaattcccacaacttttgactcaaatttgccaaaaaaaaataaatagtctctgatcactttttaaacatttccgatcactgtaaaatgccaaccgccacaggtatcagtgcgtgcattcgcgtgacgatccggagatgagcatttgttgcagtcggttgcgcaaccaaccgccatctgctgcggcagcgcccatctgccccaatcaggcaaaattttcagtccctttctccatcgcgttcagttggcccatttctgacgggacagaattttttttttttcaataaaccgaagttggcaattttttcagcaaattttattgcgagacgggtcaagcccgcgctactgctccccacggcagggcatcagcgcgtgtccaaatgggtaccaatgcgatgagtcaattggccaaccgaatgtgtaaattcaaaaaaacaaaattggcattttaatacagtatgtgccaaatttgaaaaataaaacgtctccacaggttcgtatgctgttccatcccttcgttggccatgtgcccgcaaggcttcgtctcctcgttggacctgcgcacacaaagcccggtcagctgataagaccagtgtagttatcactactatatcaggaaaataccgtataaagcaaaagtgtatgatattgcctaaaaactgattttgtatcatcatactgtattgatggtgatcgatagcttaatggaatgccctattgtattacttactacatccagtgattcccagggtgtgcattttgaaatttttggtaaaaattttcaaaaaatttttaagtttaggtatttttgagaattccaatcttatggggctcaaaaggttcgccttaatatatattggcgtggctctaaaagaggctgtgatttttttaaattctgaaaatgccacagattcggtgctccccaatggacgtgtccatgtgcccggctgaggcgcaatgcctgcaggcaacaaatcgcgccagcgaatttttgtgctgtgaaagcaccgagccagggtagggaggaaggctaggagagggggattagctttttataaatttttttcaaaatctttttagccgtgtctgtccagtcccaggccaagctgctttgttaaag

SEQ ID NO: 16696 - DNA, 1847 bp, Heterodera glycines
  unsure (1)..(1847): unsure at all n locations
atgtatactgcttaaatgggcatttgcaaattagcaccctccctctattagaatacggtatgtaaaagatttggtagtaattttcaaaatgtgaaaagaatttattgaaattttttaaatgcatatttttaaaaatttttgcattttttttgggaagtctcaaatttttattgtgtaatgattcgccacttaatttatataaagaacatacccaaacatttgatgtctgaaacaaaggcattacggtaataccgtagcaaccaaatggatacgattggatttaacgctgacggcacaaattggggaattgaagaaaacaaattgtaatattgtagccaactcgagtgtgttgagtcaattttgaatagaataattgcaagcaaaaacagaaccgacaaataaatcattagcggcatcgatgcctaaaaaataaaatatttaaattttatttaaattttgcctatattttacttggacaatcagcgttcgagagatttgcttgttcatttcgatcatttgctggtttggaccataagatgcgtttctcaaattccagaaaaaataagataaacattttaaatatttaaaatatttttaccttaatttcattttattcttcaaaaatttttcaatatgataagccaaagtgaaaattatcaagtacgaaattgtgcacacgatgataatgtatgccagactaattttttgacgaatatcctaaattatataattaaaattgataataataataataatttgttcatagtgctgtgcattgtacggagtgagttaatttctgtttttcgcattttttgtcgcatatttttgaattttttattcaaattttctgcccatatttttgtgtttccgtccgcacaaccaaccgcaggcatatttatttttttacattaaacgaatatccggctaaaataatttgatcgtcgtcgagattaatgccgagaatttccgcgacggatttctcgtccattgttgcgtgttctacaggcggaaaatagctgatgcacaaattggcgcaatgcgcaaatggaaacaaaagcatcagaaaaaggaggcaaaaatatttggtggacgaaacatttttatcccttgaaagtgcaaatttcttattttataaattaatttaaaaataataattaattaatgtaccggataatgaccaaataacgaaaaataaattgcgacacatagccaaacattgacacatagaccaggaaaacccagcaaacgaatgccaataaattccaaattcgattttgcaccccttttatggtgatcaatccgtacacaattacttccgtttcgccccgttccgacacaaaattgtactaagaataatacatttttaatattaaaatggaaataattataaaaaattaattgaaaaaaataaaaaaataataatataccgggatgaataaaaatgtcattataagcaataaaatatcaatcaaacatgtttgcaatagaacctaaatatttattggaattattgaccaataaaagttaatatttataaatagtaaaatcactttgctataaataagcattggctttggagtatgccgataaattaaacgaatcaaaatgccattaaacaaaatgccaaaaccgcacgtgaaccaacagaataggttgattataaatccaaatatggcactcattgggaaatttttgtgatgaaattttgttctttaaattgaaataaatgaataattttaatattcacagaaataaaatagagttaagtcaagtgaataactttaangcacatttttaatacatcattnaatgcttnntatgangcttttataaatggtttcattttt

SEQ ID NO: 16697 - DNA, 2208 bp, Heterodera glycines
ttttatcccttaaaagtgcaaattttttattttataaattattttaaaaataataattaattaatgtaccggataatgaccaaataacgaaaaataaattgcgacacatagccaaacattgacacatagaccaggaaaacccagcaaacgaatgccaataaattccaaattcgattttgcaccccttttatggtgatcaatccgtacacaattacttccgtttcgccccgttccgacacaaaattgtactaagaataatacatttttaatattaaaatggaaaaattataaaaaattaattgaaaaaaataaaaaaaaaatataccgggatgaataaaaatgtcattataagcaataaaatatcaatcaaacatgtttgcaatagaacctaaatatttattggaattattgaccaataaaagttaatatttataaatagtaaaatcactttgctataaataagcattggctttggagtgtgccgataaattaaacgaatcaaaatgccattaaacaaaatgccaaaaccgcacgtgaaccaacagaataggttgattataaatccaaatatggcactcattgggaaatttttgtgatgaaattttgttctttaaattgaaataaatgaataattttaatattcacagaaataaaatagagttaagtcaagtgaataactttaagcaacatttttaatacatcattaaatgcttttaatgaggcttttataaatggtttcatttttgtgttgttcagaaaagaactccattaattataaattgacttgtcatttgcatcacgcacttatccttattaggaactaaattatctcttttcattcttgatattataatatttaatttataaaaatttaaaaggaaataattagatgaaaaaaaaattattttcaaaataggtaaattaaaatttttttaaatattaagcggcctttttaacctctgctgaagaccgagaaattttcaaaaacatagaaattggagcaacaaaaaattgaaaattctctaaaaaagcctttaaaaaaatattttgaactatatggactaattagctgtataaaaaacgtcttagtgagctgctttctgaaatttgaaaaatttccttattattttaataaatattaaataacaataaaaaaagaaaaaggaaaatttccataatttagaaaagtgaaatcatacgcctctttgtaaaaaataactttttgcatgttttcaacgcatatgctttgaataaaggggcttctgacaaagaattttgcttttgtttttttagattttctgaaagaagccataaaatgaataattttttgctgatgctgttgaaaatttttatgattcgaatgttcggcttgaaggaaagaaatccggaatgagcaagataaacgaaatttcttgaattttgttaagtgcccaaagttttttgccttatgtttgctttggttctagtgctgttgatgatcgaaaatcccgaaactaagattttttcaaaaattttgcaccattattggaaattttgaaatcctgtaattgcatttgttgtttttattttttttatgtctgataaaatttaattaatccgggtaccattatttgcgttgttatgtttttcatcaaattataaatatttaggaatagagtgctttgcaaaatcggagaataattaatatttaaaaaattatttgaaaactttttgaaaaaaatttgcgtttataatttatattagtaattcgcttattattttagttttgataatatttatttttatgtttaaaggtcaaatttagtttattagcccaattgagcttttttaaagttcgtccattgatactttattaggttcagctcatttgtcagcatattttttcctaccttagccctaattaactacaataattaaaggaggcggggctctattcgtaaacgttaaaataaatgtataaaaaccatgtatttaaattaaaaatgcaatattatgagaatttcttaaaaatcaaaataattgattcgctttaatgatttctttgttaagaaataaaattatttttgattatttaatgctattacaattattattttcataaacttttttttcttatttcagctttttacaacatccgagattcaattcataatttctaatatgcgcaaaggattttatttttcatttggttttactgcaacatttacg

SEQ ID NO: 16698 - DNA, 3520 bp, Heterodera glycines
atattatcaaaaaaatattttaatctctgcagagatctttatgctctgagatgaattccatcgcttcctcctccgatttgtccactgaaagtgatttctctcactgccccgagggcatttattcagaagagcaacgtgcctacagagtgtatgccaatgcgccgataaggtaacccttagggggagagggggggggggctttgacttaaattaaaatgaaatattaaaatttatccatatcaccgcttctttcccttcccatccctcacaatcagctttttcggcattttgtccaatttgtttaacattgccattttctgcgattgcgaaatgcgacaacaactcgtcaaccactttttgctcgctttgtctgtgtcaggtcaattaagtggtggaagtgattaattattattccctaattaatcaattgttgtgccaattgaaattgccgtgcaaagattccttttcagatttgctccttttgctgtgcaacttcttcttcctcgtcctccccgttctcatcgctgaaattgactcattcttttggaacaatttgttcacttacatcataaggttctgtgtttctgtctctcgtccgttctttgtttttgtcatttcttttctgaattgtccattttccttaaggtattcctaccctctcgcgcttaccgttcagacgagtggtacggtatccctcccccaaggcattaattaccgtatttgattttttttaaggcgtttatttgactgttctggtcagtgttcatcgctttctcggtgtttgtcatcccttcaaagtttttaataataaaaaaataaataaacaaattctaaaaatgtaaaaaggctaagcgttgggtgtcacggaaggccgtcgaatgggccatcgtcggctccgtgctgttcagcttttccgtgaacattccgacttggctcgagttgggcgtggtcccgtgttattccacccgtttcaacagaacgtccaggcaaaaaacagcaataaatgcccaagtaatgaatgcctttccccgcctgccattcagccaaattcaattggctcctttccacgacatctcttacattctgatcaaaaagtgcctggtctacacccttctgatgttcatcgtgccgttctccactctgatcacagtcaattggaaaatggtcggatttctttcctctacttttttaaatttatgaatttcaaatcatcgttaggtctgtgcgcttaggtccagcactcggctgaggaccaaacacaccctttcgtccagcaaaccgtcgaacagcgagtggttgggacgaccaaacgcttttaatttgcaaatgtttcagcaacatcgcaaggcaactccatctgctgaagagcacgaggtgaaatgaatgaatggtgaatgaatggattgatgtgaacattctccacactttcgcagatattccgaagtgttcaaagtgatcagcaaaattaattactcgaggtaaacggacaaacaattattaaattgtaatttacaaataagaaacatttgtttatttaaagtaattactaatatttaaatcttcctatcggagggtttgccgttctcaaaactccaaaatattggcgccatctgtggtgtccttactttagggccaccgaaactaaaatggaggggaggaaaattccgaaaaggaccccaaaagggcggtaaaaatggctccatgttggtttgggtcataaattgaaccattcgcccatttcgttcagtttgctgaggccttcttcggaattgttcaagtcgcgcttcacgaactccaccagagaccgttccatcactctgatgcttttggccatcgtcggcctttttttggtgtgcaacggattggcctttctgaacagcattgtcgagtcgatgattctgttcgccgatgacacaaaagtaaaaacaattgacttgttttataaaaaataataattaattatcataattgtactgtactcttagcaatctctgcaaaatacggtggaattgttgaggaattcaagcgaaggagctgaggagcagaaatttgtgcagaatgatgcgaaggaagagatgtggtggatggaactgatggtcaaatggttcgaatgttcggtggaggtaaccccaaaaagcgaagaatgtccgccgatcactgatcagtccacccgtcactttgaggtgtccaatgtgctgatcactttgaattcctccacctcgactttgatatatttggtgttcagttcgaaataccgaatgattgttaaatcaatcgttggcctccaaaagcgggacagagtgggcatattcgatttaagaatatccaaatttatttgaaattgctattttcagtttaatcggatcgcttttaccaccgctctcgctgcccgacgagcgatggaactttcactgattcctgaggtattcgatgtgcctcttaaagagactaattccaaaatcaggaggtcgaaaaccggagccggcaaagtcgaaagcgtacgaccacactgacatcgacggtaaccgcggcacggacccgcgaagggtcgacagcagcgagtttaaaatcgaaccggcacgattcaatgcactcgcagttgcagtacaggctagtgacagagggggagcagttcaaatgagaggaagggaaacggaagagacaaaaatattcgattttcccggaaatgtttaaataaagccgaaattcacgacgaaaattgagtcatttacaaagatctttttttagaacttccacagcgccacagaaattgcctaaaatgatgagcttttgtagtgggcttcagctgtcgtctattggcgatgccaatagcgcaaattcggcgacggccgtgccaatgtcagcagcgagtcacagacgaacgatgtttaaagggcttcaaaaggggtccaaggagcttttccggtcacagggaacactgaacagatcgatgacaaattcagaatcgaatttgaggtgaaagagaaattttgaaaaaatgggaaaaaatttcagattaatggacgagcaggaaaagcccgagaagagttcagcagaagatgagaggaaaaagaaaatcggggaaacgatggaaatggcggaggcaccgcggcaaaattgttataatttatagtttttatttgttttaaattttatgctttcaatgcttaataaaaatatttataaaacgttgattttgattcaatactagagatcgacctggacctggatccaggcctggatttttcctggatccaggtccaggccatttttcggcaacctggatttttcctggacctggattttcctggatttttgtccaggaaatcagggtccaggtcaaatgtgaaaaaaatccaggtccaggtccaggcaaaacaggaaaaaacctggattttcctggacaaaattttagaatttattttttaagtgaccgatgtttttttcagttttcaaaacagataaataaatttaaaacacattattattattaattagatatttagatatatctaagcaa

SEQ ID NO: 16699 - DNA, 2298 bp, Heterodera glycines
  unsure (1)..(2298): unsure at all n locations
aaaaaaattgtcggaatttcaaacttttatcatgtattaactcaagtcctaggcagctcttctaaccaaaatgctaaatttatcttttttctattgattctaaatgctcaaagtgatttgttcctttacaaccaaaatttattagcatntacgaatttgatgttttttgtgtgttagagatgtgaaaatagtacgccaaaaagagagaaaaagaaatgcatttgtatgttttattttgttacttttgaactaacagatagaatcaaaaaataacagatgaatcgatgcagaatttttttctctatcgatatgcaaaatttggtgtggatttaacaagtaggaaaaaagttaaacaggatgaagtgaatgttgttttttacataattaaaatgaagagatagtacgctaaagagagagaaattacaaagaaaagagaaacgacgagatagtactaggcttttctctgcacagtgtgcttgacccatagtgcaagcagaaacaatgactaattgtgttttcaactaacaaaaatatttatgtagcacgaaaactaaaacattataggctctactgcattttacgcgtccaatcgacttttacgcgtccaatcgacttttacgcgtccaatcacagtttgcgcgtccaatcaaaagtttacgcgtccaatcacagtttacgcgtccaatcaaaagtttacgcgtccaatcaaaaatttatgtgtccaatcaattattataaattatttaattatttaaaatattggcattaaatgcttaaatgtcaaaatgaagactttgattaatacagcgaaaagatgattagacagggtattgaatacgtatttcttcgagaatttgctgaaaaattttttcgttattgttagatctccgaaacatattgaagtcatttgttggccaaattgttaataaaaaatcacaaaaaattttgatatcagaggttatcgaaaccaaaataagcacgcacaaattagtctctctattattaaattttataacaattgattgaatgcgtatatacctatcgatactttggtaataagtgatcaatgacggattacgtttttaatatttaaattattatttatttttgcaatggttggtaccttatgtcaaaaggatgttcgaattaggaaaattttgattggacacataaatttttgattggacgcgtaaacttttgattggacgcgtaaactgtgattggacgcgtaaaagtcgattggacgcgcaaactgtgattggacgcgtaaaagtcgattggacgcgtaaacttttgattggacgcgcaaactgtgattggacgcgtaaaagtcgattggacgcgtaaaatgcagtagagccattcttttatctggggccttatgctcgtctcgcggtttagagctaaaccacggttaacgcaagttaaccgtggtttatttccaaccggtatgctcatctaaccgtggtttaatctttcttaaggaatcttaaccacaactcgagttgtggttaacgtaaatttatttaataatttaaatagtaaaataaataaataaattttttctagggtaattttacatgcagaaaaagaatctgacttttatttttgtttatgatacaaattattgacggattagtgttattttgtcacaaaaatatacccacgtataaaccgataaaatagctttttataaaaggcgacaaaattgctgctgtttatgccatgttgcataacaacgtaattgtttgtaatgcactattaccaataaattttggctcaattacagttcacgcggccataaataaaataatttgacaattttaatgcagaaaaattttcttgaagcatccaaattaaacattctttgtacattctatagccccaagagtcctctattattctgcaaaattttaaaaagttttgctttgtttaaaaaaagttatggccaaaaattttaaaaaaacaattttggatttaatttgttttcggcgtttttttttaataaatctaggccaatattcataatattaatagaatttaattattataataatttatttaaattttttgaatattaattatttttaaaattcaaaatgaattcccttaaccacggttgagttaaccatggtttacttaacggtggttaaagacgagcataccggttaaggtcggtcgttaaccacggttaacgaaaccgtggttaatgcgttaaccgtggtttactaaaccgcgagacgagcataaggcccctgattttaagaaaaaatttagaattttattccaaaaagggag

SEQ ID NO: 16700 - DNA, 3076 bp, Heterodera glycines
tcgttaaaagtgttaaagatttgccccaacgaggcggacatttgcattccgtcccgccccaattaactcaatttaacaatgcatcaacacatttttgccattttcttctttgtgcttcgcattctgtttggcagtgattgacttcaacgtaaaaacaatgccaaatcttcccgagggaagtcattcattaaatttacaaaaactcaaagtacacaaattcaaaattttgggcacgaaaaagttgtaattaacagaaaatgatcccctggaggctaattatattgcccggtgaccttttcttcccatcgtaaataagtagtaaaagccctcaaccaattattgtttggtgttttcgtagagcccataatttgccacgcattttcactcaggttaccgttaatttactttctttcacattcctttctaaatatctcaaggttggtccaccgataacatatttttcatctccaatttcttaattgactaaatccatgctgccgtccaacaataccactttggccattttgctgttaattgtgcaagtatggtttttatctttattttctgatttattataatttcccagtgtgccatgcttttccaccagtccatggttagcggtgttccccatcgttcaaaaacaactgaaaatgaactcactcttggatcatacccaatggccaaacggccatactttcgtgagcctcttcgattcggcaaacgtttttctggcggatcaaatggcggcggaggatttttgatcaacccgtttctctacgaagcataccgaagcgaaaatccatttgaaaaatgaaaaacgaaggaataaaattccacaaccaaaaaccaacgacgttctagtgaaaatgctgataatgagcaattgtagaccgtttcattttgttccctttttggcacgtcgtgaaaatcccttaataaattcgtttatttggcatatttcctctccagtggtccgccatcccctggattccttcctaatggacttggaggagtgacaaattcaaattcctgtggaagttgagatgacaatgaagcagcggtggttcccatttcttgcagtcaaaacacttttgggattaccaatttcacacatcactgagtaaatattttccaccatcaccaaatgccatgtcagattagaaagtgcaactgagcatacgacccgaatcgctggaagggaaaattcgaatgggcggtcagaaacggccgctgtatattatgtcaatttggcgaacattagccgatttaagtgcattatgtccgagaaggcgcaatttgagtggctgcatttaaaagtgccagtcaagaagaaaactcgccactcaattcccaatgcaaacatttgttatgtcgaaactgaaagtgctctcctcctccgccgacttttcttcgttcctttttttggcccttctcttcggtttgatttttaaatattacaaatttcgttgtgtgacatggtgttccgtattctttttcagatttctccttctctcagcccaccattcaacaaaaatccatccaggaattgttgaacacgccgacgttcttaccaactgccgagaaacacgactacttcgtcgccccttttctacaacagcagaaacaacgttggctgtccgtccgacccttccaagaattcagaagaagtccccaaacggccgaccttggactcctgttgcaatatttggacaacaaacggaatgctccgtcgctaatggaagatgagggaaatgggagacacggcataagcgggtcccctctgggcacaatgcgattcggcaagcgaacgttcaactcgccattgggcacaatgcgattcggcaagagggaatacaacaaatctccgcttggcacaatgcgatttgggtgagaaaagtgacgacagaatgggggaagaagaaaagagagagaaaggaccaaccgcagaacgaatgcaataaccaacgatgataatgtgtatttgaacaccatttgcaacaagaaagtttcaccacgtttaatagaaaagaggcaactcacgcgtttgacgactccttccacgggcaagtcattaacgccgacctcactggccaaataaatgtgctcgtccgcagtcacacaataacgggcaggacgaagtccgtttctgtccaaaatggcaccaatgaaacggccatcgctaaaggccaaaagtgctgaaaattcgtagtgatttccattaaacaaaaaagggcgttggagaacgcacccgggccatcccaaggctccatttgcattgctgcccaccggtagaagatgcgtttttcatgactaaagtaggaatgagtgtgtccattggtcaaccaattgcccacctcatgtcctcgtctttctcccatgcctccggcaccatcgtcatcgcagcttcgggcaacgtccgattgcctgctctgacgagaaattcgagcacattgtcaaaacaccctaaacaattccatcgtgagaggccaattcattgaagtcacagccaatgaatggctcctcacccgaatcggtcatttcattttccaccacagggtataacttgttcaattcctccttgtactccctgcttcgcattgtcccctccctggccttcataaagttgatgtttcctgaaatcagtgtaaataaagctgttacaaatacaatgatatgggaagaggaatgtaaagaatatggcaattttaaaagaatttgctgaattttcctttgtgccgtgcccacctctcagtgtgttgatttcaccattgtgcgccaccattctgttcggttgggccctgctccaactggggtaagtatttgtggagaagcgggaatggaccatggccaaatgggtgacaaagtcggggttgctcaggtcggcaaagtagcgaaagagctgatgggaggtaaattggccctgaaaattacgttattagaataagataaaatgataaaaagtcaattttggtgagtctccgcagtgttttgttttcttgtccccctccgttttgtgactttgaaacgatcgtcgaagcggacattgagacgacgtagcaggacaaagcctgctgaa

SEQ ID NO: 16701 - DNA, 733 bp, Heterodera glycines
tagtcaaaaaataaataaaagaaaataattacattatcgaattctattaattatcaaaaacagtcactcggaattgcccgcacgagaaaaaattgtcttttattttttaaagagtccctccctgctttacaagatgagaaaataggcacaattttttgaaaatattaaattttatgaacgtaattaaaatgtcaattatttacatattagtggacataggctatacaacggctattgatttgtcctttgacgaagacggggaaaaaagaaggaaaggggaaaggaatgaaatgtgagcagaggtaaagcaaaaaggggagaagcggaagaaggagtttagcaaaacgtttatgaaatatgaggtaaggcgaaaagattatttatcgatatcagaattaaacgttgttacataagagcgaccacaacacaatgaatgaatgaacgattgattgataatgagaatggtgagcatttaaatgagttgggaagcgaacggcggattgattttatcatttatcaacacttatgcccttaatgagaagggggagcgattaaaacacccctcgggggttataaaatggttggtcaattggtaaatattatttatgtacggaggacacatgcacattgtgtttgaatattttggacaattcgattaaaaaaagggtgcattaattccattgctctattgttactttcttattttgttgacagaaacggaatatttaaagaa

SEQ ID NO: 16702 - DNA, 1859 bp, Heterodera glycines
  unsure (1)..(1859): unsure at all n locations
tccgacccgccatactccgctggcactgtgacccccctcctgccttgttgaccaagcaatcgccaaaaatcgcgaagctttgtgaattcattttgacggtcaatttcatcagcaaaaggggccaattccttttgagcgagtcgaaagaccaattgacgaagctaacggaaggaatggagaaactatcagaaaaaagtccgaacacctgtcgttgttcctcgtccaaaccgaacaattggtcatcgatgggataaaaagtggagagagaggaacggacgaaggaaaggggcgaggggaaaacacttcggacgacacgggggaagaagcagcgcataataatgtaaggaaaaagcggtgatcagccaaaatgccgaaagtgggtgggattggtaagaaacaaagtttcacatattttgaggaacaaaaggaatgaaaaagcatttgttaaaatcagctgacttaacaggaaatgccattcatttaccataaaaggaagaaaatgaaatcgattagtgaaaaataatggaaaatggaaatgagcagagagagagagaggacagtgagaaagtggacgaggaatgaatgaagagataaaaacagcaaaatgatcggatggggggggagacgatcaatggacgtgggacgaacgcacgaagaaaaacggagggttaaatggctgaagaacgcactttctttccacaaaataattttttttatttttaccttcccttcttttcctcctttccctttccctctcttttccttcttttttctcttttcctccctttccattttctctaggctttgctgcttccaatgtctttcgtttctcctcttccgtctccgtccgttgtccatcgccaccgtcaaagtccatggcccgccgttccaatggcaatggcaaataaaatcgtggaggaccaatttggcgctgttcttgacaaactgagacacgtcgaagaaaaggaagccaattcgcccgatttactcggtcacttgggtcggcgccatcccctcaaaatgcctttcccccccactcaaaatgcctttccccccnccactcaaaatgcctttccttctcctccctctgaccccatttgaattgccttggcattatttcccttcaggcgccgtcctcgccgagtctgtccacgccctggcgcccgtcccgcccttcagagcatcggtcaaagatggatacgctgtgatcggtcggtttagcagcagcacaattaaacccatgtcgattaagcctatgatggggtgggagcacggcgagttatcgcagcacacacagccaaaatatcagaaggacgctcggcagagaatgcaattggcacgggcgaatgcgtacgaataaccaccggggcaatgggtctgcgcggggctcacttttaatggccttcattaacaaattagtcgctttaagtgcctcggggagctgatgcgattgtgcaagtggaggacacgcgcgtgttgcagcacaatgtgagggcgaattttccaaaaaaattagcgaattgcccaattaattacggaacagaagcgcaccctttaggaagaggaagagctgacggtggacataatgaaggagcctcgggaaggacaggacattcggtgagaaagggaagcaccgatcgggcgaatcgaagtgccacagagagaggggaagcgacgtggcggagggccaacttctgctcggacacggcacggtactaaacgcggcagaaatcggggcgatcgcactgagcggcaggaaaaaagtgggcgacggcacagaggtcgaacaattgacgaagccgacattcgcaggtgctcatctacgaaaggaaagtgcgcgtgtccgtcatttccacggg

SEQ ID NO: 16703 - DNA, 1731 bp, Heterodera glycines
ccccccccactcaaaagccttcccccccactcaaaatgcctttccccccactcaaaatgcctttccccccactcaaaatgcctttccttctcctccctctgaccccatttgaattgccttggcattatttcccttcaggcgccgtcctcgccgagtctgtccacgccctggcgcccgtcccgcccttcagagcatcggtcaaagatggatacgctgtgatcggtcggtttagcagcagcacaattaaacccatgtcgattaagcctatgatggggtgggagcacggcgagttatcgcagcacacacagccaaaatatcagaaggacgctcggcagagaatgaaattggcacgggcgaatgcgtacgaataaccaccggggcaatgggtctgcgcggggctaatggccttcattaacaaattagtcgctttaagtgcctcggggagctgatgcgattgtgcaagtggaggacacgcgcgtgttgcagcacaatgtgagggcgaattttccaaaaaaattagcgaattgcccaattaataacggaacagaggcgcaccctttaggaagaggaagagctgacggtggacataatgaaggagcctcgggaaggacaggacattcggtgagaaagggaagcaccgatcgggcgaatcgaagtgccacagagagaggggaagcgacgtggcggagggccaacttctgctcggacacggcacggtactaaacgcggcagaaatcggggcgatcgcactgagcggcaggaaaaaagtgggcgacggcacagaggtcgaacaattgacgaagccgacattcgcaggtgctcatctacgaaaggaaagtgcgcgtgtccgtcatttccacgggcgatgaactcgtcgacttttactcgtcggcggacgatcactcgcccccccggcacggagcagtgacggacaccaatcggcccgtgctgctttcgctgcttcgctccaacggattttgccccgttgactttggcattgtccacgacaagtctctctttctctctctgcttctttctctcattttgcactgtctttaaaccctttcagcctttttgcattgattgactctgttcgaaaagcgctgactcatacgaatattttggtggtcaccggcggagtgtcaatgggcgaaaaggtaacccacggcggagtggggggggggggacattttgcgccaatttgccggaaatggtagtgccatcgaatgcttacgcatcttaggatctgctgaaggaagtgctgtccgatcatctcggcctttccatccatttcggtcgcgtgttcgttaagcccggcctccccgccacttttgcctccggccatctctccgcctccccttcgtccaacccccccaaattcgtcttcgcactccccggcaatcccatctccgccttcgtcgcggcccatctttttgcgttgccccaattgcgtcggattgccgggatggactcccactgggaaaatgcccggcttcgagttaaagttggtcggacctttcatggacgaattgaccacaaataaacccatccccatcacataaattcctcagctcgcccaccccattggccctctcgactctcgacccgaatatcgccgcgctcgcctcgtccgcctttcctccgccgacggattgcctttcgccgagtgcgtcggcggaaaccaatgctcttatcgcctcgcttccgcactctccgctaacattctttgga

SEQ ID NO: 16704 - DNA, 3013 bp, Heterodera glycines
gaaaaattattttcgttatttttaaattaataaatttgcgttaaaaaggaagaaaattcaatttatataaattaatttaatttaatttcatataaaaaataattaaatgaaaattataaaataatttaatgtgataaaaataattaatttaacaaataaaaccggaaatttttatttgcaatttatatacatttgaaatgttttatattatatatataatttaacgaaatttgttcatggaatttttataaaacgatttagaattacggtaaaaaaattaatatttttactttctttttcctcaatgcataaattagttcataaatttaatcgattttgccaacctggtattccgccaaagcctggctcgcctttcacaccgaggaagccaggtgcaccaggtaaacccggtaggccaccaacacccttttctcctggggaaccaggctggccaggttgcctaattaaatccatttttaattattttaaatttcaaataatttttttaattacccgtccagcccgggcagtccaggcgttcccggaaagccagcttctccttttatgccagggaagccgggagaccccggtggcccgttgaatgcgatgccagcctcaccctttggcccggtgaggccgggcgcgccaggccaccctgcctcgcccttggagcctggcattccaggcggaccgggatttcctggaaaataaatttaaatcttaattttaattttcaaaaagaaacaaataaataatgtattattattgttaatcatagagaatggaaagtccataactttctcttaataattagctaaattaagagaaaattgacggacttttttaaatggaccaaacaaattttctaaatatctattaattttctcatgtgaaatatatggaaaatcttattaaattagtctatttctaagcaactaaaatatgtatgaattgttttccttaattagccaataagagtaaattggtggattttttaattggaccaattaaacctatggatgaattctcatttctagaattttcaaaaaaaaattacctggaaatccttgttgtccttccattcctggcggtccttcgaggccattctgtcccggaaatccatgctcgcccttttgtccttttagccctggcatgccggataagccatcattgccttaattggtttaaaaaaattaattgtttttttattgaaaattccagaaaatccatgcctggaaatcctggaagaccaggctctcccttggcaccgggaagccctgggagaccgtcttggccaggtcgtccaggtggtgccacaagtggcaatggtcctaaattgtttgaaattttaaaaaaaatctgctgcatcacaggccactgtctcaccaggagaccccttttccccctttagcccaggcattccatggagtccggcatcgcccttttctcccggcacgccaggctggcccgggaagccgtacccgggctcgccactttcacccggcacgccagggagaccatcttggccaggtacaccgggtaggccggtagcgccgggttcaccctgaaatataaaatttttaaaattccataatcaccaccataaatatgaccacccaaaaatagggagaagatatattgtttgatcacatacccgtcaaagtatcaatttttttttacaaaatcctttctcttactaattttttaaattagttttttgaataaaatctcttatatttggtcagaatttatatataattaatgaaattataatttaatccccaaaaaattagagatttttaaactcgttataactttaaagatcggcttaatactttttacacgagcttaaacaaaaagttttcatttagttatagagaaattataaggaaaataaataaaataaaaatcaatcaaaattattcacatatcctgggaactgtacttgaccaaaaaatcttgataccatacaatagttcttgggttgctctactaacatgaaaaaattcaagaaaatttcattattttcaaaaaaactgtgatcaaaaagaaaactttgagcatttaaaaaaagaaagaactttccagcaaactctcaaagaaataattattaaaaccaagcttaagcatccatttttaattgtatcatttacaaagtcaattcttttgtttatttataaaaaagtttatgttttacaaataatttaatgcgtgaaaatcgtttacggacacgaaaaccgctgcagtaaaaccaattacattgtcatcctaaaaatttatctttttccaattgaaaagtgtattaagtccgattcccaattgcttagcaggttttatgtcgctaatttttgaatttttcccttttatttcgaaatattgcttcatctttgataatttgtcctcatcggaatatttattttgtgcttaaaaataaaaattaaaaataatataaaaatttattacttttcaaatattttggcatcaattcctttttccattttcgaaatgtgtcttttccaatgcccaattccatcacaaatttttctgtttgccttggccatataaacttttaaattcatcaattctttcaataaattttttctttttctgctcataaaaactcttttttattatctttaatttaagtttatttaaattcatttcttttttccatttgtatatttttcggcgatttgtgcctaataattttccaattttcgcctcaattttggtgttattttcctattgaaatttccctttttgcttcaagttttcttttattgcttcaaacttttgaatcatttctcttttctgttgatcatttgattcttctttaataattttgatcattttttatattattctgatcattttgcatttgaccaattgattcgctactattttcttcaatttcatttttgttccattcgtcgcgaatatttcatcataatttggtcggattttgccggattcattttcaaaagcaaagaaaaataatctaaatattaaatgc

SEQ ID NO: 16705 - DNA, 1528 bp, Heterodera glycines
  unsure (1)..(1528): unsure at all n locations
tgttttacgaaactgcaagcccattcataccctaattattttcatagataaacgattaataatttaaatttcattttttagatggataaaattttttaaatttttacatgttttcctagttgtccaggtgtaccaggaaggccaggcagtccttctttgccaggtgggccttgaagtccaggcaaaccagggaagccggcctcacccttggggccagggtatccaggagggccaggtcgcagcaccagctgagtcggttcacccctgaaagattggcattaaaaaaattttaattttgaaaaaagaatggcactttgtgccaggcagcccgggaatgccgtcaaagcccggtgcgccgggtggcccgggcggcccaattggtccaggcaatccgtcatcgccagggtcgccagctgggccagccatgccgggatggccacgatcgccttaattagcacaatttaaaatttgtagggccaaagatggtcagatatataagtaactcggttgaaaattgcatgatttctcaataccccgcccccttagggtttatagtttcaaccttggaaaatacaaaaaaaaaataataataattttttttcgagaattttataattttgcaaaaagtgtagcaaagctaatttgtgcagtgataaataaagtttcatattttcaatcgagattgagacgaaattgggatttttcggaaaaaaacaaagattttgaattttaatcctattttgaaatttttttttgtaataaacatttttctctcagctttggtttgaagttgaagccttttttaataatttaatttgttggtcttttgggcggacatccgtcttaattaccaaatatattttccataaaatatttgggagaaaaaaccagctgaaaatttatttgggggaatagcccacttttctccttatgccaagaattttcatgcaaaatttaaataattcttaaattcaatattaattgaccttgagggccgggaaagccagggaagccggcattgcccttctcgcccttagcacccggtgcgcaaattgaacatccaccgccccgatcgcccttggtgccaggaatgccaggcaaaccgggcgcaccatccctgccgtcataaccctgcaaaatttgtttcattataaaaatgaaaaaattattgaatttttacatgttcacacctttggcccttgtggcccagaaatgcctggcgggccgggcaaaccgttcaacgaatcgcccggaggtccttaattaggtaattaattgttttttcaaagtcaatgtttttaaaattaaattttgcttttgctttgcctcttagtccggccaagcctgattcgccctttcgtccaggaataccgtcaattccaggctgtccatctctgccttgaaggcctggtatgctgatgccaggaatgcctanaagtaggggagggaagcctcgtttanaatttataaaaattttgggacttaccccttggcccaggctctcctttggagccgaccagggccgggc

SEQ ID NO: 16706 - DNA, 1210 bp, Heterodera glycines
  unsure (1)..(1210): unsure at all n locations
agtcatnggtttttgaaaaaataaaaaacatgaaatttatntgccgtttattaatgagtcagacacttatgaattgactaatcttgccaaaggaattgtcaaaagtcctaaaaaatgctaaggccatttataatagtaaaaaaaattcactcactgcccaaatgttcactgtcaaaacatccgggagcctcccttagtgccgtttcttaaaaaatcggggttcccaaagatcgggataaaaaatcatcacaaaaactatagggctgtgcctataaaatccatgccagtaaattttgggaccaattggaattgtttagcatttgtctaactaagtttcatttttgtttatttccttaatttacttccgcatttctttttccaagaattaaatttttagaataatttgggtttacataatactttttttttaaattgataagtaaagaatttataatgaataaaatattatttccgtttatcaaaaatttgaatgaatttaaaattttaatttcgttaatctcttgccttttggtgaatcaaatttaagattaacgaatgatggttccaattccatttgttcgtcgtgatacactaattcatttccaccatcaaatggttgtccttaaaattatcagcatttgaatagatgctaggacttaactcaaaaaccattaaagataaattgtttaaaacaaatcgcattaattttaaaataaaatgcataatttggaaatttaaatttgtttgttgattaacttccaatgtatgctttttattctaatctataaaattttatgtaatttgttaccgttttttgagttgaatgtgtcaagatttggaagatctattaatccatcgatcccatcaaaagtagtctcaatctcaacttcttcatattgtccatcaccatttacaacacattcacacccattaaagacgcaaatccaactaatgatagttataaaaaatgcaaaaaaagaataaagccggtgatgatgatgagccaaaggtggaagtggtggagccattgataactgcttcctcgctgctggtgtctttgtcgctgtcaatttgatcagtttcggcacgctcaatgcttggttgctcgaaactgtaaccaccgtaatggcctcctgtattttgtaatgaaatttgaattanataatgacataccatgcacaaccatttcactggccagcagaagttgtcc

SEQ ID NO: 16707 - DNA, 1278 bp, Heterodera glycines
  unsure (1)..(1278): unsure at all n locations
aaatagaaaattaaacctctatctttttgaagtaaattaaggccattcccgctcaaaatggtgcatattcttccatgtcacttcaacttcgaagttataaattgctaattttaaattaatttaattaattttcgcccattttccttcaaaaagtttcgtcgtcctttcaatcaccgcactgattttggcatcgatgcccgaattccaagtgccggacttgtccaatcagaacgcacaagggtaataacaaacagaagaatgccaaacaaaataaaaatatgcgctaatttaatggagaaaacaatttaaaattaaaattcgaaattaattatcaaaatttaaaattccttttccaattttttttgaagcagtcccggcaccatttatccgacttatgcaaaagcgacggggcacaccatttcgacgacaacagtaaaaaatggaaaaacaatggaaacaaaaatttgattgattaattaaaaaataatcgatcaaaaattgcaaatattttttggctaattgaggtgatcaaagacggggaggagcaccgcgtggaaatggttgagcacccggtgttcaattacgtggagaacatttgcggtggcacaaacgctaattaccataattaattaattattaccctttgtttaattaattgctcattccctttttcattcagtgatttatttcactttggaatatttgctgcgcttttgggtggcgccacaaaaagtaaaaaaagaaattggaaaaacaaaagcaattttatgcaataattaattaattaggcaattaaaattctcattcaactaatcactactttaattgtttccaaatttaggcccaatttgtgaaggaatttctgaacgtgatcgatctgttggccatttgtccgttcgtttttgagctgattctcatttttgtaagttcaaaaacacacacaaaaataataaaattgtataaattaaattgaggttggcattcggggggacaatgtgcgcaaagttcggtaaaaaaaagaaaaataaagagagttaattaattaatttaaaaataatttaaatgattaaataatttgctaaatattgatcatagtcaccaaactcaaagtctgaatcgatgtaaaaaggttcgaaatggaggggcacgattgccttttttcaggtgaaaaanggtgccggaattggagtgccaaactcacaattgaccgcactattataaaaagcactcaaaagacattttaaataatttttctagggcaatttgcggagctgatca

SEQ ID NO: 16708 - DNA, 1293 bp, Heterodera glycines
gtaggcttcagcttcggctcaggcttatgcttatttaaaatgtctttttgaagtgctttttgtagtgcgaacgattgagccagctgaagtttggccctcccaatttcggcccctttttttttagtgtgacagtgatcatatttaccaataatttaaaacagtaaattttccgacttttttaaaaatgtaattttcaataatttgaaataataaaaataaaacaatttccgatgggcctttctcaccgttcgccttttgcgcgttcttcgggtggtacgaattgcaaaattgggccgattcagtccaggtttaaagcatcataaattttaaaatcaaaacataaaaagttggcaaaatgtcttttagggctcgcaaattttgccctgacattgcgcaaaagcaaaaaacagatgcaaatggtcgccattgtgcttctcacgggtaacgaaagtgctcaaaataaaagacaaaaaagtaaatattaaaattaaatttatttttaattaaataaaattaaaaatatttttcaaaatttattttcagtgatcgttttcttttcaactttggtctattttctggagaaggacgagcccaacacaacattcacttcaattcccgccgcattttggtggtcagtggtggcggcacattttaaaattgaaaattttgaaaataattttcatttttcgaattgaaaaatgaaaaataatattttttaataaattaaaagaagagatttatttttgttgctgtgccattccacaattttcctgtcctttttcaggtgtttgttctcccaaacgaaatgggtgccgcagacggcgggtgaatttttgtgccaaaaaaggacttttcttattaattgaaacaattttcagccggcaaaattgttggaggcggcgctatcacttgcggggtgctcgtattggcactgccaattgcgattttggtacagagaaattgaaaacgaagactaaaattgggggggggggggtaattttggataattaccctccaaaagagttaattgcttgtactattaatgatgatgtgggcacaggtgaacaacttcatgcaagtggtccgtttgcgggaggaaaaggtgctcaagcagtacgcgtcaattgccaccgccggctgtcaacaacagcaacacaacgccacagggggaggggacagagtgtagtggaggcagagaagcgagaaaggacgaaggacaaagggggagagagagggggagagagagagagggggagagagagagagagggggagagagagagggtgagagaga

SEQ ID NO: 16709 - DNA, 1738 bp, Heterodera glycines
tcatttctcagtgatcataacaacagcaacaattcttctcagtcacaaattgaaatcactcgtcgcattttcaaatcgttggctgtgatcatggcagtgatcttttgcttttggttctcagccaacgagatcaaagataaacgaaaaacgccaaatctgtcgtaatataagtcgtttgtccctgtcatatcattgttgatttgaattattttggcgttttgttttagtttttgtgaccctttattttattttgttttgtttggagtatgtgtgatatatgtgctcttcctaaatttgtaattgattgctgtgtgctgttttattaattggaagtaaaagaaagcagtgaaaagagacggcgatttggttttggatttgggatacaattcccctttcccattggactattctttttcctacgacgtggcgctcctgtacaaaaggtggctcagcagtggcaataaacgacaaatttggacgagcaacaacgattttaaaaggaaaagtaaatccttctgcaatttgtaacaggaaaagcaaatcctggtctctggaaaagggaaacaaatccctactgaatttcttcattggttgtggaccacaaaatcagtaaaacgggaaaactaaatccctcttcatatcaaaaaaaaaaaaaacgcagcttcgaaaaggaaaagccgtaaagtgtgaaacaaatcacgaaaatttgtcagttcggtaaattaactccgtctacaaaactgacttcaaaaccgggaaacgaaaatcccatttcaacatgcaatttcttcgtcaacacaaaatttcgcccgaggaaaattggaaagacaatcgcaactttttggtttcattacaaaatggtggatgcgaaagtgagaaagaacaaaaacaaatttgttctttggaatttctcctcactctggaaaaacttcccgaactaaatggaaatgaaggacgagagcaaatacggacatttttcaaaaaattttcgttagctaccgaagaatggccagaaaaacgccgaatttcagcactcgagtgcaaagtaagtggaaaggcggaacgtgctttcagcgccgctgcagtgaatcggccggcgaaatttgatgcaatacgaagcgaaatggagtcacttttggacgaatgggattgtaccgcaattcaagcattcaacgaattgtgggatggaccaaaacggcgaccaggcgaaaatctggaagaatttgcagaacgtgtttaccaacttgtgctttgtgcatatccaggtttgccattggatttgtacaacgattatgcggcaaaacacttcattcgtgctttggaaaatgccaaagtttcgattgcattggaaatggctcgtcgtccgggtttgagctacgacagcttggtcgcgttggctgtgcgtgcggaaatagcgcaaaaagccgcaaatttaattgcagaggatgaaaacgcacacatagcacgcagctttaaaccaaataaggcggaaaagacgaccaccgattgggaaaaattttacgtccgaccgacaaataaaaacgtctgttataactgccgtaaaattggccacatcgcgcgaaattgtaaggtcgaattcacttggaaaaaatgcggctttgaacaaaataacagcaatatgaattttcaaaaagagaaccaaagaattaggaccgacaatttaacgagagcaaaaattatcccaaaagtctccgcccctaaacgagcaaaggatggc

SEQ ID NO: 16710 - DNA, 800 bp, Heterodera glycines
ccgccgccgcttcacccccgctgattgtgagtgggtgtctgatgtgttcgagagtctcgttctcgaaacactggaaattttaaagcttgaatagaagtaatttttgttttgacaataagttatactccccctcccccactgtctccctctggctttatctctctctctctctccttctccctgcttccttgctttcgcttcctcacacttcctttatcactctttctctccccagtctcataactctccctcttcctttccctccctcatttgctttatctcacttttctcttcatctctttcttgtattctctccccccccccccttccacccctctctctctcttttgttccaccaacacttttactcatctttccccgcatttctgctgctactgctgatgttgtttttctttcctttcgccccgctttgttattggcggccaattgaagaaaattgaattttgcaattgggcggccaccgcccggggggggggaggcggggcggaggaaatgacccggcaaaagggcgacgaccgccggcgaagcggaaaaagcgcgacggaagaaagaaaatgtgtgtactccgtgcgctttaaggtacgtctaaacgcgtaacgcacacacacttccacacacaaaaaaacagcagacgaagggcggggggcgggagacggacggagcaaaaggaggaacaaaaatagggagtggagggggggggggaatggggcaaaagttacaccgcaaagggatgacgggggggggggggggggggttaggaaccaataaaacacgtacat

SEQ ID NO: 16711 - DNA, 2254 bp, Heterodera glycines
  unsure (1)..(2254): unsure at all n locations
tagggtcaaaaaattttttaanaattcaataattttataggtttactgatgggggagaaatgcgaagggcagagacaaataaaaattttgttaaaatccattcttgtccacncctcgttctgaaaattcatgggttttcatagcccccgcttggtgtaaaatgccgaattctggaattacacatattcctttgaggttggacagatctcctgtggctggggttcaacaaatttttaggcaggaatttaaaaaaaaatttattccaaatttttgttgggacggggagttttgcccgaagcattttcccattcatttgggcaatttcaccataaaagtaattaattaattaatgatccatcacattttctctgctccttttttgctgcattttttgaatgtgtgcaacaattgacttatgggggcaaagattttgtgttgtaacaaatgaaagtgaggggaaaaaagaagaatgtctgctgactgctgctgctgctggtgattgacggatgaatgcattaattaatgattgaatgagtagggctgggaattatcggtaggggtcaactccgtctggccaactccgtctcagcaatgttcaaaaagctataacttttttctttgttggccaaacttcacaatcatggtatcattcgaaagccctagatgtttagaagatatttataagctatttctcagtgattaatcagctctcaaaaaagttgtcagttgaaaaccgcaaaaaaggcagaattttcgaagttttttatttctatctttttttatagttcgaaattttctgtaatttttagtaggctaatagagcctgtgaagagctttcgaatgatatcaagattgtttgattcggtcaataacttcaagagttatattgactcaaagttggctcagacggagttggcccgttccttggaattatatggaagaaattctaaaaatgtttattggtgaaattttattaactctaggaagaggagctaagttcgataaacttttaaaatttaagcctagaaaataggcatatttaaaatatattttttaaattggattcttattcgtcacactttttcagaatatgtataagcattagagtacaaaaatattacaaaaaaaaaaaaaatattgccgtttctgcaatttgttatctaacggcaaatcttaattggcattaaaacggccacaaaaaggaaaggaaagaaacaaatttaaaaaggttatcttccgctattgccgaagaagcccttccacacgtaaattactcgcgaaatttgccaataaaatcgaccgagcaccgttttttggggtgaatttatttaccgtatttcctaaaatacaacccccccctaaattaaccccctgaaacaaagccccctcccttgagggaaaaataaagccctggggggtactattttaggaaatacggtatttactgttgtggcactcattcattttaaaatggcatcattggggacgacgacaacggaacaaattgcaaaaagacagcccgaaactgtcgcattgcgtgccgcattcgctgaagtgagtttcttttgttctttgacagaaccaacagctcattgtcaaaacagtaggagagtttaatgagaattcggtcggaatttaaaaaaaagaagaaatattgcgattattaatgccgtgaaaatggcatttttagtctcattggtcccctactgggatatgtgccgacgcactcaaaaaattacgccaatcggagaccaattccgatgggctgaagaaatgttggaaaccgtaatcacgagcccaaaaatgtcggaaaacggcattcagcattcagaaaacggcattttcgacaaaccctggaccctaaactcagcttttttttgtcccgtgcttttgggaatagtcaaattttgtaaaaacgtaaactcccgccgcgttacagctccgccaccatgtgcccgcgcatccgtcggaccgaaaaatgagcaaattggaaatactcagaggtcgtccaaaaacggcgggaggggacaattttcaaaaaaaaacatatgcaaaatcaaatttttgtttttttaaaaattttcttttgtctcattgtcagccgcgatacggtacatcagcattctggagtattgtctgggcatgcgacagacgccaattggtgtcaaattgcacaaagaatagagagagaagaaaaagtgatggaagtgattgcaaaaagataaaaacttggnatttagagaattccatgaac

SEQ ID NO: 16712 - DNA, 1260 bp, Heterodera glycines
tttctgatcacgacttcgccaaatggctggcactgttcacgtttggtgactgtgccgttgtcgccgccacagctgccgccgccgcttgttccttttccgtctgccgtgcggcatttgccgtgcctgctccatggcccagcggcgtctgagcatgtcgtactgttggaaggtgaacagcaccttgtccagctcaatctcggtggaaaacaggcgccgttcagcgcgccgaaagcgctccaacgcccggcggtccgcctcggtcatgtaggactgctccacgtcggccatctttggggttttgattttggcaaacgaatgatgggacacaaattcgtgttggaaatgatgtacagtaaggcaatccctcatcaaacgtcattataccgtagactaattacggtctaattgataaacaatagcaccatatcccattgttgttgaacaacagctcgctctaataacgggtcagagacaatcgtaggggacaaattcgtgttggaaaaatgttaatacagtaatgcgatcagcccaccaaaacatcactaccgtatacaagggaggtcttggcgtgggtgggtacgaacaaggaaaatcgaaaatctcagcaaaaatacaaaattttccataaaaatttcgggtgtagcatcgatagaccatcaaaaacaacaagttacaactaaccatagcagagtctaaaaaccccccaaaaaacggcacgaatttgagcaattactagtaattagttcactttgcccagcgcccaacactgaatggcatttcattttggtctttgtttctacctgctgagtgcgcgactcgtcatcaaaggtcgggtcgttggcgatgttgctgaggatcacctccattttcagttggcgatccaacaaagcccttaaagcccaaatcaaattttcggcattttcaacaattctttgtgccgtcgccttcgcaattcccccaaaaacgcactcgtgcttttccctctccaacatgcgtcgtctgatcacgttgttcaacgcctgggtgcagaagctgatcatcgcgttcagcacctgcaccatggacacggtgtagaggaaaaatgtgcgggcgggcgcgaaatcgttggtgcgcgcgagttgctgtaaaaaagtgaacaaaatgccaacattgtggaaagcaaatttgaaaaattggggcgacaattatgattattattggaaaaaagcggacaaaatgcaaacattggaaagctcttgaaaagatgggcacaatttgaag

SEQ ID NO: 16713 - DNA, 3189 bp, Heterodera glycines
  unsure (1)..(3189): unsure at all n locations
tttaagctgatcgtcttttgcaaacgcaaaatgagcagactaaactttgtgccaaaattgatgcggttgaaacgaactcatacgaactctttggcaaaagtgaatgtgaaaatccttataaatttttgataatttattatacaatattataaaacaaaaagacacattttattaattgggatacatatgtttcagtttgcactgatcattttgaaccgattttggcacggattggccaattggagaaatgtcgacagaagcaaaatgcacattttgatcaactgaacacctcccaaaaggatcagtgtgaaaaatgggccaaaatggagaacgaaattggtgtgcaatgaatttgcaaataactataaataattatgcgtaataattggcctaattatatgtttaaaagtaaaaataattgctacaaaagtggtaatattttaataataattttgggtttctctcagctgaacacctttcacaactaagaaatgaccacgcgcagcagcaaaaggagttttgttccaaaattgatgaggtgatttttaacacatgcaattaaataataaattaaacagttcgcagccaaagcggatttgaacacaaacccttgtaaaaaaccaaataattgatttcaatcaatgatattacaaactcggattcgtgaatcaactcattttttacccttgaaaaaaatgcgagaatttaactgtttttttctgtttgggcactaattccgaaggattttatttaattatgtattttgttgaaaaatgggttctcgaatttttgtaggaattatttggatttttcgtcgaaacgcgggtaattcagggtgcggatctgttcttatttgtaagaactgttctgattttgggctattgtttttattttgttcttatttcttaaaattattcataaatttagaaatttatagcataaatgttcatattttacaaataaatttttaaaaattttccctgtaagggaaaatgggcaatgattactgtacctaccgtaaccacatttattaggttttaaaaaagatcaatattttttaaaataattcatttattttttagatggtgaggaacggctctcacaattacaaaatgaccataagaaacttccaaaaaatcagtgaattggaaaatcagcaaaaagaacgttcaaaaggcgaggagaaattaaaacctaaacctaattagtttacattaaaattgattgatttttaagccactgcggatcaattttcaaaaattgtggaaaaagtctgtgatttggagaaagaacagaaacagagaatggtaaattaagggtaattttcattaattgagtatttaggcaattttattttaaatttatataaattattattatttcaggcacttttaaatttccgacaaaattgtttggatgtcaaagtttgtcataataatctccaaatcattggcgacaaaaatctcattagtcccccgcctatataggactcttaagaaccaataattaaacttatatagcaagcaggctattctaaatatagggttttgcctaatttattgataaatggggttttactttttgtacgaattcaggtcggtggttttgaattggtcgaagtggggtaatttggtgatcatgaactatttttacgatacctaaattttaattttttttaatgggattacttccgacactaatgaccatatacagtttcgaatattgtaaatattttaactctcctctctttatttctgatcctggattaagaatagttcaaaatgaatgcactataattagcgaccccaaaaatcctccagcatagatgtggcgggcgcttcatggattccaaaaaccccatcgcaaatgtacacgcctaatttttgtcataaaaatattaaacttggaaaatttgtttttttgttacttttctttttttcaaaggcccaagatgagaatcggaagctgaaaaatgaacaaaagaaaatggaggagaaggtggacaaattggaggagcaattgaaaaaaaaatggaggcggtgggatcaatcacttgcaaaaattcaaaaataaaatttttgccacaatattttaatgctttagaataacacttttttataataaaaaaatcctttaatttcagcaaaaggcattccaaaaagaatttaagaaaatggtcatggaacgaattgtaacagttcaaacgaaggttgaagcaatggaaaaggaacatcaacagcaaaatggtaatggaacttatttgttagcaacgattactgtacctgccgtaacattattattactacggtcaactatttttaattgagtttgttttaattttagcaacttcggaccaattttcacaaatgcaaaatgatcaaaagattctattggaaaaaatcagtgaattggagaaagaacagaagcagagaaaggtgaattgggggtaaaaatatttattttataataatatcgttaattgggtcttaaacattttattttaaataattttatatgaattattttaaggcacttttaaattttcggcgaaattattgggatgccaatatttgtcatgagaatctccaaatcattggcaacaaaagtctaactgtgcatttataagggaaattattcaggcattttttatatcaatttactacatgatttcacctaaaaaggtttataaaattccgtctttgctgaacatccgattctgctgaaccaggattcattaaacattttttactatgaaatttcagtcaaaaaattggttaggtataaattttttcaatatcaaattatcataataaatataaaattaaattttgttaaaattgttattcctttattattaattttatttttcagtttgttcaactttggattcgcaatcaaacaacagacaaaattggatggactaatttatgatcacaaaggcacttacttatgcatataaatcagggatgggccaaattgaaaaataaaaagcgaaatgcgaaaagcgaaatttgcgaaactgaaaaatgcgaaatgaaaaaaaaagcgaaatgcgaaaagccaaaatatgcgaaaatgcgaaaagcgaaattttttctacaactttttaatagttaaaatcataaagcaaaaatcattttttaaaatattgttccanaatttaaaaatcaataaaacgcttttttgagg

SEQ ID NO: 16714 - DNA, 1216 bp, Heterodera glycines
tagactttgtgctttcgaatgataccaaaaagataggatttgttcgaacatgaacaaagttattgtataaaaacccgggattgtcaatcgattggactcataaaagtcaaattggactcataaaagtcgattggactcataaaagtcgattggactcataaagtgcattagagccctaaattttactttcattgtcagtccgtgatttgcctttcggcggagtcggcaacagcggaatgggcagttaccatgggaagcatggcttcatgcagctgagtcacgctaaggcagtgctgaagagatccgactaaatgatcagtggattaaagtggcggtagaaaagctgatttgacaaattattagataaacggattacgtaattgaggggttatatgcccaataaatttgttacttattttattattttcatcttcgcattggttagcatcgattgacacattttaatttgaataaagcttggtttggattagctcattgtgattgtatgagaccattgaccggcggcggctctttgttttgttaatccgaattcccccgccccaaaagtgaataatacgtttaaataagcatttgaaagggcgaatttacaaactgctcgttagagaaaagtccattcacagaccaatcaaatcatggggaagtcgtgctattgcggacactgaattggcactgctttttagcgttaaataaacttcactttctttttaagatgcggcgttcgtccattgctttcctccgatttatctcaataattttccaaattatcattttccatttaccgttccatcagtacaaaatttggtgtcacagccaaggcaagtaaaacacaatattttgatgaagagaaatgctctttcagtttcccaagcaatgcaacagaaagtaaatgttggagagatggaaataaacccggaaaagttggacattgttctgcacagtgccgcgctattcgcacttttgaaggtgcgcaaaagcggcgaactttggccaaattctttttttgattttccattttaattgttctctatttccttttctgaatcctttctttgctttgctttgcccaggcgaaggccaattcgctgctccgttcttcgcccgtttttccctctgccgacgcggtgctttacgcgcgttgtgccgcggacgcggtcacttttggcaccaattggccaaaatgtgtcgtgccactgat

SEQ ID NO: 16715 - DNA, 1130 bp, Heterodera glycines
acgggggagggacaaaagcacatccgacggatggaaaaggcccaaatcggagggacaaaaatggacaaaacgccaaaaaagcaaaaaacagagtgccaaaaaggcaaaaaagacaatgaccatcaaagggatggaagcgaattcggtggagcagctgaaaagcataatacggaagagaacagcggacggacaaagggagcggaggaggggacgaagtgccaaaacagcactgatggaaaacattgccaagctgcgcaggatccaacacttcttcgagatggtcgaacactgcaaccgccacttgggccgaatgggcgaggccaactcagagtgagtccgacgccgatcaaatcgatctacagatgctttcactttcccctgctgttcagttttatctcccaattgcctgctaatggtgccggtgatccatcggctgatctctcagtccaatcagttcgctttttgtcccatccctcccaattggactctctggcggatgaattgcagcgcatcctccacaatttcaccttccaatctttgcccatcctttctccacgtattctctcacttctccccgaggccaaaacggcggacgacggaccaaaactgttgtcgccgacgctgttcagctttcacaacgagggcattttctcattgccctctctttttggggtgggcaaagataattaggctaattgatcaatcagcaattccctatcaaatcgaatttaaagattttaataattgtcatgaatgctgagctaacacacaaatcttgtccattcagttgatctctacaaatgagtccgatttggttgagcttttggatttgatcatggatttggccggtgcctcgcgagtgttggacaaaatcgaggctcaaattgcccctcgacagtccattgttgagaaagagctttacccgaatgttttaaaactcgaaaagatggaacggaaatggcaaatggtcagcaaaacgttttcggaagaacaaaaaaggcatttgagagagtttgggtacactctgatgagggacagccaattccgaagtttatacggacgtacgaagaaaggtgaaacaaaaagggagaaccttttgggaaggaaatccgaacagatttaagggtaat

SEQ ID NO: 16716 - DNA, 4029 bp, Heterodera glycines
  unsure (1)..(4029): unsure at all n locations
tctcgagtctctccggcaatttatggctgagtgttaaatggcttatgaacaattcatttcactcctaatcgattttgtattaaaataatcaattttataaattttaccaaatccaagtacatttatttttggcttaattagagtcaattaattgtttttaattgttttagtcttggcgtgtggcttcacagttcagcaacatttcacttttccaagccattcatctgcgctaccggcaaatgtttggcggagtttgatgctgaaagaaccattgaatgaccatcgcggatgtacagtgtttgcgtgtgccaaaaaagttggatctgtcattcaaaaaatataaagatagatttaaaaatatttaaaaaatgtttaaataaaagcataaatctgtcctaccaacccgaaatttgttgactatattccatgttgtgcagcaaagaatcgagtaaactctggtgctgacgatggcatgtcaagtttgggccagttggtgtgtaaaggcattctttggtctgtccgatcggcacaatacagtcaggctcggcggcacaaagcaatgccatggaattgaattggagattttaatttgaaaagcagaacagggacacccgcagctttaaaccccgaccaatcccggcaccgactcggggtaaaattcatttttataataatggcattttcatttttttaaattagtaatttaaattatgccatttcatcagttgccgcgtctgttccattttctgcagaataacaaagccggcctcgaattgttgcggatcattccctaacaatccgtatgttttgttgggcaaaaaatttgccgccattggcaaatattggtacatccctggcaaattgtgattagttatgcttttgaacttaaaataattttaataattacccgggtgcgtcgcaatgtttttgccgtgaccagtatcttaaaaaacaatttttcaaaaaataaacaattaaaaattgtccatttaaacttactgctcattaattggactgggccaattttcccattttgaagcggcttcaaaattgttgccaaattgtcactgccaaagaaaattgacgtgtccacccaaatgacagtgtcatattccaacaaaacatcctaaaatatttgttagaaactttgcagttttcttttaaaattaccgccatgacaaaaattttccatgcgaaactttttatgtggcgcactcggccagcaaccatttgggaaaaatcgaagtttcgcaattccaaattgcacaccgaattcaactcagccatcttcaaaccaattaaaattaatcttcaattaatttttttgcataatttatgaataaaaaattaccttataaaaaaatataaaattaattaaaatttcttttacccattcgctgtttttcgtcacatttcccaaatcgtaagcaattattttttggttgcatccaaaatgctcttttatgttcgcgattagcatccgaagagatgggaaataattggcactggcggctgtcaaaaagacacattttggatgtccggggaatttgacctgaatttttacaaataaaattatttttataatttttcttaattattaaatattaaaaaatgaatgattcgttttattactaattgcatttgcaataattaatgaaaaataaaaagaaaggtttttgcacaaaacactcaaaatggaatagtaattgaaaatgaaaagaaaaaagttattagaaatgataactgttgaaatggattattaaattaaataaatattacaattaaagagaagtatttttattattttgatgaattattaaaatttaattgtgtattttacctgattgttcgctttgattgcgtatttgtccgacagtttgtaccgctccaaaagccacgcaaatgaacaatcgaactttttgccaagaattgcacacgactcattcagtttcatcgtgtaggccatcttgaatttgaacattttgacatatattggcacttaaatcgtttcttgaatgaccgtaccaaacctagtgatacggtattattgaatttactttttcaccgcagcattgattttccgtctgatgagtggcattcgacctgaacattacttaaaataaaaattaataatgtaaaattactcttcagaggggaagaagcattggccattgacggagttgaatagtacggtaaaaaatgtgaagaaattaataaataataaatacataatacacttaacaaactttatataaacttaatttatcaatgcataatttttacacaaatacaaaataatctattattaattccttattataataaaattataattatttaattgcaaataattgaaatgatttttgttaaatagaaaaaatatatattcagaaattattcatctttaaaaatttgaacaatttgcagttgatttacagcgatgaataagcaaaaaagaagaaaacattttttatgttcattattttaacaatgtgttaatgtcaagatgaaaaagccaaagaatgaaaaaaataattaaaatgtcggaagaaagaatgaaaagatgaataagcacaaaaataaattgaaaagaaatttatacaaaaataaaataagaaacatttttaaattcacctcaatttatgcataacaaatactacaacaaaataaaattttaaaacaaacgaaaaaaaaaattgcaattataaaacaaagttttaaagtttatcagttaaaatttggatttcctcgaaaattggcgagcttcaattgtggaaggttctcgcgcacgttcgttcagcccccaactgtttaacgaaatcaggtgacaggctgatcatagaataaacaattaacgcctaactgcagacaaaaagtttctcaaaaattgagttaaatttttaaataaaaaaatttatgaaagcaaatttataattttaaaatgtttacactgtgaattttcacaaatttatgtccaataaaattattatagtaaattcgaaggcaaattaaatgtctaattttaaaaataaaacgaaaaaaggaaggattttttaatgaaattataatagaaagtttcaaagtttatcagttaaaatttgaattttcctcgaaaattggcgagtttcatttgggaaaggttctcgcgcagaccggatttgaatggacaaaaataaaatccaaaaatgcattaaaaaatggacgaaaaatttcagaatatggatgaaataagcttaaaaacttcaaaatagccaaagtaaagacaaaaaattcgcaaaaaaattttgttctatttttatagttggcatatgtatttagaaaatttgcaaaagtgcaaaaatctgtcctaaaaatgcaggaaacatttttttgagaattatttttctcaattgaaaaattttaaataatttttattaaaaatagaaatgttgaagattaaatgacatttcgagtcgataaaaagtgagatcctacgaattaaaaatgccaactatgaatttttaattatgtctatttttgcatatctcacgcgaaaggacattgtgcgcctgtacaacagggctggacgtaactggattttcaattacggaatacgtcattcgtaattacgtccagccctgctttacaagtgcttccatcagttggactcgcggcgcatggggctgacaaatatgcaatgtgcggacaaacccaaacggtagataggtacaatgtttcttaataatattctttaaaattttttactcgtttaattttcaatttattaaattttataatcttgatattattcgatatccctaagtgttttttatttaatggcctgcaactgggcatcttaaacaaaatatataaattccaaatatacggaaattttanacaattatcattacgcttgcgtaaaaattaaatcctaaataatagtaaattncgaaatgttttacttttacattaccgattgatcgttatagaaaactctaaataaaagataattttcgacaaattattaacacccttccatcagccgctttt

SEQ ID NO: 16717 - DNA, 3230 bp, Heterodera glycines
  unsure (1)..(3230): unsure at all n locations
aaaggataagagaattttaaagcggaacggattctcgggattaaataaatcctttttttagaacttatcagactcaaaaattttgacccgcatccgtccaatgtttaaaagaaatcagtatacccttgcttggaaagctaagcccattaaaaggagcacaaaattcgctaccgaagacttgacagtgcatctaaagcacaaaaaaaaatgatcaaatccaacccaaaattagttttactgtcttgcttttcgtgaatatcccacataatctaatccatttaatccgctagtcatttttaacaatgcttaggtataacaatgaattttacacatgcacatcaaatacaatggagatgaacgaattttgcgacaagcaagcaaaggtcaaataggtacatacaaacaaacaaattatacataacataggtaatattgaaatggcaaagtgccaacatcatttcggtcacgccatcacatccatccattaattaattcatcattctgcttctgtttgctgatcagtgatcacttggcccgggagaagcggcgtcgagaaaactgaaaaaacaatgatttaataatttttttcgtaccataattttctcaaatcaaatcaaaataaaccgtaattatagttagttggactcaacgtctaattggaaacaaacaaaaataataaaattgttcacccgtcatcaaatccgccgtctctgatcagaaagtgaattggattcggcggattaagcagttcatgctgcacattgtgccagttcctctcatcccattcaattggacaacggctgagccaaaaaccatttgcatattgttcaagtgtcaattgctccccagtcacttcgttgatccgatcaaatggaacaacggagtcaattacagttgaagatttcaagcgaatgcggaaagtcactggcgaagaagcattggaaaatgcctaaaaatgggccgaataaaaacatatatggaaaaagccattaaaaagggggggggggataatccacctttttcagctgttccatcgttgacgaccattgatccaccgatgatttaacatagcatttgagccacttcggcaccccgttcggaagaggcgtgtacaaccatttggccaccgcttggccatccgacgccatggcactgtcatcgggcggaaaagcgagcacaatttcgtcattaaaaacgacatagcgaagagacagacaattgctgagcattgacggggccaattgacggaaacggcgaaaagtgatggtgtccaaaagcatcagatgcatggaatcgcggaacattggccaaatttggagcaaaaagtagtccaaaatgcgatcattgcccgtgctaatgtccaaatagattccacaaatgcccaaaagacggcgaaaacggtggagaaatgcgacaacattttgatcgatgtaactgaaaagtgcagaaaatatgatggtcacacgaatcaaattccaatttcatctatttttacatgatctgaatgcatccggtgaatccgatgacttttttcggcaacggatttcgcgggattggcaatggatttccatcggaattgacaatttgcatttgcttggtgccatttcctacgattttcgagtgaattagcaattgtttgttcaatttccatttgcgcgttttgaaatgttcgtccactctgaggtcaaatcgacggctgataagtgcaattccaaggccaagttgagaaggcgcaaggaaatcgaacaccaaaagccaacaatcggcagagataaagctgaaaaattaaagattttataaaattctcaaattttttaaaataattttttacatttctttgcgagggcgtcgtcgttttttgacatggtccaaaaagaaccaaagaatgctggcacaatcaaccaacagcagaagcacggcacgccaactgaaaaataaattgggtaaatgaatgaatgaaagggaaaagcaaagcgagggaatccaaaagtgaattttagctttttttaaaaatcttttttgaggtagatgaagctctctaagccttgaaaattggttttgaatttttttttctcccaattctgctggtcaaaaattgagcaaaagaaatttggaaaatcagaaaaaagaacagaaacactctaaacgtacagaatttctgaagacatttgtagcaacaaagtgaccggaaattataaggagattgaatgagagaatggaagaaacattgggccgttttatactaaaaattctgccaactcggggccaaaatcacgaaaatgccatcaatagttcaaatttaataaaacaaaacacgaacaaatgtttgtacagaatttttgtgaatgcatgaaatttttttaatttttcaagcagatagcccctccctctgtgctaaagaggtattttcctgcaaaatttcaaagtcactcttctgacaaccacgatctgaagaagaaaatcagcattttaaagcttcgtgattttaaaaaatgataaaaagcaaattgacgatttggagacggataatgattagtagggcgtaaaattatatggatataaaatcacgaaatatggccataaaatatggacaacaaatcgcaaaatatggacataaaatggcaaaatatggacataaaatggcaaaaatatggacataaatttttcaaaattaagggtatactttctcaaaatttttaccgaaaaatcaacccgaaaagcgaaattttcgcttttttgcttatttttgacataaatttatcaattttaagaaaattttgtagcaaattcgaatttcgcccaatttccatttgcgtgtcttgaaatgttcgtccacgtaaatgtcaaagcagcggttgatcaatgcaatttcggngccaaattgggaaggcgtaagaanaatcaacaccaaaagccaacaatcggcgcagataaagctgaaaaatttgaagaatatttaaaattnntttgtgaatttacatttcttttttggtggngcgtcgtcgttttttgacatggncaaaaaataacaaaagaatgatgtcacaatcgaccaacagcagaaaagtgcagcaacaaaatgagagaaaaaatttagggagaacgattgaaaatgagggaggagggaaacggaaaaaaggggaccccttaaaagccagccaaataaataaaataattggtttctttatgattgtattgggaatttttttttttgtggggggggggggggg

SEQ ID NO: 16718 - DNA, 1187 bp, Heterodera glycines
tgacatcctagtgggaactgaaaacggtacgggagattacaaaataagtccccatttgcgcttaaaagggcgataaatgtcaattggagcgatatttttggcatgtagtgctggaatttcagaattctcgaatattgacatcttagtgggaactgaaaacggtacgggagaattacaaaataagtccccatttgcgcttaaaagggcgataaatgtcaattggagcgatatttttggcatgtagtgctggaatttcagaattctcgaatattgacatcttagtgggaactgaaaacggtacgggagaattacaaaataagtccccatttgcgcttaaaagggcgataaatgtcaattggagcgatatttttggcatgtagtgctggaatttcagaattctcgaatattgacatcttagtgggaactgaaaacggtacgggagaattacaaaataagtccccatttgcgcttaaaagggcgataaatgtcaattggagcgatatttttggcatgtagtgctggaatttcagaattctcgaatattgacatcttagtgggaactgaaaacggtacgggagaattacaaaataagtccccatttgcgcttaaaagggcgataaatgtcaattggagcgatatttttggcatgtagtgctggaatttcagaattctcgaatattgacatcttagtgggaactgaaaacggtacgggagaattacaaaataagtccccatttgcgcttaaaagggcgataaatgtcaattggagcgatatttttggcatgtagtgctggaatttcagaattctcgaatattgacatcttagtgggaactgaaaacggtacgggagaattacaaaataagtccccatttgcgcttaaaagggcgataaatgtcaattggagcgatatttttggcatgtagtgctggaatttcagaattctcgaatattgacatcttagtgggaactgaaaacggtacgggagaattacaaaataagtccccatttgcgcttaaaagggcgataaatgtcaattggagcgatatttttggcatgtagtgctggaatttcagaattctcgaatattgacatcttagtgggaactgaaaacggtacgggagaattacaaaataagtccccatttgcgcttaaaagggcgataaatgtcaattggagcgatattttt

SEQ ID NO: 16719 - DNA, 1048 bp, Heterodera glycines
  unsure (1)..(1048): unsure at all n locations
tttgtgatcaccaaatgtttcacgtcaacgggggcaactttttgtgcttgcaatgctaaactaaatccgattcaacattgtgcaaaatggagattgatttgccgacctttgaccagtgcttggccttgccttgggcccccggtgttgaccaacaccgtctcactaccactccctttgaccaaataaacactgattttctgctgatttcgttgtttagcgtcgataacaacagcggagaccaattcactgacaatagaaataccaacttttgaatcgccaaatgcttttgctttgaattttgagtttatgtcgaactaaagcatcttcatttgcgatgagcaaaaaaagaagcaaaattgtatccgtaccaatccaaaagatgccttttcggggaattccgtggaaattcgaaaagatgggccgtggcccgggacgatttcgtcactcccctgccagcagaggaagcgcgagatgagctgtcgatcaggacaaatgctgcactgtttccatggctgatcagacaaccaatcgttttcgaactcaaaaagatcgcctgagggaattttaggaatgaacagaaaaatgggaaggaaaagggataaagcaaccgacaatcgaagtgacccatggcacacatttgtcaccttgctaaatgctttctttttttaaatttaaaattattcgaacaactttttttatttgctgcactttcacaacgatatcccccggggccgaatggccacccaaaagagtcactgaaacaaattcaggcaaatcggcattaattctttctgagccttcggcgagaatcctttccggtgtgattagttgtgcattcggaaataagccgatgttgccgcaatggtcataatgccaatgagtgattaccaaatgggaaatgccatcggcagaaatgcctttggcgcggagagctgaaaaggtcgtgctttagtctaaaattccaatttcttactcttttccnatttttccttttcgtaagcactcgcacaatcgaccaacattttgagcttttccctcccccatttgc

SEQ ID NO: 16720 - DNA, 1538 bp, Heterodera glycines
  unsure (1)..(1538): unsure at all n locations
aatgaagcgaaaggacgacgacgttcgccggagggtcgacggttctgattattgaaatgtgttttttgtgattgtgctttatttggtaaatggcttctcctccgtcnccttttcgcccttacttttccaatttttcgtgcgatttcttccgcactttttgtcgaaattccgtcgtgtagaaagttgacccctccgcgagtcccagcggccgcccacgacgaaggcacaccgctgctgtcgtcgccccaggcgaacaccaacacgcgtcgcccttgcccaatttcaatcgctgcgggcgcgtccgtctccaattcattgcgtccggcgccgacagttcgaatgccgacttggcgcagaacggaaacagtttcggcaagacctgagggattttaaatggatgacagtcaaataaaaacaagaaaatgccaataattccacgaccgactcgcgcccacctttgtggccccagtcgagcacgtggttattggccaacacgcagcaatcgatgcgagcactggtcaaaaagggcacattgtccggatgcattcggtaattaatgcctttgcggggccaactgacaaagcaaaaaagggcaatggacgaagaacactcaaaatcaatcacttgtcttcgctggtggtcactgatgtctccaaattgatgattcggacgagcggcttccattcgtccaaaattggcaaggcatcgccccaggggtagtcgaagtcccttctgcaacggaagaacagaaattcactaagatgtccgcatatttagtcattagcaattgcaattcagtcttttgatcgttaactcatcgaacggtcgcttaattttcatccattagctttagaatgcccacttttgtggcattggccccgagtggcgttcggccaaccgcacgtaatcgttggcatcgttcacaaatccctcgtacaaatgcgactccgatgggtggggaaggatctgatcgacgcctctgccggccatcacatcgccgcagaggaaaaggcgcacgcccaactcaacgaaggccattccgttgcgcatcagccagcaaatggaaagacaaaacagaaaatcccaaggcaattaatcctttgattttccatttgtaaatccacacaaaaaaaaatcaaaaaaaacattggggcgaaatcattcgaaagatttcgaaagtgagcggcgcagtcgatcaatttgctaaatgtgcttgtgtgtgttctcgacttttctcgcctcttttctccataaataatattttgttgttgtttttcccttcgccgtccctttggccaaacgatggcggaagcatcaaagggcggaaaacatcaaaggaaaagaattgattgattcaatcaatcaattaggaatgaaaggggagctcggggcaaaggggtggacaaatggcggaagagagcgcaatgccaacagggacaaatgggcagcggagattttgaaaaattcaaatcgaattcgaatttgggtcaatgcttttcctttgtgtctgttctttttgtcccgtccacacataagca

SEQ ID NO: 16721 - DNA, 1102 bp, Heterodera glycines
  unsure (1)..(1102): unsure at all n locations
atgaagctttgcaagaaaagtgatgttgacttctatgcgagggttaattattcacgaatattgaaatttttattgttggagttcatgagccagtttttcaaaacagcaacctggccaatttagaacccgcggaacccatcaatattgacttcaaacatattttaaaactgataaatcgcacgaatcagtgcgctgtatttttaagactgtcaaaagtactacttgcgttcctactattgcttccgtgtgagacttttcttagggaatagaatggtcagcaaccaatttcggacgctttttgcaggtttaacgtataaaagaatgcttttccagcgattgaatataatcacaagcaatttaaattattgcctatgaagctttgcaagaaaagtgatgttgacttctatgcgagggttaattattcacgaatattgaaatttttattgttggagttcatgagccagtttttcaaaacagcagcaacctgaccaatttagaacccgtggaacccatcaatattgacttcaaacatattttaaaactgataaatcgcacgaatcagtgcgctgtatttttaagactgtcaaaagtactacttgcgttcctactattgcttccgtgtgagacttttcttagggaatagaatggtcagcaaccaatttcggacgctttttgcaggtttaacgtataaagaatgcttttccagcgattgaatataatcacaagcaatttaaattattgcctatgaagctttgcaagaaaagtgatgttgacttctatgcgagggttaattattcacgaatattgaaatttttattgttggagttcatgagccagtttttcaaaacagcaacctggccaatttagaacccgcggaacccatcaatattgacttcaaacatattttaaaagtgataaatcgcacgaatcagtgcgctgtatttttaagactgtcaaaagtactacttgcgttcctactattgcttccgtgtgagacttttcttagggaatagaatggtcagcaaccaatttcggacgctttttgcaggtttaacgtataaaagaatgcttttcccagcgattgaantataatcacaagcaa

SEQ ID NO: 16722 - DNA, 1092 bp, Heterodera glycines
  unsure (1)..(1092): unsure at all n locations
acaaacgttcatattttgtctaactgataggaggcccgtatttgtctcgtagaattgtttaaaaaatgacattctcattattaccggttcaagcaattatttccgaaagcgctctcaattggacaacaaacgttcatattttgtctaactgataggaggtccagtatttgtcttgtagaattgtttaaaaaatgacattctcattattacctgttcaagcaattatttccgaaagcgctttcaattggacaacaaacgttcatattttgcctaattgataggaggtccagtatttgtctcgtagaattgtttaaaaaatgacattctcattattacctgttcaagcatttatcatttccgaaagcgctctcaattggacaacaaacgttcatattttgtctaactgataggaggccagtatttgtctcgtagaattgtttaaaaaatgacattctcattattaccggttcaagcaattatttccgaaagcgctctcaattggacaacaaacgttcatattttgtctaactgataggaggtccagtatttgtcttgtagaattgtttaaaaaatgacattctcattattacctgttcaagcaattatttccgaaagcgctctcaattggacaacaaacgttcatattttgcctaattgataggaggtccagtatttgtctcgtagaattttttaaaaaaatgactatctctttattacctgttcaagcatttatcatttccgaaagcgctctcaattggacaacaaacgttcatattttgtctaattgataggaggtccagtatttgtctcgtagaatttttttaaaaaatgactatctctttattacctgttcaagcaattatcatttccgaaagcgctctcaattggacaacaaacgttcatattttgtctaactgataggaggccagtatttgtctcgtagaattgtttaaaaaatgacattctcattattaccggttcaagcaattatttccgaaagcgctctcaattggacaacaaacgttcatattttgtctaactgataggaggccagtatttgtctcgtagaattngtttaaaaatgacattctc

SEQ ID NO: 16723 - DNA, 2671 bp, Heterodera glycines
ttattacctggttcaagcaattatcatttccgaaagcgctctcaattggacaacaaacgttcatattttgtctaactgataggaggccagtatttgtctcgtagaattgtttaaaaaatgacattctcattattaccggttcaagcaattatttccgaaagcgctctcaattggacaacaaacgttcatattttgtctaactgataggaggccagtatttgtctcgtagaattgtttaaaaaatgacattctcattattaccggttcaagcaattatttccgaaagcgctctcaattggacaacaaacgttcatattttgtctaactgataggaggtccagtatttgtctcgtagaattgtttaaaaaatgacattctcattattacctgttcaagcaattatcatttccgaaagcgctctcaattggacaacaaacgttcatattttgtctaactgataggaggtccagtatttgtctcgtagaattgtttaaaaaatgatttcctcatttcttttgggataataataatacataaagttctttttttcatttttcgtctttaaacattcgtaattatggagatagattctgcacttctaattccagctaattataaatacacattaaatgggggagggtctgaaaataatttagcattttaagttttgacgaatgtatgaggatttttataaaatcttccagaaccgaacaaaaaactattaaaattttgcaaatagagagaggtcctatgctaaggaatttgtgaattttcagacaatttgaagaccgagtccataagtctcgaattggaccctgtcccgactcggcctacccccatacatgtgaacctaattaggagctatcaataataacactgtaaagaggcaccgatttttcaattttagcctcccatttccattatacatttatataaataatgtccgcctttctgcgctatttgcctatgtttcgccatcgtttgcttttcctcggcggtgcttttgcttcggtcggtgtttgttccacggccgctgttttggtaattataaattttttcttcgattttttgccataattttgttgacaaatagtgccatcaaaatcaaaacgatggtggctctctgctgaatttgtcagtgtgcccaaaattactgagccggtcgctttctgatccgcgagtttttacgacgccgggaaagtcccaaggagaaaatggcggaccaatcgaacaatgaggaggaggacggaggagaaaaaatggcaaagaatggtcaattatttgtcagcaaaaagacaaatagataattaattaactaattaaatagggaaaattaattcggaaaaaaggaaaattaatgaaataattttaacaaatgttcttcgcattgctgatcagttcaagaagcaaatggaggagcatgaattttgtgtattctttcacaataattttaggctgtgaaaagcggaagaatttccgacaaaaaatcattggaaaatctttgcggggagggggcggccggactatctcagagttttgccaagggatgtaattctggggaagggagcaaaaaaagaaaaaattgccacccaaaatccaaatttggcaacaatttttaggccaaggaaaaacaacgaatgaatgcacgagagattggaaaacaacagaaaatgtacaaagaaaggtgaaaaatttaaaattatttatgaaataatttaaacgattcgaaataataattttataaataattgaattaataattagaaagcaaagttaaaaagaatttttcctttttcaaaatatttgaggtgtattcagttgactttaatttcatttttttcagtctgtcaaagttcgcatttgagccaatttgcccaattatttgcgatggcaccgatggaaaagagaaagaaaaaaaggaaacgaaagaaacggaaaaagaggaaaaagaagaaaaaagagagaaaaagaatgaacaatcggaggagaagcagaaaaattcaaccgaaaggcaaaacgaaggacaaaaggaagagacggacagagagaaaaaagcggagaaagaaaaggcaaaaaagggaaaagagaaaaagaaaccccagaggggagggagcaattaaagcaacaaaaaacaatcaaatgacggaatccattttctgggacaagcgagcgacctaagaatttttcatgaatttgaatcagtgaagagagggaatcccattcactcgctttaccgattgaaatattacatttattcttaacacctatatataagcatgcttatgttgatgtgaagtaagaagtgtttttttgacaaatgccaatggttcaggacgtggaaaagcaaagaattgccaaaattttttggacactttgatggaggcactggcgggaatggaaaatggcaaaaattcaatcaaattgccgaagaaagtaataaaaaatatatattgcatgattaatgttgatacattaattgttcaattatttcattttaggtgcctacatttactgaactgctgatgaatggcgttcgaagattttggaaatttttgtgttttttgttcatgaaactttgtccgaaatttttgtatttatatttttttgtgcctatattttctttttttaacatcctgtgaaaggattgaataaacgttttatgcattttatt

SEQ ID NO: 16724 - DNA, 2037 bp, Heterodera glycines
  unsure (1)..(2037): unsure at all n locations
atatttatgattttgtggcatttcttaatttttatatttttcattgcttttgaaattgaatccggcataatccgaccaaattttgatgagatattcggcaacgaatgggacaaaaatcaaaatgaagggaaagtgatcagaattgagcaaaatgaacgaaacgagaacttacaatcagcagcagttgatcaaattggtgaagaaatggggacagacccaattgatcaaatgagtgaatattccaatcaaaatgttatgaagaaaagtgatcaaaatacgaaaatgaaaccaaatgatcaacagaaaagagaaacaattcaaagatatgaagcaattaaagaaaagttgaagcaaaaaggaaaattacaaaacaaagacagagtaaaaattgaaaggaaaattggaaaattattaggcgcaagtcgcgacaaaatatataaatggaaaaaaagaaatgaatttaaataaaaaacaaattaaaatattgaaaagaagttttatgaacagaaaaagaaagaattcaatgaacgatttgatgaatttaaaagtttatatggccaaggcaaacagaaagcatttgtgaaggaattgggcattgataaaaagacatttataaattggaaaaaggaattgctgccaaattatcataaaactaagagattttttaaaaaataaaggaatattttgaaattaaagaagcaaatccaaaaattagtgatgtaataattggaagccaaactcttagaaaatggaaaatgaattttaatatttgatttactctaaccgaattgttttcattccaatttttcattctgtgctgtttattttattctttaaaatcttatatttaaaatcttttaattaaaattctgaatttctaaacatttgattcttgagtgcactaattcttgtaaatgaataattaaatttattaaactaaagtttttcatttaaatctttgaaactgggacaaatgcaatgcgttttctgtgaaaaatattttttcaaaaattgcgaataaccaaatttggtaaatttttgaagtttttgagtaaagctatggaaaccagcgccaaaaattctcttttaatacttaaatatctcatatgcttataacctcaaaaaatggttcttgatctcatttcttgggattttttttttttttttttgctataactcaggaaggaaaggattaaaacaaaatctctatttttgaatacaatggaatcaattttaacattgagaaaattggaacagattacgcgcaatgcgcacgcctttgtggtccaagggacggacaatggtgccatttacgagtgcgcgagtcaaaccaacgcgaacatgtcgccgctgatcagtcgggtgacactgcgcgttgactgtaagcgtaattaatttttcctatttgtataatcatttttcaatcccatttaatttggccattttatatgctttaaaaatattaccattttttaatcaaaaattgtcaaaaaatttagaaaatgccaattaaagtcccaaaaatggcacccataaaattgggacattttggatataaaccataatattttaatgatctgggccctggtctttctttcattttttaccgtgattttccccgcattaatccccggctttgcgcctctgttacctaattgtccaattcccctcaaatagaccctccggcaagtgtgttcattttcggcaataccgtaatgcgcaagggcgaggcgatgaccatgtcatgcgtgtcggggtgagtaattaggagaatttaattgaataattcaaacatttcacagtgtttcttcgcccgcttcggtggtcacttggcaattgaacggttcgccaacaaaaattcaaccgcaggagcaaaaaaagcaattgcaggtgtctgacatttacaaatatttgtggatataattaggtggaattaattcctccttcattaccattaattacttttttcatcggttaaatggtaanagggatttgtcaccgagtccaacctaaccatcgattcgagcacgctgctgc

SEQ ID NO: 16725 - DNA, 2127 bp, Heterodera glycines
ttatttaattttaatgaacaatttaacttaattgcaaattttaatcatttcttcagctaaaattacctcctttaattaatcacaaattatcttactcttcgacaaaattaaattcaataaaattgaatagatgagatgtttttaattcgtcatttaacaaagcttctcattcattagcattattatgctgcataaaacgccgtgtccatttaagcgccgccctcccatccgttcatttttgatgccgaaccgaataccgtaccgctggagggcacactgtacaatttgacatgcgaagcaaaggacggacacccttttgccacactcagctggttcagaggggtggaaaaggtcattaactatttgattattaatcaattaaatccaattaaataaattaaattaacaaattctgttgaagaatgttggaaagcaacaaaatatgttgcatcacaagaaaaagattcgctggaaacaggtcaaacaaacattgtcaaaagtgtaaagctgtgatttgtcttttgttgtatttgtgaaaattttaaaaattaaaacctaattttttcggcatattttaagaattttttaaattaatttttgcttcaaaatataattttatttattttattttaatgattgtaatgttttttgttttctgtcggtggtttaaaagaattttgaaggattttggccgagttttttttttagtggcttttcttaaattgaattttactgttaatttttacatttaaatttattttgtgtatttaaattgatgccagaatatcactttatttaagccccccttttagctgaaggaaacacaaaattcgctgcacggcgacagctcgcgaagcaccgtcacacttttgttggaccgggcgatgaaccaccagcaaatccgttgtgaggccgaggtgagtgatgaacagggattccttttttatgtaagaaaaatcgcgaaatatgtaaataaaatatgtataaaaaatgctaaattatgtatgaaatatacaggcctagaatcacattttagtactttaaaaattaatttttggtatctgtttttgaaaaaaaaattgattttttagaggtatatttctcaaaaaaaaatctaaatttcacaagaaatttctataattctcaaaatatgtaaaaaaaaaatgaaaatatatacgaaaaatcgctaaatttttgattttttggggcatttaataaaaaaatttccttaatccttaaaaactgcgaaatatgtctgagaaagtccaactatgtagaaaaatatatacatatgtaatatgtagaaaaacctcgaaatatgtaaataaaatatgacccccaaatatgtactaaaatatgtaaataaaattttaaaataattatgttttggaaaaaaaaattgctcgtaaagggtgaaataggcacaaaataccattaaaataaccttagtcttagaatcacatttttaatattttaaattaattttagtatctccttttaatatgtacaaaaatctgaatttgtgccaaaaagataaaatagagtacgtaaaagtggtttcattccgaaaatttctcgattgtttatgggttttccgttttttcttctgtcactgttaaatcaatggccaaagcaattttgtcctcttctttgttgtaaaagcctttgtccgggtccatcaaatgcttaaaattaaattcaaaatgcatttatttaaattataattaattactcaccgcaaaagaaatgaaatttgggaatccccacgtgttttccattttattgttaaaaattttgccaccgaatttcttcttgaaatcacacactccgctcttttgcgatacaattcgaagggttgccgaacatttgcgactcaaatgcaaatcttaaccaattaactaattatcatcattagggacgggacgtgaccggaaaatgcgtcagtagaaaatgcgtcagtgatgtaaatattttaatattaagttctgtagtattggtattgtaatatagaagtataattctataagaatagcgttcataatttcgaacctcgaacccgaattcgaacaagaagtcgagaatttccgaattagtgtttttcttcaaaatcggtttaatacagggaaa

SEQ ID NO: 16726 - DNA, 3157 bp, Heterodera glycines
  unsure (1)..(3157): unsure at all n locations
ggtcaaacagacgcttttcccgagaacttnttggactaagtgagtcgcgtccagaaaagagagagagaaaggggagcagcggctttcggtggtttgatcggtcggtttgaaggggccttcccgccatggctttaatgctctctctacacgaactccacatcaataagctgctgccgatcagtctcattcttcacccactcacaactctctccttcctcccccccccttttctctctaactctctccccccttttctctctccttcctcctccccccccccccttttcgccctctctctgtcccttttctatctctttcttttcagtgcctttctctcatcgcttttccctcgtttcgctgtgatcctcgtgaaatgagatcaaactcaaaagcttgttgatgattgaattaatttaatttagccccatgaggcagcaaatattactttcctttccaaatttaactgcaacttaaacagcagcaaaaaaggcacttccaatgcccatttaaaagcgtcgacggaattcggactattttatggcggaagggcgacatcaatttggccactaattgtgcccctcggcgagggcattgtgccgggccaattgcctttggcctgcgactgttgcgccactcatccaaatgcttttcttcattttctctctcctctttccattgaccaaccacaaaagtgtctgtccgtttctcttttctcccattttcaccattcgatgatgagtcccttcccctcctttcttccccccccccccggtgtatctgattttgctaatatttctccgattaaaaacatttttctgctcaccattcgccaatcaaatcgcttatttaagctttttttttgctcaattcaatgattttttgagtcaatccgttgtttttttgtttgtttttcaacggaaatggccaccgtttggagcaaattcgcttctcagctcagtaagtgcctttccttctctcttctgttggcttttatttttgtttttttgccatcacttttcgcccttttcaccttttaaaggttcttggctgtcggaaatgccttcggaaaagcgaaggggtcgcgccgagacgaggccaaacggtggggacggagttgcgggggtgcgcaattcgcggtcacttagcgcactcagccgacggcacaatttggtcagaacgtcaaaaagctcggagaatttgcaccgaatcagcctattgtcgacagcgacgacaattggcaatggacaacagagacaaaaggtcgaaaaatggaaggaaaatgaacgaaaatgagaaccaatggacagcgcaaatcatcaaaagataacaatttgtgtttcagccatttttggcacaattcggactcaatgggccaaatgcccattccgaggaggggtcggtgccgtgccaaaacagccgaaagggatcggtcgaaggccaccaaagtccattaacaccggcaaggacgaagacgaggcgatttccattttttggcaaagaaaacgaaacgacggcagcgccggggggagagggcgaaagcggatattcaagcggaagttcgtcgagaaggtgtgcctagtccaaattatgctctgatttgccaataatcactattaccctcctattttctcctctgactgtttcctcaccaatccatactaattgactccccaccatccaattatcgtcctctctattaactaattgcttcaggaaaaagtccaacggtcgcttcgttccttgcgcttcgtcttcctcggcatttttcctcaatttaaacgcgcggcacaaaagcaatgagcggcaaaggcaacaaaattcaaataaaagcacaaaggaaggaaagaaagaaggtgaatgccaatttaccgcactgtttggtaaaagtttctccgttcagccgaaggtacggaaaaatcaaacgcatcgacgccatcggcagagacagcttcaaagcaggacgaattcagcagcggatcggccgaagaacagaagaagcagtaaaggagggaaaagggaaagtaccgtatccccttcccctgttacagtacccccgtatccggggaaattaccgggggggggggggggaaattagacaaatccccaccagcagcagcccttttttgccatttctttcccgcatttgtcctccatcagttggtggttggtccatcactcccatcgtcattatcggcccccctctttttcctctgtgccttacgtcgatgagaatggctgtgacgatgactttacgcagccaatttcggcacaaatagtgcccggcaatgacaacgcacgcaaacgtcggccgtccgcaccaacggaaagtgcaattgtggccaacggtgagcgggtcaattaactaattggcgattaataatttgaataaataatatttggtccgatattccttttttagttcatttgtcacttttccttttctaaccttgattttcttcatattttcctttttagcactcaaagggcgatcggccacaattttcccgggccaacattatttgatctcaccgcccaagcgaactttgggccaaaaacgcacagaatccgccttctctgctttattgtccccgagtgatgtgagtttattgtaaattgattttgaaacatttgatgctttgtcatctttcaggccccattttcttcccttttcccgacgagcatttcatggagtgtccaaaagggccaatgccaatgtccaccccctccggcgccgactggcgatggtaaattcgagaaaaataaattttgaagtggaaaaaccaaacggaacgtaaaaattcaaacaagccggccaaaaactttttccactttggtaccccatcaagtcaaatcctgagacctttcagcagaattggcacaattcgaatcgcaccaccgcaacgtcagcagcagtagaaattcaatgacgaaaaagcggtgatttgggaaaagctgacaattaattaagcaattaatgaatggtaattaagactggtaaatacattgctgaacggccgatggagaacggcggacagagagagcggcagagagagaggggaaaaggcggagaaacgaacgacgacagagagggccaaggacagcgcagggggaagctcaaaagacgtcggagccaatcaacagttccgcctctcggcaa

SEQ ID NO: 16727 - DNA, 2648 bp, Heterodera glycines
  unsure (1)..(2648): unsure at all n locations
tatgcgtcgacaatgatcaggtactcttttccgaannaatggtcggcgtaaatcaatgtgcactctctgccacggtccatttgtcttggccaagattgcaaattcgttttggttggcgcctttgcctcattttggcatggttgacaattttcaacaaattgttcaatttcctggtccattttcggccagtatgcatattcacgagccaactgcttcatccttttcattccaggatgtcctttgtggagcagttgcagaattttggctcggtgttgcgttggaatcacaactctttcagcatacatcaaacaatctttggtgatgctgagttgttccttcctttggtggaaaattctgatttccacattttcgttgccaatattttgtggccagccatttctaatgaatttcatgacctttttgatgttctgatcacttttcgacgactggacaatgtcatcgaatttgatgggaagcttctcgacggttccaatgaaaatcgattctacctccgaatcgaccgaagtatttgcgatgacgcggtcttccgcatcttttcctttggcaattagccgtgaaagtgcatcagcttggccgaagtcgttggtattgacatactcaatgttaaagtcgtatgccaagagaatgagtgaccatcggagcagccgattggcactgcattgccgcactccttttttgttgccgaagatggcgagaagaggcttatgatcagttaggagcgtaaatttacgtccatagatcattttgtgaaatttctgcactgcaaaaattattgctagtgcttccttctcaatttgtgagtagttcttctcggcaggagttaaagcggaagatacatgcgcaatggctttcatcgttccgtccgggaatttgtgcgaaatcactgctccaattccctgatcagaagcatctgctgctactacgatctctttttgagggtcatagtgcgtgagcagcaatttggatgacaaaatttctttgattttgtcaaatgcctttttgcatttgtcgctccaattccattcggtgtccttttttagcaaatcatcaagcggctttctgacgaagcgcatgtttttgatgaattgttggtaatggtttaccattcccaaatatgatcgaagtgaagagacatccgtcggttctggcatctcattgatggcggtgattttgctggggtcgggtctgcgtccgtttttgtcgattatttgtccgagatatttaatttcatcttggaaaaacgaacatttttctcgtttgacgcgaaatccccattcttgaaatcgcgagaacatctttttcaaatgttcagaatgttttttttggtccttgctgacgatgatgatgtcgtctaggtaggctgtcgcgaagtcaaaatctgccaacatttggtccattatcgactggaaaatgccaggagctgttttgatgccaaagggaagtcttttgacttcataatttcctctatgggtggcaatggcacacagctttttcgatgcttcgtccagctccacttgaagatacgcatcccggagatcaatttgtgaaaagtactggcctccatttaaggtggcaaaaatgtcttccggtaatggtaacgggtgctggtggtcttttagcgcattgttgagtccggttgaatagtcgatgcacagtcgagcgttaccatcggcctttttgacgaccaaaatcggtgctgcccattctgtgtgctcaactttgccgatgactcccattttctcccaacgatccaattctccgtcaactgcatttttggcgttgtacgggaccggacgagcctttctgtatattggctgtgcgtcgggtttcaattctaaatgcgctttgacctttgtgcagagtcccaattcatttttaaagacattggtgtactcctgctttagctgactgatttgtttttcggcgtccttatttggcgtgccgtcagctttgttggatttgatcggggcatttttgcctctcgattctttccctgcgctgcaaagatttatcggagagttgattttggctttaatgccatccaacagtccaaatgcatccattgtttggacactcaacagattcatcgatcccttctcggcgacataaaaattttctttaacttttacgccttggaattcgaagtgtccttctccctttccgataaaagatttttctgtcccgtcgaacattctgcctctttcggcacattcccaaatttttggctgtccgatcagtcgataagtttcctcatcgatgacattgatctctgccccggagtcgagaataaacttcacgatccttccgttcagcaggacttttatctttataagagaagcactgttgattgatttgagtgccattccaatgctaagtgttccaactttcttcactttgaagtttttgcggcgccactcttgcactttttcgcattggttctccaaatggccggtgtagtgacatttgggacatttagccgatttgtgcgagcattctctgtgggtgtggttcgttttcccacatctccaacattgaagctgagttgtagttgcgtttggttggccttgcttggattgtggctttggtctctcccttctttgtttgggttcactggattcactgtcctt

SEQ ID NO: 16728 - DNA, 787 bp, Heterodera glycines
cttcctttttttctataatcacatttcattttttcatttcgcccacaaagggggggggggggggggagagcattctccacaatttaattatccccgaattttctttccactgaacgaggacggggaaaaggtccccgaattttttgaaaaatttttttttctcaaaaaaatccttccagagcaattcccgaatatttttaagtactttattttctctaaagatgattttttaaggtgttcattatcctttatcggtgtcaatttattttcagttgcttttccacaccgtttttcaacaaaaaaattctatttatatgtgtcaaaatgtgtaacacatataatttgtttttttatctcattccccgttcccgtgtattccccgtactgcaaaatttgctgctgtccccgaacaatgtgcgccccgccccgtttctgttcctgtccatccaattcgccgtgagcaatttggcgggtggtggtggtgctgttacaacgtcagcagccagcagaagaagaacagcggggacgacggacgccccgccaccggcgcggggacggggcggagtcagcatgactgctacttctaatgctgccggttgccccccgcccgggggggggggaaatgcgtccccgccccagtctccccctcccctcggggaggggtgtatctccgccctctccgtgccctcctcctccaacccattccttcccctcacaaatgcccctcctcttcctcctcctcatcccgtctatcccatctgctgtgctgttcctccctcgatgaccc

SEQ ID NO: 16729 - DNA, 1790 bp, Heterodera glycines
ccctccccccgccccccaattttgtggccgtcgccgttgggcccctccggcggaatttatgagtccgccaaattcaccacaaattccgggaacaaaacgttatgtcttccactcgcggatagcgatatgccttgttgctttaggcttgcttaaaaagccactgatctttgactttttacaaattttaattatttttaaaatctaatttaaatccagttttttttttaaattaatctttccactcataattttattttgtttaatacaactattttttcttgagaccggcgcagtcggattttcgacctttgttcggtttttaatacaaataaccgacaaagaattttaaaatttttttcgcgttttcggcttttatcgaaaccgatcgaccaaatttcctagtccggtctcaaaagtttaaaaatttctttttaagatagactttgaatttaattttgcttgctgttatgttttcatttatttttaatttcatttcccccaacactaatttattaattacattgtaattcacatttttttattcgtttagcagcattttcgcatttaaatcccatcaaattagtcacataaatcagctcgcctcttcaaatgccaaaacatcaatgtgtgccgccgccgccaattttttgatgcgtttttgccaccgacgactgctgcagctgttttttatcctcttcggatgctgctcatcaatggcatttggccgaaaattgccggacctccaatggcactccaacaacacaatgtgggcattttattgaaatttataaattaaaaatttccatttggcattttattgaattaaaaaaaaaattatttaaattaccgtttgctaatgagtgttgtgtgtttttggaaaattccctaatttattttccctgctgcacttttatgaaaataatcgcagtttttgacctcttttggtcatttgtgcgacgataattttttgcacattctgttatttctgatcactgatcaaatttgattcgtccagtaaagctgctaattgatcaaattagcgagcgacatcattttaacgggttcaattggattgattctcttgataatctctatttatctttttgccacggcgagtcaattttggactccaagcgcaaataagttggttttttcgtcttagtggtctgtgcgttagtcaccaaaagtgggggtctcaggttcaagtcctctttgtgtttgtgtataaaattcatttttttaaagcaaataaataaaaaaataataaaaacagaacgccaaaagaacaaatacaaacaataaaaggtaaacattttattttacccttgattttatgaattttttttagcttataacttttccaataatagaccaaataaaaccattttatgctcattttgaagggaaaattctgaagaatatttcttaattagtcaaaagtttaaaaaaattgtttattggcaaaaaaatgaaccatgtgttatcttatatgttagagacatggaaatagtgcgtcaagatgagagaaaaagaaaaaacttcacctagttgaaaaatttttccctatgttcaaattttcttcaaatttcgcataggcccatattttaaccccctttaacgattccaagtttattttgtgaaacttaagtttttaactcgagatcggctcttccatttttacaagggaaaatcccaagaaaattaaaagttttgcaaagttttggcgttctgattagtaaataaaaaataaacttatttgcactgggaggccaaaattgactcgccgtgtt

SEQ ID NO: 16730 - DNA, 1302 bp, Heterodera glycines
ctcgtcccttcttcttcaagcccgtgtccgccttcgacttctcgggcagtgaagagacgagaacattctgaccagagaaaatgaactaagtcaaaatgagcaatcaactagttacccacaactaattagccacaattacccccccccccccaaccctcgccacattcgctctttgcctcacttcggaatgcccccgggcttcgatggtcgtcgtctcgtgccccgggcagcgctcctccgctggcattgtactccgtcgccgtgtgtctcgtcgctctttcacttgtctgatcggatgacttcccttccgggcaccgccattttggtggctttcgtagctaaaaatggcaaatgcttttcccgcgctgtttcgtcctttaccttcccattgcgtcgcgaagtcgccgtgccaatgagctttgctgaatgcgtcggtgcattgagcgtttccaatgcgaatgggcggaacggatcggtcgattgagaagcgtgaaaatggcggggtaagcggcgcaactgacgtagggcatcaaatggacgaagtacatggtgatgacacctgaactggggaggggtacaaagtgaatggatccgattgaggggagaaagcagaaaatcaaaaggaatggcattagccaaatgagcgatcaattagagagacaattggccaattgcattggcattttaaagtgagcaaaacggcacccaacacacactttgctttggactcagccgcaaattgagcagtcgtcggccgaaaatgcccacccaatagggcgtccaacagaccaaataaaccaaagccaacaccaaaactgtgagcacaaccttaagaagggtgacttgacttttgagcgatcgaagggaaaggcaaaaacaaatctatcgaacccttcggatgacagcggtcgacgattgttggctgaaaaatattcgaatctttcgtattcattccgaattggatttgaaacattgtctcaagcattgccccgggcatagtttcgtgccgtttgccgccctcccattgtgtaaatggcaattaattgtacccggaagggcttttccgccccgctaattgccctctctctgtctgtctgtccgtctgtctttctttcccttttctttgcttctcttgccgctctctcaccttctcgatgtccctgtggtgctgctgctctgctgactcgccatcagatgctccttttttcgccacagaaaaaaagggacggaagagtaccaataaagaaagccggcgaagggaatggcgtaagagacaatgcatacgacgatgttgaagacgga

SEQ ID NO: 16731 - DNA, 1715 bp, Heterodera glycines
  unsure (1)..(1715): unsure at all n locations
agggacagacagagaagagaatgatcagagaaanggaagtatcgggtagtgaaaaatggaaaatgagaccaaattgaattgaattggaaaaaaaagtgaccgatgcaaaaaatggactaaaaaggacaaaggaaaaggaagtgccaatgccaaaactcactttttgcgtcttattctcaattcgaatgggcatggacgaaacctaaaaaaagaaaaagggaataattttgcaattttaggaattcagatggaatcattaaatttgaatggggggaggcaattcaacggtaggattgaattttggtgacctcagaataagcgaaaagtggccaaaggaggacgagcaccaaacagagagagacagaaacatggagaaaggccatctgaggggaaaagcaaaattcgaattgtcaaatcactttttgaatgaattgtcgtcataatcctccggatgttttcttcgccctttggcattttgtgtgacctttaaactcgccgcgctttgctgccgacgtttgtctaagcaaacagtggagtaacaggtgcgagagattagcaacactgaagagggggggggggaagaacattttaagccgacaaaggattcattaaagcaattagtccgaaggtcgcaacaatttatgccccccggctatcatttaacatccgatcgatcgatctaccgataataggagcagagaatttgttcatggaatcgaacagcaaataggcagtgcatgccatcgagccgaggcgccaagtgccgcagaaaatttccaaattgagcaaaaccatcgctgaaagaaaggcaaaaagcagcaatttgatgccgaattgacacatggggagaaagaaactgaccacacattgtggccaaatcggacacgcaaagtgccaaaatgtggaaaagaatggattttgggacgcggacattgtgcagccacaggagggggccgaccacgaaaaggacccacgaattggcgaacaggccgatgaggttgcagccgaggtaagtcaaagcgacgtactgacgaaagccccgcaggggaagtgccatttcgacgagggtaaaattggcaacggaaagcgaagggccggcggaggaggagtccaagccgaacttcatcattggggtggggagcagaaacagacagacaaatctgaagcatttgggggcaatcggcgagacaaactttgtttggacagccaaccgaatttacgaaacaaaattaaataattggcaaatccgtggaaaatagggacattagcgtctctcgctaatgaatggtttacaaccaattaattaatccattttctcgaaaaagcaaagagatagagaattgtgggcgatgtctttcttcgaacagcgagcgcatttagtcaaaatgtgagaccaatggtgggaaaagcggtaatttaaggcaaccaatctcagaaaacgaagcccttccgctcttttttggcttatttatcggattttgtcaccttggcattggcattcgatgataaattgattcgcaaagtcagtcaaaggatcgtctctttctttttcctcattttgggcgttttgaaaggttttctttcgagaaaagggccaaagatatgaaaacgaaaaaacgtaacttatttcattttgggaaacaaatgaaaatgagctaatcctttcctggggattaagtgagacaagaaaaagaaacaaaggtgccaaattgaat

SEQ ID NO: 16732 - DNA, 3164 bp, Heterodera glycines
tctacaaaagcttaaaaatatcggtattaatggtaagattcataaatttatcaaaaatttcttaagtgaccgttcattcagagttaaaatctctgagcgtattcaaattcaaaaaacatttatagtgagtggggtgccacaaggtagtgtcttaggcctttgctttttcttatttttattaatgatcttccgaacaatttgcctaagaatgttggtattaagatgtttgccgatgatattaaatttacattgagcataaaaatgataaaaatagagagaatttgtcttccgcgcttgaggcaataaataaatggtcaaaaaataatggcctaaaaatatcaatagaaaaaacaatggtcctttacttgggtgaaaataacacaaaatttatttattttcttgatggcgaaccattgccagaaacaaaatgtgtaagggatttgggcattttaattgatcaaaaactatccctttctaaccatattaataaaattttaaaaaattcatatttttcttgttatcatcagcttctccgagcgttaaaaactcggaggcttgaaacattaatttcggcatataaaagctatatcagaccacagttagaataccacagaaatttggaatacattaaaaaaaaatgtccgcaaaattgaagcagttcaaaaaattttttaaaagaaaagccttcaaaaaatgtgggcttgtccccatgctatgaagaaaggttaaatctttgcggaattaagacattggaaattaggcgccaaattaatgatattacaacaacttttaaaatcctaaaaaaacatacacacctgaaaccatctaacttttttgctgttgctaaacgggctattcgcaaaccttttttattacaaaataggatatatattacaaaaacaaaaaataatttttttaatagggttattaattcatggaatttattaccaaaaattattatggaaataaatgaccccaaaaaattccgagaaattgcaaaaggaataattaagcaataatgcatatttccctattgagaggtgggatttgtttcatttatgtctatttttgtttaatttggcatttattttgtgattggcacttatttttgtgattttcgaccatcattcatgttttattttattttcattttactttgttttcgccactgttagagtgcagcaccttgtggtttgttcgttaaataaatagattattaaaaaattggatgagtttttacaacattttttcttaataattcaatttaatttatcattctttagaaatttattttcattttttaaaaaatgcttcttttatttttataaaataaaacaaactgttatttaagttttccaatttaaactaatgactaagcttaaatatttcttaatgaatttgtaattttgaattaaaatttaattgttgaattcataaaaatttataaaaaatggtatcaaaagatacgcaaccaaaaaaaaaagaaattaatttcgtgagaggggcaccggcgttgccccgataagcacctctggatgcataaattgggaatttttgcccgatttgttagcagattttgttcaagaaatgccttttttatccaaataaaattctaagtaaatttgtgactcagtgccgacaaaaagcggcattttgaacaagatttgttacgaaaataaatgtaatccctttcaatgatatacaaaaatcaaaagagcaaagaactgaaataggcatagctaaataaataattatccattggcatattatgtatcaaatttaaactgtaaaggcaatatccttcacagtgtccccatagggaaaggcatgtcggggaccagcagggcttggaagcgcccgcaaagcgcgattcgcgatacgcggcgtttttttcgagattcgcgtccgcggcaatttgaatccgcgaccgcgggatttttttgcgagacgcgccgcggtttttttaggattgaaatgctgagaaatattcgggcatttttttttgacaaaatctggtagcaaattacactccaaacattgagtgtattcgctgttgccttctgttatttacacatatatatatttattatttaagatttaaatacatttataaagtttgatttataaattttcatttaaaatcactataacttaaatttttttaaaatattttagtttatttattttcgggttattgaaaatctaagtccgcctgctcttgttaaaggtgcaaattatgacaaaaatagtataagaaatgcttttcctgccagatgtttatttgctcgattgtccaaatcagtgcagaaagtaaagtgaattgccgaaacaccggtcttttagagtccaaaattatggatattggaaaaagagcccaaatttcagattttttcgggaggcctctagctatgatccaaattagtcaaattttttgttctcaaaagaattaagccataattacacactaattggtcaggatatctcgagaatcacaagcccaccaaattaacggagttctttggggatcccgtgcccaattcttggtcttgaaaaatttcaccaactctcgaccagccgcccattattaactattgggcattcagaaatagcagatcagcaacttcaaacgaacaaacaagtgcacttgatcagcagatcaatcatttttgtctattcaaatcatttatttattaaaaaagtaacgatatttattgcaaaatatgatcagatcattgatcaaaggggcggcgcctctctctctctctctctctctatctctctctctgatcacagttccgcaattggactgctccacctcctcccgctgctgctacaacttttttgctgcttgttcatgtcgccgatgaccccatagggcggtggttccattgggaaaacggtgctgccggtgccttcgctgcgccacttttgtgccgacgaaagcaacgatgatgatggtgccgcttcgtaacatcccaaacagtcgtacatgtagcagcaggacaccaggatcagcatgccgaccagcaacagcgtgatcacaccaaaatatgtgaacgcaaacacgtacacctggagaagaacagcgaaataaattttggccaattgctacagtaattgcttgagagttacagtaccctattgcattttgcctgaaaacgccc

SEQ ID NO: 16733 - DNA, 1137 bp, Heterodera glycines
  unsure (1)..(1137): unsure at all n locations
ttcaatgataacaaaatcaaagagcaagaactgaatagcctagctaaataaatattatccatggcatatatctatcaatntaaactgtaaggcaatacccttcacagtgtcccataggaaaggcatgtcgggaccagcagggctggaagcgcccgcaaagcgcgatccgcgctacgcggcgttttttccgagattcgcgaccgcggcaatttgaatccgcgaccgcgggattttttgcgcgacgcgccgcggtttttttaggattgaaatgctgagaaatattcgggcatttttttttgacaaaatctggtagcaaattacactccaaacattgagtgtattcgctgttgccttctgttatttacacatatatatatttattatttaagatttaaatacatttctaaagtttgatttataaattttaatttaaaatcactataacttaatttttttttaaatattttagtttatttattttcgggttattgaaaatctaagtccgcctgctcttattaaaggtgcaaattatgacaaaaatagtataagaaatgcttttcctgccagatgtttatttgctcgattgtccaaatcagtgccagaaagtaaagtgaattgccgaaacaccggtcttttagagtccaaaattatggatattggaaaaagagcccaaatttcagattttttcgggaggcctctagctatggtccaaattactcaaattttttgttctcaaaagaattaagccataattacacactaattggtcaggatatctcgagaatcacaagcccaccaaattaacggagttctttggggatcccgtgcccaattcttggtcttgaaaaatttcaccaactctcgaccagccgcccattattaactattgggcattcagaaatagcagatcagcaacttcaaacaagtgcacttgatcagcagatcaatcatttttgtctattcaaatcatttatttattaaaaaagtaacgatatttattgcaaaatatgatcagatcattgatcaaaggggcgccgcctctctctctctctctgatcacagttccgcaattggactgctccacctcctcccgctgctggtcaacttttttgctgcttgttcatgtcgccgatgacc

SEQ ID NO: 16734 - DNA, 1428 bp, Heterodera glycines
actcaccattcaaaagccaattcggtagacaattttaaagactaaaattttgatgctaaacatatgaccaccccaaaatacgtgtaaggtgcaatttgcctgatcgcatattcgctgaaagaaatggattttcgcaccatttgaaagcccattgaatatgctatcgatcggtataatatacttggcatttgctctctgttcaacgccaattattagcactatgtaaacatatgaccatgactgtctgatcatggtaaaacagtgaaattaatacttaaaaatcaaatttatatttaatttaaattttttcaacgacttttccaaatttaacgcacttgaagaatttcgactgttgaaggcaagaattgagcaattggagcaactgcagagaatggagtccgcttcggttgcgagttcggaagtgttcgaacaaaatggaaatggtaggaaaaatatttttattttccagaagaaagaaggggacaaagtccataatttatgaaaattttaattagaatctttaattttttcaaatttaatatataaataaaaaaaatttttccattaatatatttttaaatatcatttaaatcgacagaacaacacgggatggtttacaaaagtgatgactgttgcaatattggaaataatttaaattaaattaaatttgaaaaatacagcagaaaaattgttgggatggcaccgcttgccccagtgaattggaaatcattggtgccaaacgtttgatggtccaatacaaagggaatcgcttaatatgtgtggtaattagcaaaaattaacaatgaatttaaacatttaatttatagaaattttaataacaaaaattaaatattttaattgaaggaagtcactcaatgttcacaaaacgctgcattctgagcacaagttcgtccatttcttacgtcgaagaaatgcatcagtatgaaaatgtaaattatggacaaaaataaaaatatttttctaattattatattaatttttaagtgctcaacgattggacttgcgatcaaagaaatgccattgtacggaagggttagcaattacccaaacagttacgaacatagaagtaacggccttttttgggtcaacgattcctgccaaattcgaagtcaaaatgccaaatttggcatttaattattgcactaaaattcggctaaattcccaatttttcatcaaaaaacagccagttagtcaattgccaattctaatagaattttcattaggccctaggaatttggcaaatgcctaccgtattatctctaattatcacccaggggggggattattgttcaaccttctcaaaaaggggggggggattattagatacgggggataaatggagacgggggattatttttcgactgattttttactgaaaaatttttgaaatttttttgaacaagacgc

SEQ ID NO: 16735 - DNA, 824 bp, Heterodera glycines
aaaaaatcatctggtaggtctcgagttttaacgatgtatagacaagtacaacatatcttgtagaaataggagttagaattcgtcctgtattttttaaatttaatttagaactatccaatttttttttatcccttttttaatataaaatgtattttacgatcttttgtgcacattttcccttctcgtttatgctcaaagataagtgatggatgaggatctaccatcttaactatttccaaattatccaattacatcttttttagttctttagaagtataatgaaatcagctttccttaaaacgaaaataaatatttcagggctcgtatccgtccttggatgccaaggacgtccttggaatttgtctctcttccttcgaaataaaaaatgtccttggatgccaaggacgtccttgaaaatgtgcatttggaaaagtttaaaaacaattcaaagaaatttgataaatttttgtaattttcaacaattttggattaaattatggcattatataaataaaatgcaaatttaattgcccaaagaaagtctcaaaagttggtcattttttagacaaaatctgttaacaaacaacataaaaattacaaaaaattcttccggcgccgccggactcccccccccccccatatcctccaaaatttttaaaaaaaagcacgctgtaaaaaaccttttttataaacaaaaaaaagtcgtcgcatggcttaaaatcgcaaaaattaggcagtttttggtggaaatctgttaacaaattgcattcaacttttcaaaatttttccccggcggcgcctatcggcaccgccggacccccccc

SEQ ID NO: 16736 - DNA, 1828 bp, Heterodera glycines
  unsure (1)..(1828): unsure at all n locations
ttttctaatttcttcaaaaaattattacatttcgtctgattttttttttgtcataatgtcaatttttaattgatgtaaagtctaaaagttccaagaaataatcactcaattagaactagagaccggacaagagggtcggtcggtctgtttcggtaaaaaccgaaaaaaaccgaaaccgaagaacaattttcggtttatttaggttttttgattttgtttattttttccccaaaaaagcaataaaccatttttattaacagaaaaatgctctttaatatttatattgaatttttgggagatgtaaaggaatttttttgcttcttctgttttaaagacaaaatgcgttttgggcgccgccgggaaaaattttgaaatttttagtgcgctttgttgacagatttagtccaaaattgacaatattttatatggttttaattataaaattgtgattgaatccccatcgaaaaaaggaataatttttacaaattaggagaaaatcaagcaaaaattagaaacagaaccaagagcacaacccactggaacacgcatatgaaacggaattgaacaacaaatgacccaaaatttataaaaatataagtttaccaaaactaaaaatccttaattttcttaaaaaaatggctcaaaattgcaaaaatttggtcatgttggacaaaatctgttaacaaatcgcattaaaaaagtcgatcggttgtttcggttttttgataaattcggtcaatcggtttcggtttaaaaaccgaaaaaaaccgaaaccgaaaaactcaaaaatttctcagtcgattttttcggttaaaaaccgaaaccggtccgatctctaattagaacagctccctctattaattacatattataatgtaaataatttttcaatgtaaataatttttattaggcacattttgtcccagtaaaaaccttttttttttttgctatttatattttcaactcttaaaatttaatttttatcctcatatatcccacctgcatttttgcattattttgtctatgcgaattcgtgtggccccagcagcagcagaagttggccaaccctgttgggagagttggccggccacacacccaaaagttgccaccatttcccccacccccgggcacggcattttgcctgccgccaaaaggtgagaaaatgccaatgtatcggcgccaccattgaatggcacacctgaaaagcattggtggaccaccgccgacgtggcccaatgggcaaaatatgatgatgatggtgatgaatattttatgggctgactgagtgtgaaaaatgggaagtgaaggcgaaaaggcgccttttccccgcccggggcatttgccatttgatgtttcggcatgcgttttgtgctgaatgaaagcgcccgaggcgttttgatggttcaaacactcaatactcatgtaataatatgttgcctttggcattctatttagtattttttaataggaaaaagtgtgccgcatattaaatttctgcccctggcatttacaagtttttgtttgccgacaagttcctatatctgcgagttaaaatgttcacgccatatttttttaataaatatttatttttcaaaaatttttcgacaaaataatacctaaataattaatttttgtgttaatttttttaaattgcctattttaaattatttttagatatatttaaataacatcattttctatattctcttttgtctcaataactaattttcccaatccccgactaantttttcgcttttttttatatatatagttttaaaggaattagaaaaaatgtattttcatttttattataattttaatcattta

SEQ ID NO: 16737 - DNA, 1064 bp, Heterodera glycines
  unsure (1)..(1064): unsure at all n locations
acactgactgaccttagaacatgtaatccggcatttttactgatcgacgacttaccgctggatcacaaattgcggaaggaatggcgttggcgaagaagaaccgcgtggtaaaggcggccgaagaagttgacctgaacgtgtccatcgcctcgtcgttcttcgaacgcgggttcgaaccctcgcgtctcgtcacttccacgccacggcccagccaacagcgggaggagacaccgcaggaaggtgaatcaattcaatgagaatacattttgtgatttgacatggtggaattggtcttttcagcaagaagcatcgaagacgtgacggaagcagactttgacagtccgtgaatgtgttttgtgccgaaaatgttcattttgttgggatttgcttttcattttatcacattgtaatatatttaaataaagcgccaatttttaaaatgacatcaaaaaggatgttctcatcagttcaatcgctaaaaggacaaagggataggctaattataggtgtggatgggcaaccttccttctgatgctgaacactcggcattggatattttttcattggcttcgtccggtccatcgaattcgccatacttacatagaaagtcaaaaaaaattttatttgagatgatccaattacataaaagcggcacagcaatgcttcgaactgtgcgcacactttgtccatctgtttcctttcttcgcttttatcgtcgtccattttgctgacgattgtgtgacggtaaagcgaagtcgcactcagcgaatggagtcgcttctccaacgcttcgaccgttcgctacgaaattggccaatcccccaattccttttccttcagctcacttcgattccatcgtttgtctctgtcgacgggtcgcagttagccaaatggaccgtacaaaaacggacacccctcagatnaattcctgnggnnntggagggaaaaaatcgaagacatttcatacagttcattcgctgtcaaatgcccatttggactgactctgcgcactttttccgggtgtcgtatcgaatttcgtccacccaatcacgattcagcgaatt

SEQ ID NO: 16738 - DNA, 1391 bp, Heterodera glycines
gaagggacacgagaaaagaagaagcactatgcccgaggggttgtaaataaagagatgccaagaaaagtgtcaacctcaaattttgctttttctttgacacactttttttcaattgtcggattatccctttggcggtgtacttttaaaatttaaaatcatttttgcttcacaatttcacttgatttaatttctttttgattaattgcaattaattttaaatttatcgtacatatgaaaggggtcggggtcactttggcgcgggccattttggcgccgcggcgcgaactttaaagtgttataacttttttcttatccaaccaaataaaataattttgataccattaaataggcctgtgttctttattagcctgcaaaatattagaaaaaataaattctgtttgacaaaagatatagcgtgcggcgccaaaatggccagaaaaagtcagttttttgaggttttttggccataacttttttgtgtttcaattaaattttttgaaattttgcaggctattagggactatcaagcgctttaaaatgatatcaagcttatttaatttgaatgagaaataaaaatgttatagcgtttggcgccaaaatggctggcgccaaagtggccggttccctatgaaaggtctttcaatttttatgtgatagtttaaaatttattttatttcatttttatcacaaaatcaaggttatttcacttttttcagcagtcttcgcatttcttttatcatttttgcacagtttgccccaccatcgaatgctttttcgtgcgtcgacttcgattttgttaaaaaatcacagaaaattgttgttgtccgctatttccaccacaatgcaagccaattcttcgactgcttcttcggcttatctgatcaaccagcccaaatacgcattccttgccgaattgggcatccaacagcaaaacgatggagtatttgacggcacatggaatgcgtcggggaaggaagtcgactcattgtgtccggcgacgaacacaccaattgcgaaagtgcgatttggaacggcggaggtgcccaaacattcaatcccacttgaataagcacgccccttttaggattatgaacgtgtgatcgaagcatcgcgtgccgccagtgccatttggatggaaatgccggcgccaactcggggcgaaattgtgcgccaaattggcgattctcttcgcaaaaacattgacaatttgggcaaattggttggttttccgtacccttcctaaatttcaatccttttttcttccttttccatgcgtttattatgcgtttcttttgaggtttcactcgaaatgggcaaaattttgtcagaaggccgtggcgaagtgcaggagtttgttgacatcgccgattacgcaactggtctttcccgta

SEQ ID NO: 16739 - DNA, 2968 bp, Heterodera glycines
  unsure (1)..(2968): unsure at all n locations
acaataccaatattaaaataaaaaatacaaaaattgcctcttggattcatctgatatttcgggaaataccttttaaatactcattgatacggggaaaatgttttgttaataaaatatataaagaaaatttttttgaattattggggcccaaacaatcgcatgtcagggagcggagtcggggcttaaccctagttttaattcataatcgcattcattcctgtttaataggtaattattattttttgtcattttaaaaatattgtggctaaaattatgtacattgccaaaatgcctctctaaataaatcagtcaaaataatgacaatattcactcgaaaatagtcatgccaaaaaaggtcaagctatattccctgtttgtaaaactgccacgtggcattttaaaaaggcactcactttaaattggcatgctgaatctaaatgctaaatggaaatcctacgaaaatgccatgccaaaacagaaatgccaaaaaggcctaactcaaaaacataaattttgaattaaaaaaaacttatgccccactgttggcatatttcattctgtgaaaatatttttaaaagagtcaaaacaaaaaaaattgttttttgtcggaatttcggtaatcttaatgataaactctgaatttatacgctcttttaaaggttatttgacatttatcataattttgaaaagtagacaaaagaatattttttcgattattttttgctcattaatgcttgcaaaatatgccttccgaatagaaaattgaaaattttaatagactcaaaaaaagctggctaaagaaattgaaaataattaccactgagctaggggatagcttagcacattcggacattttaaatttataaattaggctcaaaatccacaaaagtttgtgttgttatttttttacaaattacctaggtcaaaagttcaattttctctctcccggcgacactgttttcggcaccgccgcccttccccctcccatccaattttttggcataataatttcgtcattatggtcttgatcattttatttattttttttgaaattagaaaattaattataaattttgtctatataatgaaattttgtatttttttttcgtctgggagccaaagttcaaatggtgggtgctatggagaccaattatggttaattgataaaaagctttgaaaggtaattcacacaaaacctatagcattaatttcaataaataattttttttgacctaactaattttaatattatattttcatgattccaatcctttgttattaaaaaaaattttataaaccaaaaatcaatttttatctaataaataataagaaaaattttcccaaatttttctgttaatgtttggtctatttttgtattaatttctaaatttttgtcggtttgccgtaattatttttgggaaactgaaaaatttgtggtagttcatttttatcctgcgaaaggattgattgccactgttcaaataaatggatatgaaaagaattgttgcgtaaatgacatgagaccgcgactctcgagcagcaataataataaaattgaccggacatttggacagtggacattgggaccgaaccggacaattggacattacgacagtgaatgacttttttttttatcctttctctctatattccttatccttttctctttctcatccatctctctccgctctccatatcactttcttctttctctctctctatctatcccttctctctgtccctctttcgttttctctctctttcctattttcttattctctatcattttgtctttttctctctcttcatccctttcatcttttttcccttttctctctaactcgctccctcttctctttatttctctattaggaagggatttataaaaactggtctgaattttgttttcattgctanagatattttagtaaataatttgtcatcaactttcgttaatgttgtaaggattattcgacgcatttccctcatttaattacttcccattggccattatccattcaatcacatttatccttttcacacgtttttccttttctcattgtaatggttctccgcccattctcttcgcatttctccttccccagtgatcagtcagtcagtagtgatggaacagacttcaatgattattccgatttgaacgaatgaataaatacatcttaacagtcaatgagtcgtttgggggttcggggcttggtcaaaggcgccttggcctttccccattccctcccaaactccatccgggataaacggtgcatagttggtctgggggcacagtgcgcatccctcactatgtccactattcaattgtccggttctgtccaaccaaatgtcctggagcccaataataataactggaatagtttatggatcattttcagatgtttttcctcatccgtgcaacgaaattttcaattcaacaccgaaatttggtcctccttttcatgataacaatggctcaacagcagaaagcgcatttcacgacttttatggaaagcgtagttttgggaataatatatgcaaatgacagtgtcaaaacggcggagacacagagatgaaatatttttgtgtttaatttttttttttctatttttttgacctaaatttatatatcgtggaatttgccataaattggaatttcactaattttttttttgtgacacaatatgtttaaaaggaagaatacggagtttctgatagttggatttaaaaaaacggcattttggacaccgaaggaaaactggacaccaaattcctaaaataagccaggaattaggttgaaaaataaatttgtgtagggtaaatggattaatgaattaaggcacttagagtaaatcaggcattaaatatgcgcgatgattcatttataaaaaacaaaactatgtgcagactaaaataaaatcttttagccaaacaaaatttttgtttatttattttaatttatttattt

SEQ ID NO: 16740 - DNA, 1329 bp, Heterodera glycines
tatttgctttataagtaaactccacagcaggaattgtataacagattgaattttttgttatttaagctttttttgcgaagtattcttaaaagggtgatggcatttaatgggctagaataggtgagtaattaagagtggatgaatatttgctttatagaaaactacacagcatggaattgtataacagattcgaattttttgttatttaagcttttcttgcgaagtatctttaaagggtgatggcatttaatgggctagaatagcagagtaattaagagtggatgaatatgtgctttatagaaaactacacagcatggaattgtataacagattcgaattttttgttatttaagcttttcttgcgaagtatctttaaagggtgatggcatttaatgggctagaataggtgagtaattaagagtggatgaatatttgctttatagtaaactacacagcatggaattgtataacagattcgaatttttgttatttaagcttttcttgcgaagtatctttaaagggtgatggcatttaatgggctagaataggtgagtaattaagagtggatgaatatgtgttttatagaaaactacacagcatggaattgtataacagattcgaattttttgttatttaagcttttcttgcgaagtatctttaaagggtgatggcatttaatgggctagaatagcagagtaattggagtggatgaatatttgctttatagaaaactacacagcatggaattgtataacagatgcgaattttttgttatttaagcttttcttgcgaagtatctttaaagggtgatggcatttaatgggctagaataggtgagtaattaagagtggatgaatatttgctttatagtaaactacacagcagggatgggccgaggtttcgcttttcgcatttcgcctttcgcattattcgcattttttggcgtttcgcatttcgcttttcgcatttcgctttttggcgcgaaatgcgacttttacacacctaagaattggattaaattcccataaaatttttcaaaattttacctataaattggctaattttcagtgaaaaactgtttataaatgatcaaaatttccaattttttccccggcggcgcctatcggcaccgccgcgcccccaaaactcctattttttcttagaaaatggcccaaaatcgcaaaatttggtaatttgatgaaaaactgttctcagcggcgcgccaaaactcttatttctcattagaaaaatgataaaaatcacaaaatttgatcattttttagtgaaaatctgtcaacaaatttttaatcaaattttcaaaaattttcc

SEQ ID NO: 16741 - DNA, 1383 bp, Heterodera glycines
  unsure (1)..(1383): unsure at all n locations
ctcttagagtcgataccaaaaaagtaccataaaaatatgataaaatgaatttataattctcgccacccctcgtcaccgacttgcaatttccacgctcggcgtcttgttcaaaaagtagatgtacagtcgggtggtctccagcagcactttgtccgcactgtatttgatcgaattataccaccaaacgccctgcggagggggggggggattaaataaacaaatggaacattgtaaaaaaacgcaccacagccaccggcaaaatgaccaagaagatgaacacgtacaagccgagcacccaaccgccgtactgctcactgacaatccacttgggcaaagcaatgccaaaggttgtggctgaaaaaacatatttgaataatttcatttattcggttaaatatggaatcggtcgaaggaaaaatttgcgttttgtcatttaggaactaataggcagaccgattcaaaactgtttaacgatccttcaattcattggaattgaccgaccgaaactattaccaatatatttgtacatgccctcaaaaaacggcaatttaggagggggtaaaaaattaaaaatcaaattcaaaatgccaatcaccatcggtcaaagtcgtcacctttgggtccgtccgggttgccgtagaggcgccagttctcgcgcgactcctcatccgtcaatgctttgtacgccttgacaatgccgtcaaaggtcaccgggtcgccgcccttgtccgggtggtgctgcttgctcagctcgcggtacttctttttgatctcgccaacatccgcgtcctgaattgttgttccggttgtcaatcaatttgggtacttccagtcaatgaaaatggtgaattttgataatggctcgcaaaattgttccaataggcaccggcaccatcaaaacacagggcatcccaaggttctcagaaaaatgctattaatttgggtaaaatgactttttttctagtcccaaaaatgcaattttatattcggacgcaaattgaaatgcctcttttatgttaaatgaaaggacaaaccacgtcaagttggagtattttgtacgggtcatacctgaaaagtgaataaaattaggaaaatattaacgaattggatgaacgaactcctcaaatgtctgttccaattgtgaaactttgtaggccaacagaatgaacagtgcccacagaatgagcagaacaaacccttaaatgattagattttagaaaaactaacacattttcaactcaattttaaattnccagtccataaatttgtctttttgagtgcccgattaaatcaaagggtgggggggacctttgttttttcaaatttgaaagatatagcttcgaaatgacaaatttacgggttaaaaattggatgcaaaaacaa

SEQ ID NO: 16742 - DNA, 2467 bp, Heterodera glycines
ttaaaaaacgaattcaaaatgccaatcattgcacgtcaaagtcgtcacctttgggtccgtccgggttgccgtagaggcgccagttctcgcgcgactcctcatccgtcaatgctttgtacgccttgacaatgccgtcaaaggtcaccgggtcgccgcccttgtccgggtggtgctgcttgctcagctcgcggtacttctttttgatctcgccaacatccgcgtcctgaattattgttccggttgtcatttaatttgggtacttccagtcaatgaaaatggtgaattttgataatggctcgcaaaattgttccaataggcaccggcaccatcaaaacacagggcacctcaaggttctcagaaaaatgctattaatttgggtaaaatgattttttttttctaatcccaaaaaatgcaattttatgttcggacgcaaattgaaatgcctctttttgttaaatgaaaggacaaaccacgtcaagttggagtattttgtacgggtcatacctgaaaagtgaataaaattaggaaaatattaacgaattggatgaacgaactcctcaaatgtctgttccaattgtgaaactttgtaggccaacagaatgaacagtgcccacagaatgagcagaacaaacccttaaatgattagattttagaaaaactaacacattttcaactcaatttaaaattccagtccataaattgtctttttgagtgcccgattaaaatcaaagggtggggggacctttgttttttcaaaatttgaaaggatatagcttcgaaatgcacaaatttacgggttaaaatttggatgcaaaaacaaaatggtccaataaatcatttttaagtattaaaaagcaaatgaatgccaatagtatgaaacaacctttgatcacgcatttcgccttctcccacggctttatttgctctttgcgaaaccgcttgaccaggtcgccctcgcaacggcagcccctcttcagcacctccgtcctctttgctgaaatttgaaaactttgtgttactccaagaccttttttcctggatttttgtctaaaaaagtgccaaaatttggaacttttgcatgcgtactgtttgaacttttgaatttggtgtataaatttgagagttaagatttttgcaattttctaattttccacccggatcaaaaaacctgttaatagccctggtttgtgcccagaaaataaggcccacaggtcaaccgaaaattaggtccaggccattttcaataagtctgtcccaaatttttacatttaaaaaaaaattgtatgccataaaaaatgtattttaaaagaacgtacgcagcgatggccacagaaaatgggtgagcgggaaaaggatgacagcaaaaaaggacacaatcacataataaaatgtgttgccgacttcgtcgtattcgaactgagcacggcccattgtgacgaggggaaagacgaagaacaaaaaaggaaataacaaataaaaaacaaacaaaatttacaagacacaaatgtctgaagaggtggaaacacctaaaaggcgaggaattaaatttaaaaaaaaaaccaatgccatcgaaattaggtaccctaatttaaaggtttctgaaattttagatttcgactgtaaatttgaaaacaattcaatgttggtttaattacaaaaaacaaaacttttattataataacttgatttggccaaatttgatgctgatcgagagaataaggcccaaaaattgttgtttttttgttttcttgatcggtattattttcgtttttgggtcggtgttcattcctggtttttgagcaaataataggtttatctaactgttttactgtcgaaagttgccgaattcagtcactgccgaaatctccacgacgcgacccgacaaatataaaaacaagcaaacgcaacgtaaaacaatttgaaaactcaacaaacaaaacgccagaaaaaatatttaaattaaatataaggcccgaaatttaagaacaaaaaacggtaaagcaattaggtacctaattaagcatccaaaaactctttaaacatgaaataatcattaaaatattaaaaattttaaattgactcttaaacccaaattcagtgagttttttttcttccccccccccctcccactctcatgggctcccacggacaatccgtcagtagaaatccgtcaatatggacattccgtcagtagacaatccatcagcaaaagttattatttttaaagcatcagatttatttaattatgtggaaatgataaattgctaaaaaatgaatgttcattgttctacttctgatcactttttgctcaccaaaacgggggtcggtgagaaaatccggggacccttccccgtcccccccccccgggtgcctgcaacaatccaagtataaagtgagcaagcaatgaattattacactgctttgaacggaaggacaatgagaacagtcaacaaattcgattcataat

SEQ ID NO: 16743 - DNA, 871 bp, Heterodera glycines
  unsure (1)..(871): unsure at all n locations
tatggacaggtctttaatgattaaaaatctatatgtctcttttaggacagagaaaggnnggctcttggncgaggctctatcttgtccctccaagtctctttgatatttctcgtcgaattgttgcagaaaaaatgatggaagaatttttaaaactgccatcacactttcgaattgctttttataataaatattaattgtgtaatttttttttttgccttagttatagtcgaaatttatttttaattgtttagttttctaaaatttattttagtctcgaaaaatgaacacaatccgcgacattaagaatattgaattggtttgtggtagtcgaatttttgtggttcgtgctaaaattgcaagtgttgtgtctacggaatacaatgtaaataaaaccaaatagaaaacatatcttgatttttaggcttgcatctcttgtcgtaaggggaagtgtaactgtggtatggagaaggtaaagtcttcatttttgagattgtcgctcttggatgatacagacgttttggggggtgttgcttttttcggcgtgaaaaatgtagaaaagggtgacggaatggtatgaaaaatgtttaaacacgaaaatttattttttttaggaaaaggttaaaaacttggttgggaccatttgtactttgaaggttaatgtgagtgtgaaagaatatggtggtaagaagggaatttattatgctttgattgatatttatgaaatttgatttgttttgtctataaatgaaatgttaattttttatttaaataaaaatgttttttctaaaactatttctgttgtctttcttggtaattgggggtcagtgttgttgttgcttgtcgaaagaagaaaagcagcagatggatgcca

SEQ ID NO: 16744 - DNA, 2447 bp, Heterodera glycines
  unsure (1)..(2447): unsure at all n locations
ttggttattaaatttatatttatttaagtgtgttatttttattgtatataattgtttttaatntagatattccaataatgtctttttaccatgccgcactgcttttcatcgtgttcgccatttttgatggacaatccggggaaacctttgcgtttcaagcggagattgcgcagttgatgtacaatatggacaacgccacgacccaaggtttgtttgacagaattggtgactaattttttacataatttttgtgaaactttttttaaaggcgcatgacatcgaaaacgacccgagcaaagccgataaaacatggaccatcattgacacgggcattgacatgaccaaagccgacctcgtcaacaaccttggaaccatcgccaaatccggaacgaaggcgttcatggaggctcttcaggttttgtttttcgtttggtcaaccccccccccccaatctaaaaaacacttttgctacttaagaccggcattgtcgctttaatgcccgggcattttggcgccggtttctactcggctttctctgtggccgaccgcgtcacatcaaagcacaatgacgacgattgctaccaatgggagagctcagctggtggctcgttcatcattcgcaattgtgccgatcctgaagtcacccgcgggacaaagatcgtcctctacctgaaggaagaccaaacggcatatttgcaggtttgttgtactttggttcaaaaagtgcgtttttgacgctcaaaaattttacatttttctttcgcagtaaatgcgcaattgtcaacaaattatatttttaattaaaaatcatcaaatttttattgagttcaggtgttggtgctggtgttgtgcgtgttcatctgtgaatgcggtgtggggagaaagggcggccaagcaggcggtgaaaggagcagccgcgggcgaccaaacaatgacggcggggggacaagcggcggagcgggacagaaacggggaggaggacgtggcggcggtcgcggtggtggaaaaggcaatggccgcggtggtggacgaaggcggcggcgggcggggagggcgggcgccgcagcacccacaggaggctgatgaggaagaggtgggcaaggatgagaaatcaaatctcatcaatttgaattgaagaaatggtttttttacaatgtgccgtattttcccataaaaaatcgttttatgaatatggttaatttggtaatcggtgagggacggggggggggggggttatcgagggtgctgatcccgaatctcgggttatcgagggtgctgatcacgaatctcgggttatcgagggttctgatcccgaatctggggttatcgaggtgctgatcacaatctgacatctcatttgcaatattttaattgtatctattattttcgcagtacctaacatgctaattctgtaggcatgataacaatgatattgtttagttaatatttaaatataaatttaaaatgtaatagttgttgattatggctcttttgggcatttgttttttacagttaagcgcatacagtaacccacccaccgcatcaatcattcatccccctcctccacagtcgcattgtgttgtggccttgtcgcacactttgtggccaaataacacggaccccctactaaccccgttcgctgctcaatgcagtggcctcattaatgaagaattgatgcggtggggtggggtactgtatacgcttaactgtaaaaaacaaatgcccaaaagagccataatcaacaactattgcattttaaatttatatttaaatattaactaaacaagcttatataactgataaattaagattttattagcatgtttatctctgactaaaaattttttcgtctctctctctttctctctctcaacccaatcccaaattttaattatcgcaaaatttccctattattattggccccagaaataattagtttttttttaaattttatttttaaatatcaaaatggaaaaatgtgccattataacgatcttacacgattgacccatcattggcaaaaagcgcagtgggtggccttgcgcgtgcgttgcgagcggcgcggccgcgttaccccgatcaagtagtcgattcggctcgtctggcagccgagacacttggggcgcacatcgtgcccctcgacctgaaaacatgaaccaaattaaattttatcagaaaatcaatgttttgtgtgtttacccaacgcctctgactgtcctcatctaagcggactagcccagtccacggctcgaggctgtcctcgagctgccgcgcggactgctcgcgcgcagcatccgaatacctcgcccaccagccattttcgcagcacgtgtcacaaattgtgnacacacccgcagttgttgccgcgaacggccacttcgcagtccaacccgtgctcaccatgcacaggaggcactgatcggagaaatttaattctctgatcagtg

SEQ ID NO: 16745 - DNA, 563 bp, Heterodera glycines
ctcttcctcccttttgtcctcctcttcctcccttttgtcctcctcttcctcccttttgtcctcctcttcctcccttttgtcctcctcttcatcccttttgtcctcctcttcctcccttttgtcctcctcttcctcccttttgtcctcctcttcctcccttttgtcctcctcttcctcccttatgtcctcctcttcctcccttttgtcctcctcttcctcccttttgtcctcctcttcatcccttttgtcctcctcttcctcccttttgtcctcctcttcctcccttttgtcctcctcttcctcccttttgtcctcctcttcctcccttttgtcctcctcttcctcccttttgtcctcctcttcatcccttttgtcctcctcttcctcccttttgtcctcctcttcctcccttttgtcctcctcttcatcccttttgtcctcctcttcctcccttttgtcctcctcttcctctcttttgtcctcctctttcatcccttttgtcctccccttcctcccttttgtgctcctcttcctcccttttgtcctcctcttcatcccttttg

SEQ ID NO: 16746 - DNA, 1781 bp, Heterodera glycines
  unsure (1)..(1781): unsure at all n locations
gcttcattttttgcccctgtcttctgttcaaactcaaacttcaatttgcactttccatttttttgaaatcgtactgattttttgacaattttcgttttctaacggatttccgtcataaataatcgtaggtgaacaaataaatgaggaatttgacatttcaaattgaggtacagactgatctctttctaaattcaacaattcattttatttgttagttaataaatttgctatttcgaaagcttttgattttaggatatgtgttaggtcttttaaaaaacgcccatttgccgattgaatttttttgtttgggattaaattaaaaatttaaaaaaaattcctaagtttttaaaaaaatttgtcaacaaagaaagaaaaataatgacagaaaaactaataaattcgaaaatttttaaaattttcggttatcgagtcgagaaaatgttttttaatattttattttagttacattaaattgaaaatttattatgcaaaataaatttttaattagaaataggagtaactttattaaataatccattattattattattattattagactcagaaaatttctcgtgtccaaaattctcagcaattggcatttcagaaaagctttgctcattccaaggtgttatgacattatcataaaagaacaaaaaataatgatgacaggctgaaaaattaatctaagaaataaggacaatccttaaaagtaaggacaaaaatacagacaaatcatagaaaaggacaaatggctctcataaacgctttgttcaaatcagaaatggcgaatcgaacgcgccggtgcccacgcttatgccgccctcgtccaccttctccaatttggtgcgcataaagtgcccactttgcacattgtccagcacgtggttgccattcgcgtcacccaacagccaaccgatgatactcagttcggaagtcattcggccgtactgagtctttgtttgttgcgaacggaccatgaaattctattgaaacagcaattaattaattagtcaattaataaaaacataaaacaaatccagcagaattgcttcaattaaataatatgcgtatctcaattcgcacattgtttcataagattttctgtttttcaaaaaccctaattacaaaaaacgtttatttcgactttttcttaattaaaaataagcatttaatgcccaaggaatattcccatcaaaaacaccaaataaaaaaaaggtaaatggcattttttgtataaaaatatgtttaaattgcatttgattctgttttcaaaaatatttattttccccaccccaatttattgacattttaaccttaatcactaatggatgcactcttttcatcaaaatgtgagctgccttttcactggcagtgaatgtgcgcagtttctccctgattttgtccccccaaaaattgtgtccgcccccctccatattcggcttcaacacgtaattgtgcggattttctattgcatcctaaagggacggaagcaattaaattgtctacgattgaaaatgaagtttttcccgtgcctcaattgcccttttggtgtcttcatcgttatcttccaaatcccatagtccggcaaaagtgctgcgcaactcggtaaccatctcctcgtattcaggttctggcagaaatctttccagcatcccaggcttggcaagcagctaaattgacgctcattagcgaataatgagcaacttaatgacatnnntgggtaattgcttatttacaaacattttaaattcaaaaaatttatacaaaattaaaaagtt

SEQ ID NO: 16747 - DNA, 2156 bp, Heterodera glycines
ccgaaaatttacaatagcaaaattgactatgctctctctttgagaaaagcactcaaggttcggagatgttctcttgtgagtgtaattcccccctcttaaaatgtaaatttttgaaacatttacacaatttcaacattaatttgccctgctttgtttgtgtctttctcacttgctcgtccacttcctcctccgccattgttgccaatttcgcggagcggttgttgttgttgctgctgcgacggttcgtcgccggtcgccgccggcaccgcgcggcggcgacagctccgccggtgctgctgacgctgttgctgcggcggtgcaatgaactcggagcgcgtgtccagcagagagtcgtcgaggaactgttgctgctgatgggcaccggcgagaccagtaaccctgtcctgcggaaaagcgtggtagggggtagcgggatcgggactcgaaccctatttgaaattttacaaatttttaatcatcctgagtcaagacctttttccattactgtatcacttcatttttaggctccaattttgaatatactcgtgtttttttaaatttctcggtactgtcgaaatcaatctctgtcaaattcacaatttttctgatactgtcgaactcacttattgtcgaattcactcgaaaaaaagcgaaatagtttactgtcgaaatcacctggcacggacgcaactgggcccttagcactaagacgcaactgacccgttctgacccatagtgtcccctccccccccgacatatcaaacataatattcatacatatattacaattcgctgctagcacaataatttattacaaataaatgtttataaacagataacccaaacaaaaaaactcggtacttgttaattatctgtattcagattttcaaaaaaaagttatgttttggctataacttttttcttttgcatccaaatccaacaaacactattggtatcatttgaaagcttaacatgttttgaagctatttctaagttatcgcttcgcaatcagacaattaccaaaaaagttatacatgaaaattgcgaaaaagtcgaaatttgaaattttttcttaatagaatttttcccaggctaaaaaatctttttgttttttgtaaagctaaaagagcatctgaagagctttcgaatgatacgaatagtgttggatttggatgcaaaagaaaagttatagccaaaaacatactttttttttgaaaatctgagtacaggtaattagcaagtaccaaaaattctttctgctgcttaagacatagtcggactttccaacgcgggtttcactaaatttgaaattaaaaatatgctaaattggtcggaccaacatttgtcttttttcccatggaatggcccaattaagcaactcttcagcatcgatttgtgattcacccaacggtgtatttcattgaacaattcggttgcatcggtcccagctgaaactgacgagtcaacaaatgagacgcgacaaacaaatgggttctagttggttttacgcgtcccatgacatttagtgtccatgttattttagtcgtcctaataaccagaggaaataaaaacgcaagggattcagatatgaaaacggaaaaagacattggttgcattcaacaagcaatgtttgtaaaaatgattactttaaattcccagaaaatattcgaatccgggtttggggttcaaaattgagtctaaagaaggccagattcgtgctaagcgccttggattgcccctgaaaataaatttctcaaaacttatttttaaaaaaaaattttctggaccaataatctttaccactgccaaaatttagttgttaaacctaagatgtcatgaaaattcatacacagacaatttgaacaatggcttagactaggcctaagttttagcttttttcaaagtatataaacaagaacaattagacgcttcggaaggtatagtttccaattgacgattcgaaaaatatttttttgtgacgcgtaaaatgccatgacgcgtattcgaatttttgttcgaatccgggtcaggggttcaaaataggtgtcagaatcgtattctccgaccctgaaaacctataaaacaactttatttcgaaatttttttgaaaattttctttttcaaaaaaggggggctaccatgtacactattaccca

SEQ ID NO: 16748 - DNA, 3102 bp, Heterodera glycines
aggaaatcagcagcaatcgttgggttcatcatttgagactcatttggaggacggcaaactgttcgattggccaacaaaatgaaaaaccgaattttgaagaaaatgtaagccaaacaatggcattgagcaatcttttaagaatttcatggtataacgggtagacgcataaacgtcgaaaagtaaaaaatattgcttttctatggacataaagaccggcaagacccgtgcggattttgctgggtctcagtccgcaatcccgtctttttagaaattgtgggatttacggggattaatcccgcaggatcacgtcccgcaaaaaattgtgagttccaataccgaagcgaggtccgcaattttgaatttccggtctctatgcaggcctgagggctccctcgcctcctcctgttcgttttgccaaggaccccttttaagatagtttaaaaatttctaaaattaatgtgaattttggtcttgctaaaacctctcattgacaagaggccctgctggattaattatattttgcgcattgggatgtttttgtccagcaaatttggcccctttttgcgccaaacatccacagcttggcctttgaaaatggtgatcagttaaacaatttgtgtcgtcttatttcaccaacaatcctctctgatctcaacctgagtctaatcaaagccagcaattttttttaaataataaatgaatataaaaaaataaaaataaatttaaaaaatatagaaaaacataaataaataaaatacaaaattaattgtaaatgtttacaattgattaaatttaaaataattctcaaaaacatgttgctaaaataggtataggtatattaaaattctctccggaccttttgaatttatttatgcataatgaatgcattatttcggcgggcagtgccattgaaaataattattttctcagtaaattttgtatgaaaataagctgaattatatcatacataccaaagtataaacagtagcaagaaaatactatgcaaacggaacaaataagaaaattttgttaatatttttaatttatggtgaatttcgaatgaaaatcggttaaatttaaagaaaaaatgaacaaaaactcggcattccaaacaaaaaatgccatatactctgctatttaagtcacgagctcttaaattgatgacccgacgctgctttcgttggacaatggactgaattgtgagcaaaaatttttgccaaaacattaaaaaatcagaagcgtaaaattaaaatttcttgtctatcacatgacattgatttacctaagaagttcggtttcgtccccgtaaatccatagattaatttgcaaaaatcattaaaattaagcagtaaaaaatatgataataaaaaataagtgcagaagattatacaatttcccacaacattggggtatttatgattttcctccgttttttcgtctttcatagtaagatcaatggcaactgtcactttgtcctcatttttgtcatacaatcctctgctctgatccatcagttccttaattatggtcatttaaaatttaattggggattatttgttttaattggcactcactgcaaatgaaatgaaattggcatatccacaactgttcgattcgttgtaaaaagtatcttcttccgtaaattctcccctcatataatctctcacgccgctcttttgcgagacaattcgaacagttgacgaacattggcaaatccaaccttcatctataaataaatgaaacaatattattgtcaattaatatcatttaatttgcaccttcttttggagcatcgcacacaaggtaaatggccaaccatttttcattgtcagtgcttccatttttcttttcaatctaagaaaatgccgtcgccgaaagggaccgattgactgtaccattacaagaaaaaaaaagaaatcttttggttttttgggttattgccaaaaacactcatcaatttatttgcatatttttcttttttcttgctatgccacaattggtcccttcggcgacggcatttttttttaatctttttgtgtattttactgtccaattgtccacctctgtccaattgtccacctctgtccaattgtccacctctgtcggattgtcctcgctgtcggattctccactgtcggaatgttcgggagcctctttttttgttctaatatatgcccgtattttccaaggaaattctttgatgaacacagttttgcttatacgttcactcccaatgttttcttgcgcaaattttgacaaatttttaatttccaacgcaagtgtccctcttcgtttaatgctgcacttggctttgttccaatcagaaattcgtccatggcttgggaatttcaacgcgtacagcccgggcactccataaggatagcgaaacggatgacacagatatggatgggaattgaactgatacacaccgatcacttcttccattgttaacacaccggatggaactataaatctcaaaatttgttaaatttcccttaataaaaattttatatcattttgggctaaaatatttatatccatcacaaataaaatttttattttaaggtcataccgacggattttgcaaaattctcctcatggatatttggaaaacgaattttgaacagtgccggaccaagtacggaacgccgattttccgctgaccatttcatgccattctgacgacattttttatcggcccaacgaattgcctttaaatttaaaaaaaaaatttaaaaaaagcaagtgcaaaatattaatcaaaatttacagctttccaaatttcaaattcattgcttagtaacaaacgatcactctcgagaagattgcacaacacattctgatcaatttgcaaaaagtcaattgatctgaataatttggcagcattttggcaaatgtaacgaaggcatttgtgggcaaaaccctaaaaaaaataatgttacaaatcaatttgtctttctcacctccaattcaaaaagcagagcctgggcatatgcaaagaaaacattgcgcaatgatgaaacagggatttgcaaagatgcgtcgaccaaatcagggatattgtattttttggctaattagaaattcaataattaataaatt

SEQ ID NO: 16749 - DNA, 2319 bp, Heterodera glycines
  unsure (1)..(2319): unsure at all n locations
agacgatcgttgacagcccagtccgactgctccggcctggtgctggccactaccaacatgaacctaatggaaaagccatctntaataaagatattcaagtaaacaaatccttaaaaagatntaaaaaaagcatccccagttttcaaactaagaaactttgcaagaaaccttaaaaagttttacaaatttttttttcatttttcatagaaatcgtgttgtttgaattttctttttaattttagggtgatggaaacgagctgcccctaaaaattgtggcagccaaataattcgtaaatgaagcaccactgactgacttcctcgactgttccccggttctgaagaggaacgcgttgagcatggcgcgcatgtcctcgctgatctgttccgtgcttcgcttgcgcagaaaagcgtccgcttcgtccacaaagagcaccaaactgacaaaaaatgcaggaaaattattcatttgaaaaacggctaattaatttcaaatggcccaccctttgcgcgacgtttgggcccagtcaaaaattttatgaattgcggacactccgtcacggcccatcggtgccacgtcaccgccggtcattatggcgtagtcgagacccgaatggcgagccaaactctgataaacaatttaaaatattaaaataggggaatgaatttgcatgaccccatagaaaggaggtaaaatttcccaagaaaatgcaacaaaatggtggaccaaccttggcgaacattgtcttccccgtgcctggcggtccgtagaacaacacattgcggaacagtccaaagttacgctttgtgttcctcgtggtgatcgcaatgtcacgcagacgcgactcgaggcttggctaaaacaattctgtagcaaaatttttatttattacaacaaatgaccatttttagaggacattgattcaattaagatttaaaaatagaaaaatgtgggtcggaaagcatcgaaaggcactgcccgtgggggggggggggggtaaatctctccataaagcacggtaaatgatttgcgcactcacattgagcacaatgcccttcagcgggtcctcgcgggcacggaacagtgtccgcacactcgcaattggatgtttgaacagctcgaacagtgtgaggcgggacgtttcacgcaccagggacggcttaccaagccgtgcttccacctgtttggccacaacgccagtgccacgcttggcactgtaccaaccgaccgccagcacagtcagaccaccgaccttttttggaggaaggaggggtcatttaaaaagtggaagtatttataaattgcagttataaatatagttgttactgtatgtaaaattcagatatgggtattgtaaaatagtaaaaataattttataaaagaaatggaattaaaattgaaaactcatagtcaaaaaagtcattctaaatcacattttatctccaaaatcaaaattctaaaagccattacatatacaaaagctcatttttcaacaaaatcggatacaatttcatcaagtcgacaataaaattgaaaattagccctttcaaaattgaaaaaactgaaaaatgagtaattgtttcacattctttttgctagcatttgttaattttttttctatttagataaaaccataaaaaacggaaaacatttttagataaaatacaaatataattaacaaattgggcataaaaaagcactcactgccgccataattttggagcgatcggagagaaactcggacagtccagcgcccacaacgccggcggttgtccgaatctgttccgtgaccgtcttgcgtcgctcctcctcactcgcacgcatcatctccaggttcacgtcacggttgtcgcgtgcggcacgcgccttggcgcgcacgtccgcgtcaatgcgttccaagtcgtatttgtgccgtagcgacagctcatgctcaatggtcgctgcaaaaatttgtggttttttacaaatttttacgaaacttataagcaacatttttcaggggaaaatctaattaaaaaatttctttgacagcaccgtagtgaaacttttttataggttaggttttacgcaatttgttaaaatttttgagggagaaacattggaaatagcattttttggttcaatttcttaccaaatttcgttaaattttgcaaaattgccaccgacaacgcctatcgttaccacggacgacataattcccgcaaaattttcagacccaaaaatgcataaaatttatttttcagtcccccaaaaatgcacaaaattttgtctttctgtcaaaaaatgctacaaaatttggcttatagcgtatataattttaa

SEQ ID NO: 16750 - DNA, 946 bp, Heterodera glycines
aatttttttttttttcatccataggatacccctccaccggataaaatatcgaaaaaaacccaaaaatttgactgattgagtgttgtgctgcacttactgcgcgcgcatgttttgtctcctcaattaacgttttgcgcctttcttcctccgcaacgcgcacattctccgattgcatggccgcaattcgagcctccaattgctggaaaaaaataaatggaaattctgaatttttggacgggtgcatttttcagtgatattgcgactgaccttctgctgcaaatcgtactccttctgcttggtgagttcttgcaatcggctgagctcaagtgccttgaaagagtgaaaaattacacaaggaataggaatcaaaagaggcagggaaacccaaacctaaccaaaattgtaggaatttttgtcgaaaattctagattttctgtgttgattcctctatcattagacgcctctccacttaattttaagcagggaaaaaattgatacacttgaaaaactctccgaatgcatgccataataaaaatagtaaaaaatgcagagaattttgtagcgcaaaaagtaggcatcggccttgaaaaattcctattaaaatttgcccgacctgcttcgcattggtcgacttttccagcgtttttgctgcatgtgccgcccgttccagcgcagttgagtcaaatgtgtaggcactctgtgccccaattttctgctgcttctcatcggcgggcgtgggagggtttcctagaatttgaaaaaaaaacaaaataagccataatccaggcagttttcggttttagtgcagttttaactgaattgtttattcaaaacgcactgttggggtcgtccggaggcgcaggaatcgacgatggctgaggtttgatgccaaaaatccaagacatttcaagacttaggtataacaaatttttctacagtaagaaaa

SEQ ID NO: 16751 - DNA, 1385 bp, Heterodera glycines
  unsure (1)..(1385): unsure at all n locations
aaggaattttgggggattgggccaaagtaagcttgggccaatgctcgtcccttgccatggatgaagtcatcagtgtcataattggcatcagtgcagccccattcagtcatcaattcattgttcgctgcaaaattttattatttttattttcatatttattttttcatcattttaacatttacaataacttgagaaagcctgatgatgacgctttttttatcaatttgtttaaaaaaattaatatttaataaatgtgacagaattcagcaataagtaaaaatttaattttttttttttttttggaaaaaattaatgaacattgccttgttttatatgtttaatcaaaaagaaaattttttcattattgttaatcataattacttgtagaacaattaagcatatagcaatagcgctgaaattggctgcatgaattgtcggagctttcataataagtgagcaacttggaaaggtacgccttcttgcagaatcggactaaatgaattttcatatttaccagaacaaattttttgaaaaacaagattaaaaaagtcaagaaaaatttaaaaagcaaaaaagtcatttctatgaatgaaataattccattacttaaaataaatcaaacatttatttaaaataatttaatcaatggcaataaataaaaaatttaaatttgttttgtctatttattttagggttaagttcagacccctctggggagagaaagtcgaggattgggaggaaattcccaactaaaatttgtcggaaatggctgggaaatataaaaaaaatgctgcggaacaacccctcataggaagtaaattttttgaaaggtacatatgcctaattttcattctcaaatgaaataatcccaaattgtttaccgggaattggaagcttaatggcagcattggccattagcacaccaattttccccaatttataactgcattctttcctgataatctgtttagattcatttgagttgatgatcaattgttcgggatctagctgaaattcctcaggcgccttgtcggtacatccccattttgtcaaaacattgaattcaagcaaatttttgccggctaaattttcgatttattatgaaattaaaatatattttgaaaatgtataataacataacagtatcttaatattgtgctttaaatgtcaaattttgtggatttttttagtcaaattttgaaaaatttaagaaaaattttgtcatccgacgatgccgataggcgctgccgaaatttttttttgttgcctattttaacgaaatttgttacaaaaactgatacgatttcaaaaaaaaattataataactanattaatattttataattcttccataanttttttttgcattcacaaatttagcttct

SEQ ID NO: 16752 - DNA, 1844 bp, Heterodera glycines
gtcatgattgacattcatcgattttttccaacaaaataatgcattcggatcggaccaagctgtgtattcttcaaaaaggaatccttggtcaaactgcagccccactctgccgtgaagccgataaagccgtcaatggatgaagagactaaacatgtattaattatgaaaaccactttaatttagagtggagctaataacgccattgtttgtatttttccttgagacatttcttaaacccaacgttttattctttaagaaggaaacaaattaaaaaattgattctttattaaaaataaaatttaaagaaaatctttagactgaaaatgttttgaaattaaacctcccgaagaatcaaaattttaaattagctaacgattaaagatttcgcaaattcactcagaaaaagaagtaaaaaatttggaaaaaaattaaatcaaaaagaaattaccgtatcaaatttgttcaaataagtgtttttcgaatttttttttcttgtaaaaatatttataatccacattagttgcattttaaaaaattttgtttttaaattaattaaagcattgaattttgaaaaaaaaattattgatccgattttattggagcataaactcgcagagcaacaaattttcaattttgaatatcaaaattagattaaaaagttgaattattatacttcttttattgtagaagaaatcaaaaattggtataaaagaaaacaaaaaattataattttttaatgtaattgaattgtgcgttcttgcaacatttttgaatttattaattttaattatctttcaagttcaaaatatttattactattattaatttttaaatccacaaatattgccaaaaattcttccatgaaactcaaaatcatcagtgctacatgttttatttacctgtcgtgcagttcagcacgtaacagtggtgctcattgtgttggcatgccttgtccttgtcctctttgtaaatgtcccttacggggtgcgactcgaaccgtgcctttttgcatctgagaaattcgtccgtcgtcgtcgtggttggcgtggtcgttgttgttgaggttgtgcttgtcgttgaggtctaaagaacagagacagtcaagataaagaataagctaattgtaagcggggcctccggcagtttctacaaaaaaaaaatcgaaaacaatttttaacttcaattattttccaagcaaattatttttattaatttttcggtccaaaaataataaatactttattttttgtatttagcatcatttagtaataaatttcaccaaataaagttactttgtaatgcattattttatatacagacctaaaaaatttctcataaatctattggtacgaaattcaatttattttgatggttttgtctctaaattatcaaccctaaacccagccataatttaaaaacagatatttcttactgttaaacaacagacagccttttgagttggtggacaacatccgtttccttctgactgccaccaatgttcgtccggaatacagccaaaaacaccaccacaatgctggcattcaatttccggtgcacaaatttttttctttttcatttcttcagccacaaatgcagaatcatcaaaggatttattttgtctttttttaaattctatttcctaaaaattgttttaaaattattttatttttataactttatcaattttattttagtgtatgtatctacaaattcattccaacgggattatggacaaaaaacactccgtgtttcgagcactttttgtcccaatttatggataggtgtgccctgaaaggggctataacttattcaaaaatgttctaagaaaaattataaatttcccg

SEQ ID NO: 16753 - DNA, 1486 bp, Heterodera glycines
ctcagccccagccaagttttactgcatcgcaacaaacttggtgaccaattgtcattgttaattaactttgtacctccataccctaaccctaacttttcacattgttttttttcttggggcggtctctttgttttcttcccgcccctttgacttaatcaataagtgcccttcccgcttggctttcgctcattattctgtcggatcgatctcgagatcccaacaaatctcccctccagggaacttcacaatgtcactttatattgtccttacagaataaaggatattattattccattgtttaagcactttttaagaattttggactcaataaataaaaatgtgaagaataaccaaaaggtcggaaaagctgctgctcattgtggccaaagcttttgctgccctcaaattggtccattcggtttaattttatttaattttcaattgggaagggaaagcgttgttaaataattttgggcgctagttaaaaagtgacagattttgaattctatcaaaaacaaaattcgaggtcttttaccccaataacccattaaataaattttcatgactatatattaaaaattttgcaaaccaaaagggtctccctcccccttttcttttcactttttgatggaattcaaaatctgtcacttttccctagcgcctaattttgcttttaaaatatttttctttttgggccaattattcaaataaaacaaattttaatgagcgaatgaatgaatattcggcgcagttggaacatcagcggaataattaaacagctgcgacattcacaaaaatatatttgtgggtgttatttcaaactttaaacattttgtatttgaataaaataaattaatccgattttaattcttttaaaaaatcagacaaaactttttaaatggccgccgtcgtcaaataatcatttgaaagaaaaggaaaattacttcaaaatcggagatttttatttcgattctcgttgaattaattcctatttctgttcaagtgagcaaaaagtcagtcgcaaaaaaaagaaaaacaaataaataaaaaaataaacttaaaaatggaaaattaaaataaaatgatttggcaaaaatatcacttttttatctttttgtttcataaaataatatcatttaatttatatggaatttatttgaaaaattgacagcaaaataattgtttttttttattcgggccttattggccggggcttagtccagctgaaaaaatgacaagttaaaaagcatccggaacctgtacctattttctggactttcatacgcctcgcccactgcccaccttcgcacactaaaatttaaaaagttggttcattttattgatgaaaaacagaatgaaatgttacagtatttgaggaaaggatttcggcaaatttaaaattctcacttcatttcaaaaaagaaaagcctcgtttttgcggtcaatgccaatgctttaatcgtcagcctcgtataaatcattgtaa

SEQ ID NO: 16754 - DNA, 989 bp, Heterodera glycines
ttttcgaagatgaaagccgtcgcaatcactaattttttttgttgataaaataggtataaaacatcaacatcaagctcgctcccgagccaactttcggcatgggaacaatcctaaatttgttaacacgggaccgatccacagtcttggcacttgccaatcccgacttcctcggcacaggaccactcccctttcttggcactgggcaaaccttgtaatttttcagataaaacatgctccttacttttaatagtcagtttgagacgccttcccccaatttttccattgactgcgccaaaagtttgttaataattttgtcgagatcgtcgatctgaattcacaatccaattaatcaagatttgttaatttgatcactccgaccattggtaaaattttgagccatttgatttgttttttgagtacaaattcatcaaatgctgctgaaactctcgtcgttccccagcggattttgaggggcaaaaaatgaattaattcgacaattaattcgagtggcaaatttcgtctcatttaaaaataattctgtggaattggctaatggacatggaatgaatgaagagaatgaatggaccacccattatcagttatcaacctcattgacctccattcttgtcgctcgtgccattcgttaattgaccaaattttgagttaacgcattgatttatggcatttttctgtttccattttcaaatctttccgccgactttataatttaaaaattattatttattatacacttttatttttagtataactttattttcttcacatgaattttattatttaaatgaaatcataagaatgaaaatggctattcataaaacggtttttgaaggtcgaatcggtggttttgaccattgccatttggcttttgattctgatcagttggctcctctctctctctgctgatcagctgcctatttccaatgccatcatcaccaaaaagccgaccatgcaaaacaatgagcacattt

SEQ ID NO: 16755 - DNA, 3798 bp, Heterodera glycines
tacgtgtggaatgttccacttagtctgaatggccgggagctcaaaaaaaggctcagccaacttattggactggtaaaaatattttgggaattaatttcatagcgcgttatccaacaggttcgcttcatcgaaacattcgaagcaagtttattaatttataacttaaaaaatgttttgaatttaatgatgaaatgtgtaaagaggattttgaaattcattcattcggaaattcaaaattgggtcattttatttgactgggctgagattttatgtgaatacaattttttcctggattctccatgctctgaataatttaaaaacaattttttctgtttgcgaacaaaaattgaaattttatttacctttttttttgcatatttttgggtttttctatagtatattacatagttcacatttttcttcacattttgaattttaaaatatattcgcaattttttcgtacatttttaattttttacattttttgagtttttgataatttgtagatttttttttattaaatctacccttaaaaatcgatttttcaaaaaggcaccaaatatcaatttttaactaattaggtatttttatggaattgtgttctttctaatttttttttttgtaataaactttttgtccaaaaatcataataaattttttattaaatattttttaggtcttagatatttcgggattattttcttttggatgaaagcattgacaattacattaaatttgaggcatggatcaaaaggtcggacaatgtgctcatcgagttctgttcaatggaatcggttagacgctttgccgtcatgatgagcgagggcagtgttccctttctgtcaagaaaaacggggttccatgatttggctacggtactttcagaattatttgaatttttgccaaataataattgcctatactaaatttgtttcatgtaatttcattaattttgttaattatgtaagtttggtcgccagcaattctttgcacttgtctatcgtgacacgggcgttgacattctgcgcactaatggcatggtcttacatttgttcataaaattcaaaactttcttgaaaatataaaaaatttacatcaagattttggccataaatgacttattggactaaaatttcttcggattgtccttgaaatcatgcataaaaattttagaaatctgaataattttaaggcttgatttgagcatttaacagaaaagcgcatttctttgaacggtgctgggtcgtttgtaagggtatttggtaaagtgttaattttacagatttttcgagaagaactagtacaactttaagcaaaacaattaaatatcctaaattaagttttcttggaatgaataaataactttgtgttctctataagaatattattaattttaaaagtttaacaaaaataaactaaagtttatggtcaagaaagtacaaaaaagcttgatgagtagaatgttttcgttctaacttttctctattattttaaaatttcttgagtttcaaaattttcttgaaagcttacaaattttaaaaatcaaatttttggcggaaagtttttaattatgccaaaatttcaacggtattttctttaaaatactgcataaaattttacttttgttttttgaaagaagaataattctgaagcttttgagcacatatgagaaaaaaatgggcgctttgtaaaaattttacagatttttcgagaagaactcgtactaacttttcttaaacgtaaccaaattaaatattcttaaattaatttaaaactaagtttatggtcaccaaagtaaaaaaaagtttgatgagtcagaatgttttgactataatttttctttattattttaaaatttcagcaaatttcattgggattcaaaaaaattaaaatgatatagaaatattaatttagttgatgagccaattcattttcgtaccccttgccggattcaactaacaaacattgtggcggaagttaactaacgcactagcatcgaaattttcaaaaattaccttattttttgaaatcaagaaattttctgaaattttaatggtttttagcacttatttgtttttgtttaagctggttcttagtttttgttttgttttttaaatgaatgatctaccaatatttcgcaattgactcacttacaaaaaataaaagaaatttcgttttttttttaaattttacactatctttcttcacaaattaatgccaaaatttccagcccccttccgaatggcagctgcaaattcagcggaggaaaaatgcccgtactaatagcaatgccaacgatggcggtaagagaagagtgccatgtgactgtgattttttcttttagaaaaaccgggaaagggaccagaaaagcaagggacgagacttagatttgcaatcgggaactaggacaaacaaaaaaaaagcgattttataaatttaagcgatttaaaattgaaaatttaacttatctcttatacaataagaatagaacattgaacacattgttggcaatttggaagtacaaaaagccaactaattacagtacccactcctaccgtcattttgcgagttgatttgacaagtcaacagactcaagagcggattgtctatgatcggagtgagtgacaatggatgtttttaattattaaatttattaatcagcaaaaaaataataattagataatatcttaattgaaaatcttttaaaatatttattaaaagacaaaaaaaaacgattctttttatggtaaagaagcatttttatcattagcaaatcctcggaacaaaaagcctttcatgaattaaaattctctgtgaaataataagacgaaaatgataaaaatttattaaatattttgagaaaaattatttaagataatatattatttaataaataaaaaatgtaattgaaattgcagccctaataacagcacaagcttatgctttagccgcgacgaattcgtccgcggtggcgccctcggcgcatgggacttcggccgatttgttggcggtgctcgcgcctccccctccaccgccactaaaagcggcaaaacaagaagtggatgtgctaggagggattagagctcgtgaacaaaatactttgtaaagttttttcctattttctccttaaaaatttgtagaattaaattaataaatgataatttttcaaaaaggtaaaagaagaaatcgactaattcgatgccagaagcagagatggctcacgtatgtacaaccactgaatgatttgttggggagtaagcgttgcgaaatgtggacgatttgttaattcttataaatataccgtattttctctaattatcgcccgtctccatttatcccccctttctgaggaggttgaacaataatcccccgtctctatttatccccccggggggataaataaaatttttatctgaaaaattgtatcattttttcaaaaaacaacagtaaaaaatgctaacaaataaaaatttcatccttatctccgactcgatccaactctacatcatcatcatcatcagataggccggcttcttcgtgatcatttcgtccatctttcacagtttcagttgccctaaactcgcgctttttattctgtgggttgacaacgccattggacggaaacgggagacgaaaaattgcggtgcaccccaaaacgtcgtcggccgaaacgtcgtcggaagactttttgaaccataactttgttcactgtaaatcaaattaagaattgttggtgttgttcgatagctctatgtgtttattattaatttgcaaaatctcaaaaattttcgttaagtt

SEQ ID NO: 16756 - DNA, 1904 bp, Heterodera glycines
  unsure (1)..(1904): unsure at all n locations
ttataatttgttggcattatgtatgtttntggtttaccatattttgtaggcaatataatattaagcggatttttcaaaaaacacaaatggaaattgaaattgccgaattcatctcattcatggcaaaatgcacagtacgctggtgctgttacatgacgcgccattgtagtcagaacaactagcgcatgcggtacccttcttatagaccacctcgtccaaccgattgccactgaaacgattaaatttttaaaattaaaaaaatcaatacaaaatcttaggaatatatactataattttataaaataaattatcatttaaatcactttatcgtgtagagaatagttaatttgctattgttgattttgggctttttttccatctggcattgttttattcagcggattttttaaaatttaatataccgtttgattgagaaattttttactgattatttttaaaaatgttataactcttgttttatttgtaaattttttctgatttttaaaattgcccatttcatcgatttttcgggtctttgatcgattttttctgatcacttttggtgcagtatccaaaaagccgaaaatttacaatatcaaatcgaccacgctctatccgataaaaatcttttgaaagtgattttgaaaaattcccttgtacgctagaatttcttgcactcacgttgtgttgtagttgcacacaacccatgtcttccagtcagcgctgggacagcgtgccatggcacagccaatttgagcagtggtggcccaggcttgctgaaagcaacaaacgaagttagagcagtaaaataagtagtggatgaaaatggatataaaacaagattgtaattcgtcttttttttataagatttgtccttatttcatcctatcgtacgggaaaaatttggatttacgaaaaaaatttttgccacccgtaaaaataagcattcattcattttgcctggctccaatgtccgatgcccttgttgaactgttccctgtccagctcaaggctttcctggatgccgtattgctttagctccgcccaccacgtgtcgcaagcttgtttcagcgcatcagctaaaaaacagtgttgatcatgagaaattgtttttttatcaattcggtatccagaaatccatttgatcaaattcattcccgagtaaaggctgtactcaaagacaaacaaaaataactgagactctaagcttaatcttgttgatccagcaaaacccatttgataaacgatttgcaaacacacccgaaccagattttctgaagtccaaatttttccggaaaacactaaaataggtggtaggctttaggctctaaaaaccctaaaaatagtctccaaaaaatggaaaataggctctaaatagtctcaaatttaggggtttaaaatgacaaaattacaaaaaagtaaaaaaattagggaaaacagtatttagctaaataattcttaaaatcaaaaattcttgtcaagaaataaataaattattttgaagatgaatttttgagaaaattttaattacttaagggtgtatttataaaatgttcaggtcgtttcttagtggtgcatttttcatttttattgcatttttgataacaaattttggacaaaacgccaaaataggcaaaaataggttctttcaaaaatttttaggctttttaggctataaaaataaaagcctagaaaaaaggcattaataagtcgaaaagtagcttaacaacagcccaaaaaaacatgtttttcgtgcgtttcaggcaacggggagctcaggaaaaaggcttttgcctaaaaatatcatccctaattatcaaacacgttttcattgcttttaccttccgaaattgacgacgaactcgtcatgtacaaattctcgcccatcccattgcgctgtgatg

SEQ ID NO: 16757 - DNA, 1127 bp, Heterodera glycines
cgtctcatgccctccgtcacatatttttgttggatcaaattactgccagccggcattgtgccggtcaaatttgccgcagttccttgggccagttgtgagcggtaattgttgtgacactcgagcatcaaacccgcggctgtcatcagacagtgccaaaacgaagcatgggatagctaatgaatttctcgaataatttttaaaattttaatgtatattttaatagttaaaagtttcaaaaattaaattaaattaccgatgaatgctgctaaaagcaagcagaaaacgcctttcgaattgaaatatttcatattggaatgaatttaatttggtttattggtggaaatattagaggattatttaatttattatcgatggtgttttaatgaatgatatttgttcactattttttcacgcttaaatacgcaattaaattttattacaacaaaaaaaaattgtttcaataaaatcattttatgaaatttttatttattcaactgaaattcgtaaatggtgatggtttatggtgtcacttttaattatgtaattattatttacccgaaacacggaaacacatcatttttgaccattttcagcacagctttacaaaaaagataaaaaataataagtttaaacagataagcagagaaagcgaaaaacgaaaagaaatgaacgaactgatcaaaagtgtaaacatttaacacatgattacttttaaaaataaaacagtttcttctaacccttacaaatttgcacgggtaaaaatggtgctaggccatttcgtaaaatcggccattttagctattttttcgacaaaatattgtccaatggcattcttgttggtggccgatcatttcgtcactgaggaataatttttaaaaaatgaaatgcattagagggaaaggtattaggcgaaatccctctatgttgatcaggacaacaatttgcgttagattgttgctgaatttgagcagcgagcagcacaagaccccattcgttatctaagagcatgttcataccatttggggcaaaataattgaaattttaaaatatatgtgacattttgccaacattttttaaaaattatttctaagtgacaaaatgatcagtgacgaaatgataggtaacct

SEQ ID NO: 16758 - DNA, 2794 bp, Heterodera glycines
tacatttcgaagtgtttgtgggtaaaattgtctttttttgataaatcatttctataaattgaaagttccagcagagaacttcgaaatccaatgacgaattaatgaattcgagatttcattagtttctacaatcgaagaaaaaattttttaatttgaaaattatgttaataattaggaaaaaagtcgatttttaggggtgtatttttcaattttcttgtatttttattgcaatttttctcaaaaatgccaaaatatgtgcaaaatatgtgccaaaccccaaaatatgtgctaacatattttatgtgacaaaacgccaaaatatgtgtttttatgtttttataagtcgctctaaatcaaaaattgttcggagaaaatgctatttttgggcttctctcgccataactaagccgcaaaaaaaatatgttaaaacataaaaatcctagccctaataatgaatgactagggagtccaaaaatatgcaccaaaaatggcaaaatatgcacataaaaagtgaaaaatatgcacaaatatgcaaaatatgcacatggaaatccatcctagaagcttcaaaccaagctaaaaacatatttttcgtgcgtttcaggcctcccacagtccaggaaaaaatatggatttccatataattggactccctaataatgacaataattaaacgacataataaataacaaaatttaataaaataacaatttatttaaattcggatggtaaactctcccctattaattcaaatgtttattattgaataaatacacaaaaaacaaaatatgcaaaatttgtcaagaataaatccgaggggcttaaaagaaataaaagttaaaacagacaaaaacatttgtaaataatttgtttaaatatttttttcaacaggaaaaactcaaaccaattttgaatcgcgtgaagaaattgacgaattaggccttttgtcaagaattgacggaatgtccaatggaaacgatcaaaatgaccaagagaatgtgctgcaggtattcgtcattaattgtttcatttcattgggacaaaggcaaatttattttttgaaattgccaaattgaagtgatgcccattaattgggcaaaagggctacgaaatggcactgttcattacgctcaataaatcgtaatttgctcaattttctaattggctaatttcccatggcatcggattaatttattattatatttgagacctggatttatggatttacccaatttcaaaataaaacaattaaaaggaaaatatgcccaaagtgtttcagatacttttcgatgctgaccaaatattggccaccagcaaacgaagcggcgaaagtgcgcagagagtggccaatgccattggggccaaaatttttgccacgtcgcacagttttggcgagaattgtgccgttagaattgcgactttgcgaattttgtcgcatttgtgcgccgccggcgaaaaatgggcggtgaaaatgttgcagcagaacatcgaccttaatttgctgaggtacagaaaagaattgtctgcagcctatatgacgaaatttcggaattgtttccaaattttcgctttcattccgggaggggaaattaagcaattgaccgaagttttcaggccttgatttttacttattctttaaatcattggttctcttattttctaacaaaaaatatttccatatttttgcattatgtccatattttaggtccatattttgacattttccaaaaagtctctattagaacggcctccatcagataactttgcgctttaaccactaaaaacgtaaatttttcgaaaaatatttctcagcgaattttctagagagttttacttaaatttattattttctaaaaattgtgtcaaacctttttcctaaaaataataaattttaaaatttatttgtattttttcttccacaataattttttattaccgcattcagccagtttagaggaggttttttttattaaaatttaataaattcaaatttttgaaggttacccctcaatttgaaaaaaaaattatgtccaaattttcgcgtttttatatccacatatttccgagccctaacaataacaatattctaataaatagtgccaaactcctcattcagcagtgattcgcctttctctggtcctctttcccttttagggctctccacgtgcgggaagtttcgccagtcgaacggcacgagtcgctccatttgattggcgcaatgttttcggcactttccgcgcggtccgtttccatcttagtcggctggtggcgctttcggctgtttgccaacaatgcgctgcactttttgatcggtgcggcagcgatcggagaaggcatttcatcggccgaagagttttcgccaaaaaatgcgcaaaactttgaggaggacaaagtgccaaacacagaaaggcattacatttttactcggtttttggtttataaaaacaatttaaattgtttttaaaattattgcccaaatgcctttcagcagaaaatactttgccattgcatcgaccattttgttggagcttttggcccgtttcccccaaatgttcttcgtcttgggcatcggcctcggttggctcagtcggctaatgcacaaatgttttgagacgaacaatgtccaaattggcgcgcatcggagcgcaattattacccaatttgatggactgtccgggggtcataagggagggcgaattgcattttgttggcccaggtaattagcgaattggcataaaaaatcgtgattaaccacactcattattttttggtggttttttgagttttaaaaaag

SEQ ID NO: 16759 - DNA, 2985 bp, Heterodera glycines
tcttcttgagcagatggtggacggtcaggggatcactgtcgaagaaacgcttctcgtctcccgggggaacagtccggcgatgcgatacgctcttcgaatcgttgagatgagaaacgaaaacactttccgatccgttgtatgtgcacgacgctttcattgctttgtgtttgcttgatattctgtgccttaagttccacgaaatcaccatcctgaagaagttggaactgcacgacaacgttttggggctcttttcggctttccgtcatcgccaatacgttggtctgttgcagccgccctttgccgtgcttcaaaataaaattgagcttctgtatcggtgcgtccgcctccaaaaaaattattgtcttgtgttttttcagttttagaaaatccggcggacaaacgcccgtccttttccgagacccactccttggtcaaaaatggaacgaggacgtttccgagtcgtggtctcgtgactttatggtgcagagtggcatttttggcaaggaagccgtgttgtatgtactccatcgagttttggcaggtcgttttattgctttagcaaatagcccatgatttagggatgtttgttttttagggttggactatctcaactctaaattgtttgttcacacaaacatttgtgcctcaagtgtcttcgtggatgaccgttgttctatcaaaattggcgcctttctccacgcacgacgcattcattcaacgcaatgccatataaatattcaccgtagcttttgattttcaggaaatgggaattcactggcgaccccagccgactccccccggaggctttccgcgtcggaagttcctcccaaaacattgtcagaccgaatttcgacacttgggccattgggctttttgtgttggaaatgatcaccagaaagcaattgcaatacacgcgggagcaaatgcgacaagttgccgaacaatttgtacgcttttttaaatttttcgtttgcaatttgaccattcggtcgccttaagagcgacgggtcggagggaccaccgacgctggcggagacggaaccaagcacaattggggcaaacggacagcaggtggtgattggtatttgatggacatcggtaatgattgtcgatttggttgtttttttgcagctgtttgacccgcacatcgattcttttttggcgttgtgtttcactgccgatccctcaaaacggcctaaaccgacagagttgctgaaccattcgttcatgcgaaacaaatgcaacgaaacgaaagcgagaataaacattggaggcgaataattggggacgacacaacttgaagaaggctccccccttttagttgagccaaaaggcgaagtccaatggaattccaaacggagaagcctccgacttgacatgatggcagtgcacagttactacggacagctgaaggagcgcgatttgatgtttgccattctgaacgcgatcaaattggtccgagagggcaccattccgccgattttcatcgaaaaactctctgccgttgtccatgacaaatttgtggcggtcgacgcttcgttggcgttccaacagagcgaagaatggagccgcgacgtgctgaacatttcgaatgccagcccatccccggaggggacaaaacgacttacactcagggaacacaaaacaccgcactgttcaggggaacagatcaacacgggccacaacaacagcagattcccacgggaagaaagggtcggttgtttgaggggggagaggcacctgttgctgagagagtggaaaataggcaaacaacattgttttgtggtttacatttggtttacaatcttatcaccgtttacttgggagcagttccttctaattttcgaggtttttcactgggaaaatattggaatttttcaaagaatttaatattttcttgttttatgcctaggaataccaacgttgtgagatggtgttcttcgtcaaccgaaattggtcaagggaacaccgacaacttttcgttgcttaccaattcgcccgttggttttcccgcggtttgatttggtcggtcctccttttcttcttcaatttattagcgttttctcttccagttttcccgacttggtgagaattgcggacgaacttgacgacattctcattgaccatatgctctgttcggtgccccggccgttctctccctacaaaacttcggctcggaccgccccgcccgactccgttgcgttcatctccggcttacgccggagtttgtacgaccccgactcggtcaaagacccacaaacccacaaattcaacaacatttacgtggaagttgtgctcagtaaaaagctcttacaaaagaagctggtgagttttcggagatggaaaatcatttttcgtttattttaaatatttaaacctttcctttaggacaaattcaaccagctcagagagggcgaccccgtagaacttccgcaaaatgttgatccgctgtgtgcctcggccactttctacgacttgaacctgcggcgactcgacgcgatggaagcggtgcttttgggagagcggagagtgcgcgattgggtgggaagagagcagaggggggaggaagtgggaatggtcatgagtgagtattcaccaaggatttcaacccggaccaacgctttgtcgactcgacaagtccgagcacccaactgaccacacttttgaacgaacgtcgaaggaatccaaatgcgaagttcgactcggagatcagttgggaggcgagcaaccaggcacgacgtgccaagatttgggtttgccattttttgtaaatttcgcaaaggatggacatttcgttcagggggattacacgcgcgacttcatgtaccgttttgcacgataccacgtcccgtacaaggcaaaccgggaaaaccctgattcgtttattcacaatcggattcgagaattgttttagctctctgaggattcttccgaaaaggtttttgacaggccccgaatgcattcgtcaacagaagtgttggccat

SEQ ID NO: 16760 - DNA, 1151 bp, Heterodera glycines
agcttgaggaactgtgcgtccatttccggcagtccgaagcgagttcgccaagtccacccagaattgaggagagccgtgccgacttggaacgattcccaaaactcaagcgttgacggcctctaactttggcatttggtccatctcaccgctttagatataaaaatgacctgtgatcaatgataactgataatggcataacgccttttttaaattttattttgttgatttttcgaaccttaattaaatgtacaaaacttcgtttcttatatttttttataaacatgcaaattaacttccaaaaaactcatgtagggcgaatccttattcgaaatactctatttttgctatattttgacaaacttttttggcactcgaatgaattttgttagccgttagaaaaatactaaataaattatgctaatgttttttgactactttagatcgtttgttgaaagtgacagggacaattaattctatgcttccctcgggtttggtcagggagcttaaggtttggatgactaaattcgtttttaatacttcgaacgaatgcctttttctcccatttgggcctcaacttccgcttgggacacttttggtggacgcgcggcgaaactctcctcgcaattgcaccaaatggccgccgcttttggcgcttttgtggacgcactgcaaacgatcagtgacagtgccaacactgtcaatggtaatttagcaacaaaatgagggacggaattatcagaaaatgccgagctttttgggcacacgcctttttggccgtgataaaaccattttatgaaatgggttctagaagttcctctcgtgtttcaaaagtgcttctccttcgtctgttccgcaggtgtcagccgcgacatcggtgccgcgttgacgcgcttttgcctcagacaacgcgcggtcgaaacggcgattcgcaaatggggcgaaacattgcaaaagcattgtgccgacggtttgggacgaaggggcggcgagtggcgccaaacggtgcgatttcattgcattaaatattcaaaccatggctttgacatttccctaatgttgttcttattatatttcaatggtttcacttttttgaggatcgatcaaagacaaccatttaagttggattgacgctcttcttaaacatttgtttt

SEQ ID NO: 16761 - DNA, 2929 bp, Heterodera glycines
ttttgacaatttcaaaaagacagtcgcttatgtcttgcgctagaacttcgccgagttggtgcccttcttggcttacatcgttttcggtctgccccttccgctcggcaccatcacaatgctttgcatcgatttgggcactgacattgtccgtccgccaaactaattaggagcaaattccacctaattatttacaactaattggagtcaaatccacttaattaatgacagatcccatcgattaccattggctacgaaaaggctgaatcggacattatgaaacggcccccgcggcaaaagacggaacggctggtcaacttcccagtgtttgcgctcgcctactttcaaattggctttatccaaggcacaaattatgcaaaaagtgaaccaattaatcatttcttccgccccaatttttaggaatggccggctttttctcttacttttgggtgatggccgataacggatggatgccaatgcgacgtaagcattattttattttaaaaaattcaaaagtggttttttagtgttctttctacgaaaagaatgggactccgttggcgtaaacaatttggaagacagttatggccaagaatgggtaagacatggccaagtgggtaattaatggccaaggatgggtaagtcatggccaagaatggataagacatggccaagaatggataagacatggccaagaatggataagacatggccaagaatggataagacatggccaagtgggtaattaatggccaaggatgggtaagtcatggccaagaatggataagacatggccaagaatggataagacatggccaagaatggataagacatggccaagtgggtaattaatggccaaggatgggtaagtcatggccaagaatggataagacatggccaagaatggataagacatggccaagaatggataagacatggccaagtgggtaattaatggccaaggatgggtaagtcatggccaagaatggataagacatggccaagaatggataagacatggccaagaatggataagacatggccaagaatggataagacatggccaagtgggtaattaatggccaaggatgcgtaagtcatggccaagaatggataagacatggccaagtacgggtaatcaatggccaagaggggtaattaatggccaagaatggatactttttaattcgcttctttgtcccatgccattttcagacttacgaccagcgcaaagtgctggaggcgacctgccagacagccttcttcatcgccattgtggtcactcagtgggccgaccttctggtcgtgaagacccgtcgcaactctttggtccagcagggcatggacaattggccgctgaacttcgcgctgctcattgagacggccatcgccgtgttcctcgcctatacgccgggcgttagccacggactgaacatgcacggactgaagtggccatggggcggcgaaatgccaaagaaattaatttaaatccccaaaacgaatgaaggttcgcctggtggttccccgctttgccgttcgctttgtatctgttcaattacgatgaaatgcgccgcttttggattcgtcattggcccaacggatgggccaagagggaattgtacttttgaagaagaaaaaagtgggggaaagcaaagcaaagcgagaaaagagcgacgacgattagcgaactcattaaaagcatttaaacgcatagaaaataaaaaacaaataaaaatgtaattaatgaacaaataaaaatggagccaaatagaaatgaacatttaaccaaaaaaatataattatttgaaccattaagattttaattaatgttgtttaaatgattgaaaagaggttggggagagagagggaagagaaagaaagaaataagaagaaatatggggaaggagagacgagcagagaaatgggaaaagggaaaagcattgggatgagaaagggggcggggagcataagggaggggggctgcgcataatgtttgaagtacactgatctcccgcttccatggcacatttttgccatcactttttcgtcgagaatgctttcgcctcaatctctgccccccccccttcttttctaattacctcaataaacatcactgatcatgctcatcgtcagaataaacagtactgccaaaaggcttttgaaatgatcactccagccacgtctctaatgtttgcttttcgattggctctctctcccgccactccccccaaaaaatgccattttctgccaatttatctctcaccaaaatgccaatgccatcgtcgtcatcacaaagcatcacgctcatcatttctttacaaatttatttctacctttaaatttaatttattgctttacagccaatgttcgcaagtgatgaatttgcctccgtgggactcaatttgctgttcaatccgtccctttttctcaacaaatttcgcgaaattgaaccggacaaatttcaatttccaaaattttcgctggtatattttttttaattaaaagttattctttatcttttggtcatttttatttaagccatccaaaggatacgaacagaaaacggagagaatgaaaacgaattggcaacaactcttacaatcagccatttttgcaggtatttggcctaagctgaataaataataaaaataaagaaaaagaaaaaggagaaaaaaaaacaacgggtgaaaaatgaaaaaaaaattgatgaaaaaaaaaaaaaaaaaaaactttaaaaaaaaagtaaaaaaaagggggaatggaaaaaaaaattttgtggaaaaaaaaaaaaaaaaaactttaaaaaaaaaaggaaaaaaaggggggaatttaaaaaaaatttttgggaaaaaaaaaaaaaaaaaattttaaaaaaaaggggaaaaaggggggaaataaaaaaaaaatttttgggaaaaaaaaaaaaaaaaaa

SEQ ID NO: 16762 - DNA, 224 bp, Heterodera glycines
aggagagagtctttagagagagagtgaggcaaagggggagaatgagagagaaaattgatggagagaaagaaaaagagagagactttagagagagagtgagacaaagggggagaatgagagagaaaattgatggagagaaaggtttttagagagactttagagagagagtgagacaaaggtgatatttaaaaggaaaattgatggagagaaagaaaaagagagag

SEQ ID NO: 16763 - DNA, 1028 bp, Heterodera glycines
acactaattttccatcgagagagtctagagctatagcgttaacgagtgaccgcgtcgagagagacgagaataatggccgagagtgaacgcgaaagtcaagaggacgaaagagtgaaagttatttaagtggacattgggagaaattgtgatcatcttttacaacaacaaaaaagaaaagattattgcgttgaaagaaggaatggtcgtgggcggggagggtcgatcagctgacagacaaaatgttagccgagagtattcttgagaccagccaacctatctcttggatttggccaagtttaattatcgcctcgcggcattttgccattgtcttcgattgctcttctgtcctgcgttgtccatcgtcaccttccatttgatcattttgcctctttaatagcctttccatgtcccatcgtccctttaatttccaaattccccccccccccttcgtctgttccagcagaaaaaagctttcaagcggagagtgtgcgcatttgtccgaccgctccgcattgagtccgtccccaaaacgaaaaaagtctccggccaaaaacagcagcaggacctcttccgcccgctcctccacaaatcgcatgactctcgacccttcgcttcgtttcccttcggccgcccgatcggtcctctcgagacgattgatgaggaggacgacgaggacgaatggtcaattgtgttcacaaatcatgcttgttgtactctgctgatgaaggagatgaagccaacccccgccatagctaattgaggacactcattttgtgaaaataaattaattagttttaattaaggagttgaaatcctgccaaaattggctgaatattcccaaatttgttcttgtatttattggtcaccatcattcgctattgaaatgacaacatttgtgccaattataaccatttttctgctgcttccgtcacaaatcgtgccaatgaaaagtgccaaaaagtctttggcctcttcaaacagtaaaaacggtgcccagcaaaaacaactgttactgtacgacttgaatt

SEQ ID NO: 16764 - DNA, 1908 bp, Heterodera glycines
  unsure (1)..(1908): unsure at all n locations
agcaaaataactttnttaatttgttgaccaattatattcgaaggctattaacaagctcatttgctttcctaaaatcactaagatataccgccatgtaaacaaataataaataaaatatttctgactttttttgcggtttcgtgttgcagcttttataaatttttaatcgcttttgggagaaagggaaagacgaaatgccaaggcagcaaaaaaatagacagggaaaaaacgaagggaatattacagaattttactgatttttggtgatcgaaaattaccgacgaaattgataaacggcacatctgagctgatcgcaaaaagaatctttgcccccagcgggtggaaattgggtcaaatgatcatttattatttgtgtgattatatttagcttaatgcatccaccgtggcaatgtttatccgaggcgcaccgcccgaaggcgaaaagggcggcggtaacgacatcaatcagctaaacgcaattcgcgaccggcgacaattgtggcgcaacgcgcgcattccgtacgcattgagcagccaatacagcagctacaggcaaaagcacaaatcaaaatgatggaacaattgagaaattatgcgatgaattttaagcaaaaagaaaacaaaataaaataattattaattaattacatatttttaatttagtcgttcagtgatcgcatcagcaatgcaggaatacggtaatagtgcaaattaatcggaaagctgcttttcctatgtatcgaacttaagcaatgaccccaaagagcacaaaaaaaagaaatttcattagtattattttttgttggttaattgaattcaatgtttgaaatgtgtaaaatttaaaaaaaattgtttcaaagtgatttagcaaaaaacacgtgcatccaatggacgccgaggacagcagtggacaacgattatgtgtacattgtgccggagaggggctgctattcgatggtgccaattgttaaaagtgtcacataatttgaaaaaaatttttgaaaaggtcggaaggaccggcggacggcaaattctttcactgggcaatggatgcattcaaaaaggtgaacggagtgtgccatggcatgctattcatttgctaaattcaaatgcccaatattaaaataatacggcattctttgcggatccattggagcaaaagccaacatcgatttgcttagcatacaccgaagaagggggaattgatttatcatcgatgcttaattaacttaaaccaatctttttaaattttttaattattaactaatgcaaaaagagaagagctgtcgctgacgcatagaaaattttattaaattattatgattttttcggaattgatcaaaaagtaaaaagcattttgtctcattgtcagggataatcatccacgagatgatgcacgccaccggctttttccatgaacagtcgcgcaccgaccgggacaatttcatcaccatcctttggcacaacattctgccgggcatgcaaggtgaattggggaaaagggaaaacaaacgggagctgaattcaaataggcaaaataaaaacgatgtttttttaaggaattcacttctttaaatgattttttaaaatttttaccgtaaagtattgccaatttctgtgaaaattccaaatgaattgaaggacagttcgagaagtacagcgcggccaccattcaaacgttgggcagtgactacgacttcggctcaatgttcggattggcattttaaaagcaaagacaaattgggcgaaaaactctccaattaaaattaattgcaattatttcttgccctcaaatccgtgctgttttttcagcatgcattatggccccaacgcgttcacgcgcaacggactgccgacgattggccacggagaagagcgacgattggccaacggagcggatttagcaaa

SEQ ID NO: 16765 - DNA, 976 bp, Heterodera glycines
aggaggtcaaagtccgaggagaggatcagttgaacatcgttcattcaaaaagtaacaaaaaataacgataaaaaaacatttcgtgaattgaggattttgtcaacgaagtaggcaacccgaaaagctcatatttcagtgtaacgaatgcgggggatcggagggaaatttccgatgggtttgatcagatcacacctcgtccgccccaatggatcactggttcatcgttctcgatgtgctaactgtttccgccggtgcccaatcccttcgttttgccgattccgccagatgcaactgttgtatttggtgataaatacgattgcaatggaggccctgttgttccgttggcgatgaatcgcgcagcaaaatctgtgacagtgcccgccgattcggagggttttagctggtgggctgcgaattggtggtgatgaagactgctaagagaaggaaaagatgccatcgaagaggccaacggctgctgctgtggcccattcagaactccgttcgaaaccacctcaacagataatcctttcattgtcagcccaccaatgattgctaattattaatggtaatctcaattcacgtttgatgctgttatgctgaacggagtgccggctccgtcgggcatctgcgaatggtttagttgagaaagttgttggtagaattgagcctggatggatgctgcctgtgggtgtaaatggttgcttgaagagagtgagctggctgaagtcgttgcctggggaatgcagccagcctaaaaatgcaatcattagccttttataaatgcatttgaaatttgtctacttttgacacaaaatcggcagcattcggccgataggtcgcagctgcggccctctgtgactgctgctgttgttgaagcagactcggcgcattactggcgacagtgcttgtgtttggttgaagccgaccgtgctgctgttgttgctgatcccgagttgtcgatgatttcgctgatgat

SEQ ID NO: 16766 - DNA, 1358 bp, Heterodera glycines
  unsure (1)..(1358): unsure at all n locations
gtagacgagcaaattcacttcatcgctgttaaatgccatcctttttagtcgtcttcacaacttnggcggagtatttctatatagttaatggacgcgaaggaatgccgtacaaagggggngcataagacaaatttacgggttgcaaattcagacgaattctttagaatgtttgttagatntaatagaacaatggaaggtcaaagatgaatgggtcaatggttatgattttgtgagtgattcgatgtgtgacgaatggagagcaaaagaagaatggcgtatttgaatggttgataattataaaaacaatttattgtgaacaaaaattgaatttgtgcggagtaattgagtaatgccctgagctgaaactgcaaaaattaatcggttaaaatttgaaaatattttctaatttaggtcattcattattaagctgctcattaaccttctcatttcaataatatgaagcttgagaaaatacgtagccctaaagttctgttttagaaagcgacggagagtaagtgaagggttcggggagaaaatacccgaagggataaatgtgagacggtccctagacacgacgatggggcagaggagtgaagggatggaggacacgtcctccccagtgtagaaaggctcacaagggaggtttttaacgacgacgacgacgattcgggctgacgaatggagtgcagagagtgtgctgcagatggacagcagcctgacgagcatagatgttgacatggaaaggccgtgcagacgcatgtggcagttgaaggcagcagacagtcagaagggaagagagttgcaaagggagagaagcgaggtgaatctaagggcagagaacaagtgacaatgcctacggaaagtgcagcccatttgagaggcggacttgggctgacgacgccccaggggagcaaaatagcagatgaggacagagaaggaaacgcggaagagaaaggacgggagcagacgacgatagtgaaaagagagtacggaagcaagacgacgagaagaattctgttcgtccgtcgattataagtcggagcggcggcttaagatgaatagagcaggaggatgtgggagaaaggaaaaaggagagaattggggtgggggtgggaaatccattcaacgattgtgctaaggcagagaaggggaagaaaaacggggaccatctcaaaaaatgacaaattaaaatttgggaaatcttacatttcgcctactaaggcaaaataggacatttcgcctataagctaaaaatcggtcattttgcctactgacatttcacctactcgaaatttgcctactaaccgagaatcagacgtttcgcctacggtattcgcatgctgtggaaatattattac

SEQ ID NO: 16767 - DNA, 1467 bp, Heterodera glycines
ataagctaaaaatcggtcattttgcctactgacatttcacctactcgaaaattgcctactaaccgagaatcagacgtttcgcctacggtattcgcatgctgtggaaatattattactagggacgtgaattttaggttttaactattttttttgctcaattgatttgaagaaaggagctcaaaaaacgcatttccgcataaaaatttttcgattctgatgtcattatcggtcactagaaatcactattttgggattttgtcactaaaatagtgaaaattcactattttttcactattttgacatttttgggcaaaattccttaacaaaaatgcaataaaaccaaaaaatacacccctaagaatcgacaaaaaaaaaattcgaaaagcactcctaagaaatgaaaaaaattttctcaaaaaggtattttcgtggcaaaaatttttaattttaaaaatttttttaggtaactattttgggttttttggtcttaaaaatcccagtcctactcatttgcaactgcaatcagtgaataaaaattatttttgctcaatttttggctgaaaattatgtcactattcgtcactatttcggacttttgtcactatttcttcactattttggcatttttactcactattttagttaactattttggcatttttactcactattttagttaactatttcgggatttttcgtcactaaaagtcgcgaccctaattattacaaaaaaaaaaagaattagaaatataaaaggatataaagcagggctcccagatctgaggatttatcctcattttgtggttttttgataggtcaatgagggttttttttgaaatgatgatttgaggatttttgaggcttttggggaaaatcgtcagaatcttttaaattttgataaattttaacataatgtttgacatttatttaatttgaattttggtttttacataatagaatatcaaacggaaatctcacccaaatttagccagaaaattacaatttttcgaaaatccacaaaattatgaattttttaaaatgaaaatctgctaaaaatatggtcaaaattctcaatttttccaacaccggcggtgccggacgctaaaaatccttttttttaatttgctcaaaattgcaaaatttggccatttttgtggacaaatctgttaacaaatcacattaaaaattacaaaaatcttcccggcggcgcctatcggcaccgccggcccccccattccccaagttttttggaaaaagcgccgcaaaaaatcaacttcgatttttcatgctcagaatctcacaaaatgcttatttctaacaaaaaattgctcaaattgatcattgtcaatcaaaaatataacatttgaacattttaaacgttttgaataaatttgtaaaaatgaggctttttgacccaaaatgaggcgtttttgcctgccaaatgaggcttttgaaaattttcatctg

SEQ ID NO: 16768 - DNA, 943 bp, Heterodera glycines
atgcacaatggtaattaatggttttttaaaaattataattaaattaattaatttgtttttttttttaaattttcggtcgaaatgagtgcccctctcttcacattgttcacctgttttttgttcgtcctctgctatttggtcccattgtttttggtcacatttttctacaccaaactgctctcaaaactgtaccaacatgcgcgacaatttaaagtgaaaaaatttgggggagaattttttaatttttaatgaattaattaaaaaatattttattttgggcactatttaaaaattaaaaagcaatggggtgaccctattgatttgcaaaaaagccgaaaattaagaattttttattttatgattttttttgcccaaattaggttgggaaaaaatcagaattgattcaaatttatgccagatttgtgatcagggaccccaaaatccaccagtgaacagattttcatttctaaatctaatcaaaagagtgtcccccctttgttttttttaatataattaaaacattaatcactttataagtagcgcctttatttttttttaattggaaatatttaaaaataaattaaaaataatattcctttaatttatcagaccacaaaattccgttcccaaatcccactgatgaggatttcgttgtacaccttggcggtcgcctgtttctacttcatttgctggaccccgtaatagaaaaaaaatcgcttttaattttaatttcccaatttttagcttttgggtggccacggcatttgccgtttatctggaatatgccggtgaacacaatggtgccgtgccaccaatattcgtctattgcatgtgaataaaaaagaaatttcttagctctttaaaaaaattttttttgtttttttaggtatttcatccatgcacttccgttcacaaattcagccatcaattggattttatatgg

SEQ ID NO: 16769 - DNA, 3163 bp, Heterodera glycines
  unsure (1)..(3163): unsure at all n locations
ataatttcataattcattttttatttttttttgacaattttaatatattataaatattttctgaaacattaaacttttgtagcctgaaaatttttaaataattttaataaattttctatatattataagggttgctatcgtcgcaaatcgtcttcatgctccatgaatgtgctgaactcgttgaactcctcaactgctgttgatctcgagggtggtggtggtggtggatcaattaaagctgcttatgacttgacacaagaagttctggaaaaagtatcagctgctgtagttgctgaaaaggagcaacaccaacaacagcagcaacaagttgaaggagtacaaagtgaacttaatgaacaacagcaaaaacaacaacaacaacaccaccaacagcagcagcatgaggacacgtcacaggtgttaaattaatttaattaagaggtgggattatccccgttttcagcgtcctcgacaattttcagtttcatattgagggtatatttttcaaaaaaattcataaatttaagctaaaaactaattactaaatttattaatttttaagaaaattgagtacagactttaaaatttccttttagacttaattttagaataaatttccacttttcagaaagctaaaaaattgcttttaaaatttatcggtccttagaagtcaaatgacctctttaatagaggggtccttttttagtggggtttcaaaaaagcaaaattagcgcgtaaaatatgcaaataaatttctttttttttaaatttcagctcccaaattgggccacatcatcgtcagctgaaacagaagccaataatgatcactttccgggtgatgccgatgaggacgaagctgcgattgtacatgagcaaacactgttgctgcacagctcggactcgatggacctgttgttgcgcatcgattgcgaatcgaccacatatctttgaacacattacaaaattgttgcttgtgcagttcgagaatctcatcattttcgagttatgatgatccaagaaaaaaattctgacatttgggagtctcgagcatcactaatttcaaatacatcagcaggcagcaaagggtggcgaaagacgaggcccgaaaaccgaccccccaaaaatatcggaattccgtgccaccatccccatccctggatggcaccttctgtacatatatagttgggaaaacaaaattttggaaagaattggcaaaatttcgacgaatttctttcttcgttttttttttgttgaaaattctaaaataggacagcctccaaaaatatgtcaatgcccatatgtgtaattattagggttataagttgtatgcttttgcatattttttctgcgcatatgctatgaagaaaggggctcaaaaatagcatttctgcattaaaattttttgatttggtgaaggtttttagtgcatataaaagcatattttgggggtttttgagaataagtgcatattttgccatttttacgtttttagagcatatttcggtcatttttgggaaattttcacaagaaaaatgcgaaaaaaacgaaaaatacacccctaaggatcgactttttggaatttaaaaaaaaatacacccttaaaaatcgaaaaaattttttattttgtaagactttggaaaaaaaaatttatgtatatgtaaaatgtaatgttgttttagcatataataaaatttataaatttggaaatttcaatatttttgcaattgtctaaaaaatgctccttagccattgttttggtgttttaaaagtcaattcttaatttatacacaatttttggcattttttgagggctaaaagccatttttggcagttttttaaggcatattttagtgcatatttgggcatttttcgggtttttagggcatatttgggggatttttagtgcatataacttataaccctagtaattatatatattattcatcgccatcctgctgaacacttaaattattttcatttttaatttgctttctttaaatttatttttgtatatgaataaattaaattttttaaacaatcaaatatctaatcaacacaattcatcgcataaaactcaaaaatgatcggacaattctcacattttccaaatgctaaaaattcatttccacataattagacgtcattttcgctgctttgactcgcttcttttgctgcttccgccggtggagaaagaggcctaaaaattcaatgaaatttaattattttcaaaacaaaaaggaaaatctgttaaaataaatggacaagaggaggggggttagaacaaaattgaaaaaaaaaattttttttttgatacgaaaaacaaaaatgttattgggtaaaatttttacgaaaattatattttgtgggataaaaaaacgataatctttctatttaattgaacccttccaacccccagcctggtagattttctatggttttgttgctcacccaatgcaatttttgccttcactaagatgaaaatagacattgttcaatttgttcgcagaatttccatcttttttcttctgctgctgctgttgtttctgaaccgtctccgccgtctccccaacaatagtaattggacatcgcttcaacagccaacaacgagaagagccaatatccgattctttcttcaatgtcagcttttctttagtctgttcgttcaccaattcaaatggttcaattggcatcgtcgtcacgaaaaaagttaagcagacgctgtaactgacagaagtgcgggcacggacaaaaacctaaataaaaatatatgtacaatgtcaaatatgaaatgtgacgacaaaccgacctccttgaaattggtgagccattcaaagtttgtgggtgctgatgtcgtaaagttcaagcaatgcaatgactttggttggccatcttttctcggattgtgcaaccatttggacaacgtttggccggcagaagtcgcatttggtccaccaaaatcattatcagcaagcacatcgggcaacagatcaccaggtaggattgaattcaactgatcaagatcggatagaattgttggcgaaatgagtcgacgcaaattgtccaaatngtcgacattgngaanagccaatggcgaaatgttgtcgcaaaaatggccatatttcagcgancaaacatcccaatcgntttgtatcttcgttttttt

SEQ ID NO: 16770 - DNA, 2952 bp, Heterodera glycines
  unsure (1)..(2952): unsure at all n locations
aaagcaaaatggaggagcagagaagtgatcagaactcatgcaagtcggctgagcacaaaagtgatcaaagcaaaagcaaggagcagagaagtgatcagaactcaaggaagtcggctgagcacaaaagtgatcaaagcaaaagcaaggagcagcgaagtgatcagaactcaagcatgtcggctgagcacaaaagtggtcaaagcaaaagcaaaatggaggagcagagaagtgatcaaaactcaagcaagtcggctgagcacaaaagtgatcaaagcaaaagcaaggagcagcgaagtgatcagaactcaagcatgtcggctgagcacaaaagtggtcaaagcaaaagcaaaatggaggagcagagaagtgatcaaaactcaagcaagtcggctgagcacaaaagtgatcaaagcaaaagcaaggagcagcgaagtgatcagaactcaagcatgtcggctgagcacaaaagtggtcaaagcaaaagcaaaatggaggagcagagaagtgatcagaactcaagcaagtcggctgagcacaaaagtgatcaaagcaaaagcaaggagcagcgaagtgatcagaactcaagcatgtcggctgagcacaaaagtggtcaaagcaaaagcaaaatggaggagcagagaagtgatcaaaactcaagcaagtcggctgagcacaaaagtgatcaaagcaaaagcaaggagcagagaagtgatcagaactcaaggaagtcggctgagcacaaaagtgatcaaagcaaaagcaaggagcagagaagtgatcagaacgcaagcaagtcggctgagcacaaaagtgatcaaagcaaaagcaaaatggaggagcagcgaagtgatcagaactcaagcatgtcagctgagcatcgaagtgatcaaagcaaaattgaagaaatgtggagtgatcaacgcaataatcaatttgaagataaacgaaaagatcaaagccatgaggaggagatctattatgagaatcatgactatcggcagtcctatgacgatgaatttgaagaagaaattgacgactacgcgcacaaatcaaatgattacaattttgagccatttgatcagcaggtatttcaatggctatttggtagagactgagccgggccctgtacagatttttaccggaacctgtaaatcggtccggtgattttcgggaaaattccccaatccagtccgactgatttgaaaatattggactcttttttatctggcttgaagcatgatcaatcagttttctacatcttcagaatgaacaaaccgattggtggagtaagcaatgggaaactgatcaaggaggatcggtggactttcaaaatgcatttttgggtcataaatcgcaaaatttcggccttttttggtgtgtctgtgatgccaattgtccatttgcttttgtgtgtacgccaaatggatgccgtaaatcaaaaaaaaatcttttccaattaattaattgaattttattccagaaaattcttcaactttactcaatgtggatggcaaaattggctttgtccactacaaatacggtggacaaaatggagaacattcatcgaattccatgtacctttagcggtttatagaacccatacttttgtaaaaatccggtaccggaattcaggattggcatcaggccagggtaggattaccgcgatttgaatcccgacaccgggactcaattccgattttgccgggacccagatccccggcccttttttcaaaaaagcctcgatcgggaccgagaaaattccggcgggatgccgatccctttcgggctttagcagtttatgtgccaaaaagacttaattttcaaaaataattttttaaattagttttaggtatatcctaaaatgggcaattaatttgattaaaagttttcaatttttattgcctttttttgaattttcagtcactcaatgagcagtgaaatggacgaaaattcgttcttgaaaaattattggactcttcttggcccgtacaatcgcttccatcaaaagcatgaccatttgaagattgtgagtggaattcattattaaatgaggaaaagcatcggtccattcacatttttaaatgctcaatcaaatatttaaaagtgccagcggatcaatttgaataaattgcactgatttgagcattttgtgccaaaaactgactgttattatgaaattcttggttctattccaattcacgctttcgtccctcattttcaagataatctaaattttacctttaaaattcatttttttgaagggcccagcagatggcatcattcaccaattgttcggcactgaaacggccgatcatttccgcctcaaatcatccgtttggcctttctacaaaacactgatcggagaagaccaaggaccactaactgattcaaaacttccactgctggtcatccccgacaatgttgtccttttcacggcaccaaagcctgcgcatcatcggatcacggacaaaaaaccctctactgctgaagaagtgatgccgccggttgaacaacccaatttgttcaaaatgatgataccgttttaaaatttgaaaaggatttgcaactgaaaaagtgtgaacgaaaatgaatttatacgatatttttgagccggtaaatgcgtccactaacacagtatttttcaaataaacttctgctgtagattagtagaaaaggtcaaagtgtgcacgaatcacattatgattcaacaattcagtttttgaaatgtttaaaaaattttaagaaaattcgaaaaagaaaaaacatacagtaattgggtttttgtaaatttgtttcacatataaaatttgaaaaattactaaaaaaaaccgcgtaaaaaaaacaaatttaatgtattccatccactgactcattttgggcgccggacttttcgacagcaaaggacatttcgacagaaatatttaaaagttgaggaggngatttttcgacagt

SEQ ID NO: 16771 - DNA, 1135 bp, Heterodera glycines
  unsure (1)..(1135): unsure at all n locations
aaattcgatgcaattaaaattattaaatccaatttatgccaatctcttttatttatttttngctttaccagtgatcgggatcaattcnatggtgtgacacgtgtttgtcatgaggctggaatttggtggaagaaattttcgccgattttttttaatttaaaaaaattctttgccttaatgtccaggtcacagaatttccagatcaccgggtacacgtggcgcttctcgtcgtcctgctccgcctcgttgatcagctgctcccactccaagttgtgcagctcacggcgctttttcaactctttcatcacctggaaaaatttttgaatttttttttgaaatttttgacacctggaaaagccagtcggccattcggcccgggaactgggacatcagctcgtccgtgcactcgtccaactgcttgcattggcccaaatattccagatgaattttggcgttggacggattctcacagctgcaaaatttagggggaaaatttttttccaactagggggggggggtaggagtgaaaaatttaaaaaaaatttgcataaattttgaatgcccaaccaactcagtttcaaagtcactgcgctttttgcacacacaacgctggcgatagaggtggcacagcgaggcgaacgtttgattgttggagccacagacctcaaaaaatcccaaaatttttttttgaaatttttaaaattttccgttaggcccatttttatgctgtaatatctcttcggtaatactttagctggtgggcccgctttttggaaaaaattttttttcttataaaaagtcgtgaaaacatgtttatgtgggttttcggggtcggggaacccgaatcccacattcattttaaccaatttcgaatcctaggcccgaatttgagcaaaaatttgaaaattcaaattttttaaaaattttcatttttgttcctaaattgatcaaatcaagctaaacttagtaaaaaaaaaccattatcatcaaaaaatggtcattctttagatacgaacataaaatgaattttgaaatttttgaattttcaatttttgtttgaattcgggtcagggattcgaaattggtcaaaatgtttttccaaaagggggcccaccgtctaaattgatcacatctg

SEQ ID NO: 16772 - DNA, 1601 bp, Heterodera glycines
ttaattctctgctgaaaagaatggcaatgaaagaactgtatgtactgcttgaacaagatggattgacctcccgtttttcttcccaaaactttgattttctcatagaattccgaaatcattacaaccacgagggttacatacataaattttcccacttccttccctctatgttaaccgctaatgtactgcttgaatttgatggattgaactccctgtttttctgccaataattttgattttctcatagaatttcaaaaaaaaaaaacccctagggttacttatatacataaatttgccattttctctccctctaggctttgtaaataaaatttctttctccccgtcccccaaaaatgccgtgcctggtcaagcgggtcattgtccagctccgggcacttggtgatgcactcgcacaccgggcgccccttcttgtccaccacgcactccttgccccatccgcacacgtgctgatcacacgggtttggctcggaggctgaaaatttaaaaattttcgaaataatttttgaaaatttaccccgtagctgatccaactgctgttggtcgcgctcttggcgcggttcggcgccgccggcgccggtgccggcggtgcgactttcgtccaactcatccaaaatgctctcaagttcttcgagatcggcctggaaaatttaacggaaaatttaatgagaatttctcaaaaaaaaacctttttggccaacgccaagccgacgacgaacagcagaaacaataggacaaaacgaagcatttttaggctaatttatttacaaaaaaaaatattattttcttttttgtgaatttgtttttatttgcagaaaatttctaaaatttaattttagttaaatcaattttataaaatttaactcttaataaaggataatttttggtatttgatcatcaattatcattttctgatcatcataaattattcaatcgcaactgatactgatcaaactacgaacaatgctataatttagcttagaatttgtattgaaatgatgtataaattttcaatttcgaattaaactctcgagtttcgggaaaatttcggcatctctcaaacatatacaaccctagttttgagtaggccaatataattcatactaattgtaagtgattagacagttgattttttattttcaccaaaaatccaaaaaatcactctccccgatcattttggcactgaaaatttattgctcttaatttcatcctaaaatttgggaggctaattggcggaggataagcatgcagcagcacacaaatcgatgaattggatatgaatttgtgtgaaagctgttttgtgattttgtgtgacgacgattgtttgttggagatttagtccatctccgtccgtccgtccaacaaaatgctttttctcggccgagaaaatggcttttctcggcttttccttcgcttggcctccggcagccacaccaaccaaccaaacaacagctgtcacgatgtgtgatgagaagaaaaagcgattagcattaacatcccatcacattttgtggaggaggataaaaatgccgaggccaaaggctgtggaggcacccgaaaatccgcaaaaattttttctcggg

SEQ ID NO: 16773 - DNA, 2022 bp, Heterodera glycines
ctgcctccctccccaaaatattttaaaaaatcacagatattttgtccagtctatgaccaggtatgtaggtatcagcagatgtcaaaacaaacgccatattgatgatgatcagtgaccttgaaaagcccaaaaatattaatttttaaaatttttcgaggggggggggtagcaaaacaaggagtaccacactgggttaggttcaaggatatattttgtcatccctaaaatttcttgttatcacagtttaacacacttccagaactcaacattagccaagtgtcagaaataacccacaaataaccaccaaaacacgggggaggttaaaggttattctcatgatcgaaccaatttctaaaacaaattaatcggcctacgaatcagaaagttaactatgtattagactagtgtttttcaaatagattatgtatctatgtatataatttttaatattttttccctttaaaattctttattttatttcagtgacgaaacgttcggccaccaactcgtaaagctcttttttcaaaaaatcaacaaattttctcaaaaagcagcaaatcagcatctcatcaaataatcagttttgaccagggctcgcagatgaaaattttcaaaagcctcattcggcaagcaaaaaagcctcattttgggtcaaaaagcctcatttttacaaatttattcaaaacacgtttaaaatgttgtatttttgactgtccgtgactaatttgagcaatttttttatttgaaattagcattttgtgaaaatctgagtatgaaaaatcgaaattgatttttttttttcagcgcttttgccaaaaacttttagggaacaagggggtccggcggcgcctaactttcttttttgaaatgcaataaaattttcttgcattttaaaggctattgaatgataccaagaatgtttttaatttggtcgaccttaacaaaagttatgacatttttttttagtcgaaaaacagtacgagttggagcagtacgagttggagcagtacgagttggagcagtacgagttgaagctgtacgagttggagcagtacgagttggagcagtacgagttgaatttctcagggaatttcggcaaatttcaaacaatcgtattgaaaatagggcttatatttttagggttttgccctatttttttcatgagctcccagtgcaatgaaacgcacaaaaaacaagttgttttttttgttgttcattattttgtgcaactctaagttgttatgttttcgtacattttttgccatttttatgcgtccgatttatttaccgaaattgagaggtttttcttcataaaatgcacttgatcactgatgaattatgatcgtccggtcattttcaattaatattcatttcttctgcgtctgctcattgattttgttcttttgtccgtcactcatttgtcagcagaagacgtcccttttgtgatgctttgtcccgcttcgtcttcttcaacttcttccggtggcggagacaatggcctaaattaagcgcaaaattcaaattcggataaaaatcaaatgctttttttaattgctcacccaatgctattagtggtaccgaaaagccaaatgaacacattgtcccaattatcatctttctgctgcttctcctctttctccccaataattttgcatcgtttcattatccaatcgatgtcccattcatttgctttggccaatgtcagcttttcctttgtccattcgttaagaaattcaaatggcaccatttgcattgacagcgcaggaacagaaaaatgaatttggtaactgacggaagaaatggcattggcacggagaaaatgctaaacaatttggaaaacaaaaatcagtcatttgccaaaaatgtggagccacaccagcagggatggcacagaattcggatttccgaaattttgattttgccccccccccctgaccacacctccttgaaattgttgatccaatcagtgttcgtttgttcttgaatgtctttgcaatgcaatcgctttggttgtccatcttt

SEQ ID NO: 16774 - DNA, 4028 bp, Heterodera glycines
ccaattttgggctccagtacaattatgctggacttttcgtcttagtggtctgtgagttagtcaccaaaaggggggtcccaggttcaagtcccatgcatgctgaactgtattttgaggtttttaaagcaaatacatataagtgaaatgataacacagtatttaatgaagctcaaaaattaaaaaaaattttatttcctgtaaaaacgaagaaaaaccttttatcgaactgtgtctattcaaaatcgaattgttcttcttctccattgttttcttcgtccgtctcccgtcgaccaccaatttcttcttgctaaatcaccatcaatcaatgacattgataagcgaaatttcgtcagtttcttcttccggttgatcgaactcatcatgctcttccctctgatcacttcgtctctgaattattatatataaatttttaaataaaacaacagtttgatcaattgtccggagttcacaaatttcgccctcctgcaccaaatgatcacttctgcaactgcaaattggagacggaaatgttgtcactgcagaaccacaatgcccgatcattgaccaaataaaactgacgtctccgcccataaaccttttaattcagaaaaatggaaaaaaacaaattttaaaatttaccacttgactcgtttgcccgccaatgtgcctattccgtcaatttgttcccaaagtgtgcttccatagcgctccaagttttcgcggctatcctttgtagggaaaacggcacagacgaaattgtttgatggagaatttgaccgagcagcctggctgaatgagacggtaatcttcgtacaactctggccatggtcgccgctcagctttatgtagatttcgtcgccaaatctgatcagattgtccttggcagatgaaagacgcgcctccagagctgcctcaacatcagtgcacacaaatccaacacctgcactagtctcaattggtgcgtattgcaatgacccacagatgcggcgtttgatgtcaagcagctaacaatattcaattgaatttttaaataaatataaatgctaaaatttgtttttactttttcgagtggcgggaacacatcaaatttggcattgatcaggcgaatagtgttttttagtcgtctgtaagccttctgtgtaccgacaatcctgaggatcagaagagcatcctctggatcaactgacttgttttatcttggcagttgttgtttcttcttctgtggcgtgtaatgagcaaatttgtgccgaacttcccgactgatccgttcgagggacgcccggctggctgagcgtgatctgtcccgttttattacagccgcgatttcatcagccaatttgcgacgtgaggtgcgctgcaaatgatcgacattcatctttggtcgtcctgttggagttgctaaaattaaaaaagagaaaattatttgaaaaagataaaaaggggattttagtttcactcacttttgctggtggtcggtgtctccatcggtggtgccatcttttcctccaattgacggcgcagatcagcgatcattgcgtctctgttgcggacctgcagtcgtagaaagctgatcgtttgttcctgctcctccagctgtttgtccaactgctcggtttgtgtcgcggcgtcctcatatgccaagtccacgtcagttgccttgtccatcgttgtcaaatccatgtttgttgcattgtcggtagttgtaaagtccatgtttgttgctttgtcggtagtttctggacggacacgcacatggtgcctgaccggagtcgctgacaatggccttgggcttgaacgcgggccttaattaaagttttgcttctaaaatattgttttttattgacttacgaaggtccaaagttgacgttgatggtccactttcggcggcttgggtcaatgtaccctctccgtctgctgttgtctcggcttcggtctgctttagcgctgaaaaatgcagtgttttaaaataaaattaattttggtcaattttcgtcactttttggcgtcgagccgccttttcttccactttccctgcgccattccttccgttttcgatttgcttcggtgctagaacttctcatttccttgaatttttcagttttattacgtgtaagtaccatttttagctctaaaatactgaaaatttattgaaaattcgcgcagtcgtaaaattttttccaaagttgcgattttcttgaaattttgcataagcatatattttaaccccatttataggataatgctttgcttatttaccaaaatgctttttaactcgagatcggctcttccatttttacaaggcaaaatccccaaaaaattttaagttttgcaaagttttggcgttctgattactaaataaataaaaacctatttgcactgagagcacaaaattgggccgctgtgtaaataatatgtcgtgtggcggacttgaacctccgtcccatttcgctttactatcttgcaataaaccactgtgccacacatgtctcttttttagtataggagctgtggtgcaatcgtgtttgccaattcataaaaatggcttttggtgggcacattgcaaatattgctcgtgagggtatttgggcttctttgactggtggatggtattacgaacctgcgaattctttattttgcaacacacttcatctgtacatttggtcgcttttattcgtccttccgattctgttcggtctttctatcaacgggtccaacgaacagcacaattacggtcatgccatcatttatttgtctctcctcggcttcctttttgtgttcatcaaaatgtccgttgcttttctccatcacatatttgacacagttcagcccatcaaatataaatcaaaaaagaacaccgacggattgcaagacgaatcccaggtttgtatttattttctaataacttgtttgtttcttcataatttcattaaattttttacagaaatttgcccgtgggactcgcctttctggctcttcgatcagcgccactcgtccaattggaagtagtaacgcattggaagcaattgaaatggtcgacattcgcaggaacattaaccgtttgaggaacgaagctgacacagtgaataacgaacagagtgatgggtgtaaaacaaaaatggacgatgaaaacactgagagagaaagaaaagggtgtgaattgattgattcattagaaccgaaaagactaataaataaatgggtctaatgcactttatgagtccaatcgacttttatgagtccaatcaattgttagaaccaaatagactcacttgaaaacggattttgtttaggaatcgggaagcttattaccattcgttgccttccttcggtcattcaaatagaaactccccgtcaaaaaataaagttgacaacaatcaaaatgacgatgcttgctcctcgaggtcctcaacctcggcttccgaattatgttcagacaatttcctgcccaacccaacgaacagaagacgaaaaggcagacattcggttggagttgaattcgcaaacactgctgacagttttggtattttatcaaaggacagttttggtattttatcaaaggtactgattggtgaaaaaacattatgaaatacgcttttagaataatccaccatttccacaacaaaaacaacgcaaattttctgaaccaattgggacgaacagagctaacgccacacttaaaaaacactcgccaggcgaatggcacgaaacatttggacagaattggcaaagtgaaagacgaaaaaatattcagaaagcgaatgaaagatcgacacttctgaggaataattcgacgaagaacccaaaagaactgagaaggaatacgatcagggaagatgaggttggaaggactcaaaaaaaacaattcaaactttaattgtaagataaaacgccgtgcaaccaatttggccttgggagtttttgttgacggaatcgaaatggataacacaccgaaccaaagaagggaacgtgaatatttgttaagagatatctttatgagtggcgctgaaatgaatccgtcgtcgggtttt

SEQ ID NO: 16775 - DNA, 2072 bp, Heterodera glycines
atgccatttcaacgatcgaatctttatttttcggcatcttctttgctggagttcaaattttgcacgaaaaagtgaaaaaaaagtcacgaaaaaagtcaaaaatcccagaaagtagaaaaaagtcaaataaaaagttagaagtttcaaaaaagtgtagaacactcattttaaagccatttcgattcagaaaaaaaatcatttgatacagtcctgttgaaatacttgttaaagataaaacggattaatttaattgttcccgtttacccatttccatttattgtaacttatttttatctcaaaattaatattttcagaagccttttacttcatttcctcagataagtcttgaaagaaggatattttacctttaatgatttaataattttattttaattattttaataattttctattttaaaatttacgaatatcgaaaatttagtgattttttggttggtaaaacgacaccaaaccaaaaatgaaggacaaatccttaaaaatcggaagctcgaactttatacatgctaatgtgtgccgaaatacattttattaattagacaaaataaaaatataattttgaaaatcaatccgatgcaatgcattgagttataatttaaaaaaaacatattcattaattgattgattttatggttgtcatttttaaatagatttccaccattacaaattattgtaaaatttagataaatttatatttccctatataaaaaaataatttaattaacaaaaaattaatttttggggtttttataaaattataaagcataaaattaaggaaaatagtttattttatttttgttttaaaatgcattttctaattctcgtgcaaatatttttaatttgctttacaaatacctcgttgaatttgacattgtcaaatctctttgaatcatgcggaaaatatacagtggactcgctgcaaatgaagctccgctacaactcacataatcggagcagtccattagaaatttggatcagcagtgaagatgattttcctggcccacttggaatggtacaattaaaattttaaaatttagtggtatatttttcgaaatttggaagataaatccgttgggataaactttaaatttatttttttacagaaaattaacattataaatccaaaaaatgcaataaactaaaatccaccctataaattccataattcacatattcagacatcgattggtttttttgtggacaatgatggcgtcgtaaaatgtgcggctgtcaacttttttaaaggctacgaagggagaagaattatgacaaaaacccgaaatgttatggaacaaattcaagcaagattgccaagattccaacggcaacacatcatcgaactttatgatacgtaagtattttcgaaatcgcataaaaattgatacaaaattcctaaattttaaaaaattcggagggcggaaagctctttcctaggtctcaaaaaaaatcggaatcagaatgattacacggtgactcattaaatgatcggaattaaaaactgaatatggatctcatctcaagggatacatttttagcacaaaaaatcgcgaaataggacctaaaaaggaagaaaaaaaacaaatatattttcggatcaattttcggtaaaatttttcaattagcgtgttttttctgtaaattttcgggtaatttcttaagggtgtattttcgttttttttgcatttcgggtaatttcttaagggtgtatttttcgttttttttttgcatttttgttaaggatttttccgaaaaccctgaaaataggcgccaaaaattgcgaaataagcacaaataggcgcctaatctctgatttagaggcaatgctttgcgttttaatgaagaaattttgatcatggagttgagcattgaaacttttcatgatcgactgtacaagcgcattgattcctataagaatgaccaagaaatgcagaaatatatccggcaattaacacaaccaatcatggaattgcatcagggcacatattatgctaattaaacattttattaatcatgtaaaatttttaagtggcaattcatatgaaaatcactccatc

SEQ ID NO: 16776 - DNA, 2020 bp, Heterodera glycines
gtgactcattaaatggatcggaattaaaaactgaatatcggtatctcatctcaagggatacatttttagcacaaaaaatcgcgaaataggacctaaaaaggaagaaaaaaacaaatatattttcggatcaattttcggtaaaatttttcaattagcgtgttttttctgtaaattttcgggtaatttcttaagggtgtatttttcgtttttttttttttgcatttttgttaaggatttttccgaaaaccctgaaaataggcgccaaaaattgcgaaataagcacaaataggcgcctaatctctgatttagaggcaatgctttgcgttttaatgaagaaattttgatcatggagttgagcattgaaacttttcatgatcgactgtacaagcgcattgattcctataagaatgaccaagaaatgcagaatataatccggcaattaacacaaccaatcatggaattgcatcaaggcacatattatgctaattaaacatttaattaatcatgtaaaattttaagtggcaattcatatgaaaatcactccatcaaattacatgtacgtttctgtgaatgacgaacaaatattgaaaattaaaaattttgaaagtgcaaaaataattgattcgggcgacaaaaatgaaagttatctgtttgaaattgacgcagtcgaatcattcacatcattcaactcagaatatatgggcccagagaattatgcacaaacgaaagaagttcgtttccattttagtatatcctgaattagagatctaaatatttagaacggacggataagggtacatacttatgggctaaataacgtgtagtccgtaaaacccgtcatcggctgagaaagacgtgctacgggttcataaaaacccgtataaggtttcattgcggccccagttattcggtctctatccagaacagagtcgtgcgaaatttcaaaatttaacatagatttaattttatagtttaattaagttttggataatgagttcatgaaataattttttgaaatgaattacggttactattaagaaatgtttctgattgaccaaaatgctcttattaagatttcaacaaaatttgacatctggtctcttggaatgattattattgagattcacgtagaccaacttcggttcgcagaaggaaagaattcgttaaatgaggtcatttattttcatgtgattagagtttggcctggatctggatcctgccgggccttgattcttcctggatcaagatccagaccgtttttcggcaacctggattttccctggacctgttttcctggaattttagcaagaaacaggttcaagtccaacatggaatcaatgtcaaggatccaggtcaaggatcaaggtccaggattttccatgtcgaactcagcgtatgattaaaaaccttaaaattatttttaataggcaaatcgaagagtttaccttcgcgaaatcggttatttgtaccaaggatttgaacgaaacccaacattggactccattggcttaaataaaaatgaagaaattttcaataatagcgcttggataaagcaataccacaaagcaattagcattgtcttacaattatggcgcaattttcccaaaacggcacatcttgtcactgtttgttaaaataataatttaaaatgttttaatcgcctctttatttaaaaaaaattctgtcagttttaattaaggcttcaaatgaaaaataattaattaaatattaaaaaataaattaattctaataaatgttaaattcattaaaatgtctcaaataatatttataaaacaaaagaatctgttgcataatctacgggagcttcgattgactgcgcgcggaattttggactatttggacggattgtgtttccctgaagaaattaagcagattaaaaatgccaaggaattgcgcatcttcaaaacaatggaaattggagagttcaaacgacaattgacgaaaaaaatgcgggcgaaccgtttgaatttgtggcgaaccgaaaaccgagaaatgatga

SEQ ID NO: 16777 - DNA, 2258 bp, Heterodera glycines
  unsure (1)..(2258): unsure at all n locations
tagatatttattaaacntccgaagaaaaaaaaagtaaaatgttaaaaatcataaaagtaaaaattgttaaaatcataaattcaatttccatcggtatcatcagtttcttcctcactgtcttcatttccacggatgtgaagtccctcaacaaagccttgcattacaagtccgatcagattcaaggcgtttgtcaatccttcttgcgattcaaagtcagcctcgtcaaggatacgcaccacattttgttctttgatgatgtaccgttgtcgtcgttttgtgcttttctggagacgttctgctcgtccaatgtccagttgtttgtcgatgtccttgatgaatgcagcgatgaaatcactcagtgacggatgatgattgagttcacgctaaattaacaaaaaagtgtcttccaacggacaaatttttactgcaaattgtccatgcgcggcttccatgccgttgttcgttcgctcaattgccatttgagccctggtgtacacattccaaaacgagatgggaagcgtggaggacagacgatgtcttgttcccagcgtggaataagctgcaagctgctttcttctgacaatggaatggttggagttgaaggttgtggcgaatgcagtccgaattgtattggtccactgcctgtcattatggatgcctgggaaatactgaacgctaaaattgaaaaatttcataaatttcatgacagaataggtgcatttacgagttgtgcttcgagtgcgacgcagaagaaagtgtccgacatcagcatgcggttcaaatgcctccgccccgcgatcaatctcgaattgagtggtgccaatgtaggttttggcaaaatacgccagccatccttgaactccaagcggtgccgcgctgacaatagttgaaaaagcgcgccgaacgtaaagtggcggaatgagtgccaaagagagaacagatctgattttgaaaaaacaaataaatacacataagctaatgaaagacacctgaatgttttgtgaacggatttcctttgaaccggtgcttcgtcgtcatcttcgttcaacaaattaaaaatgcccatgcttctggcttttcggaacaccgcttgcgccatgtggaagctgcagcccgagcgttcgcatgacgggaagacatgacgcatcgctttcagcattccaatctcgaagtcgctcatcacttaaaataattattaatgaagataatctgctgtttttttgccttttatgggaaggatgggttcaacggcacgcttcaactgttgaaggacttctgtgtaatacttcgaggctttaccaggtagcaaggcttgcgctgcaaccaccattcggttgttgacataacaaccgatgacgaacacttgcatccacggctttggcgcactgcggaatgtgccgtcgaggctccaccgacgattctgtttgagcactgacaacagctgaaattaaactaatttaaaaaatgacataagtataggttgacttgccttgctatgactgaaaatcaggacaacatcagattgtccagtcctcacttcacggctgtcataaatgaggacggactcatcattctttatcaaaagaccaggcggaatttgtatgttcagtgggtcggcacagttgacaccaccaacgaatttgttctttgttctaaatattgcatcattattttctctgaagtttgtctacctgttcgccatttggtcgagcgcttcattggtgccgagcaattcgaagacttcatcgtcgatgtcagtccgaatttgagcgcggatttgacatggtttcatttttggctcctccttgatcaggcgcttcatctgatttcgtttcgtctctgcatcataacgcgatggtgcgcaaccatggtgatgtccttttgcgcccagaatgcctgtcatcaaatcgttgtcgtccaatttggctgtcgctggacaattgcgctgttcgcacctgaaccagctaccatcttttctgtttttgataaatcgaaagcctggaaataaagaaataataaaaaaaaaaactattaacaccttgataccaaagacaaagagctccccggattgtttctccacgtttgaattgaacgggctcacaattttcttcgtcatcactcgaagcgacgcccaaattgttcctggttgaagtgccttcaatttgttgttctgcgtcctcaacattcagtacgctgtcttcatttgcagcaatgcgaggcttttttactcgcttttgcagactctcaagtatttcgcg

SEQ ID NO: 16778 - DNA, 1278 bp, Heterodera glycines
  unsure (1)..(1278): unsure at all n locations
gcctacctaattaaaatgatgagnccggataaactgaattagagtgaaaaaagaatatttttacaaatctccgtctgttttttgtacaaaaaaaaaatgtgatgaatttctgtttcaaaatttgtttctgaaatgtgtataaaaagcgtaaattttcgtcatttaatgaagaagccttggcaacaaaaaaaaaaatgaaaattttaaattcttgaaaaatgttcgaatccgggtttagggttccaaataaagcaattattgatcaacatggatttatgcccgagttcagaaataaatcccaaatttcaaaatttcagtgaatgcgagagttggaccattcccgaatttgccctacaatcgccccccaccctgtcctgagaatttccatatcaatgtcgcagtgatgtcattatgcaaacggaaatctgaccncaattttaaattaatcttttattaccacgactgtttttgtcaatttcgcaattctctcctaaaatccattcattcggttacaaaaatttgttttgactagggctcggatttttagcttttacctaaaaattgcttctaaacacgttaagctttcgaatgataccaacaatgttggatttggttggcaaagaaaaaagttatagttcgaaaacatgctagggccctgcttcatttttctcgaaaaaacttcaaaatttaaagttcaaattttgttaatacgaaaaattaggagttttgccgattaacgcaggtttttcaataacattttccttggcccaatccgtccgtccattccttttcccacccctccgcgacggccatttgcatcttttccctttttcttccactctctcatttttctgtattctctctactcctttgcatcttttccctttttcttccactctctcatttttctgtattctctctactcctttgcatcttttccctttttcttccactctctcatttttctgtattctctctactcctttgcatcttttccctttttcttccactctctcatttttctgtattctctctactcctttgcatcttttccctttttcttccactctctcatttttctgtattctctctactcctttgcatcttttccctttttcttccactctctcatttttctgtattctctctgcactttgcattgctgatgtatccatccataaactgtttccttgttctttcgcttcctccctctcattttcttatactatttcacttgtttttgtatnccatcccatccgctgcgcttattttgggttt

SEQ ID NO: 16779 - DNA, 1328 bp, Heterodera glycines
  unsure (1)..(1328): unsure at all n locations
tcattactttccctcttccaatttgccactctctccgactactttccctctttttcttagtcactctctccgattactttccctctttttcttagtcactctctccgatcattactttccctcttccaatttgccactctctccgattactttccctctttttcttagtcactctctccgattactttccctctttttcttagtcactctctccgattactttccctctttttcttagtcactctctccgatcattactttccctcttccaatttgccactctctccgattactttccctctttttcttagtcactctctccgattactttccctctttttcttagtcactctctccgattactttccctctttttcttagtcactctctccgattactttccctctttttcttagtcactctctccgattactttccctctttttcttagtcactctctccgatcattactttccctcttccaatttgccactctctccgattaatttccctctttttcttagtcactctctccgattactttccctctttttcttagtcactctctccgattactttccctctttttcttagtcactctctccgatcattactttccctcttccaatttgccactctctccgatcactttgccctgtgcccttcccacttttaccttacacaatttgctcaatgccccctcctccttcgtcctttccttttgttctccatttttcgctttcttcgcttctcctcttccccaaagtaatgccaaattttgtcgccgttctctttgtcccttcgcagtcagcgacaaattcgaggcgacacggcgaattcggtccattatttgtactgtaaagctgaaaaaagtgaatggaggaggacactctcccccctttttctctccctcactctctccccatatctctctctccctgttttccctcatcccctcactctctcctcctccctttgctctccctcccttttctttccctcactctctccccatatctctctctctctgctctcctttttcgactgaccattcgcattgtcattgatcacagcgcgacaaagtgattgtgaggggatattttgttgctttttgagctgttggacagatgaagtagacttagcacggaaaagcagggacgaagagaatggagagaagtgaacgcggagggaagaagaagagaagggaaacagacggaggatctaaatgagagagagagaaagaaggagagaaagagagagagtgagaaagaagggaggggaaaggggagacaaggagggatgggaggngagacaaggagggatggggg

SEQ ID NO: 16780 - DNA, 1438 bp, Heterodera glycines
gggaatttcgccccttttgcgacggtacagaaaaaacacagtgaaacactccctttgagcagagaattaattgtcagtggtgggagaattagggaaagagaccaaaagattgatttgatggaggtcaattcggtagggttgggaaagttcgtcgtaaaaagtttacttttttaagtcgaaaaagagcaaaatgaatggggggaattggcattcttcgttaatgtgaggcaaaaaaaagggaatgggagagagagagagagagagtgagaagggaggggggagtgatcgatcgattaggaaaagaaatgcgatgaaaaagggagggagggagggcaaatgaatggatggaagaaagaagaaggggtgacgaacaaacgcacaagcaaatattaaacagggagagaatgggcaaagggaaggggggggggagagggacccaactgaagatttgggaagagttaaaatggaattgaaaaataagagatttatcaaaaataaaataaaatcaaaaataaaataacaaaaagcaaaaaataacaaaactagtaacaaattattcaaatcaattaaaagaattagagattttaaaggacagtttaaaaggggaaaaggcaaaatgaataaaaaaaacataaacaattagagacttttaggatttaaatttgaagaggcataaattatgaaaataaaacaactgaatttaaacaattagagattttaaagaataaattggaaaaggcacaaatgaataaacaaaaataagagcactgtttcacccgcgggacatcaaaagttacgacgaataaagcgattggataatttatcgacggaaaaaatagccatcgttggagaaaagaggcaaagaatgacgaggagaagagaattgatgttgaacagatggagaacgggaagggggaacaaaaaggcattcttgctggtgatgggagtgttgggaaccgcgaaaaacggcacgccgaaagccatgaccataaggggacgcggagaaaatggccgaactcatcggaggggagccaaacgatggagcagagcagaaggacgaatttgaagaacgaccgtccaaccgagtctttttgggaggcgaagatcgatcatcaaatgaagaattatgacgacgggaagggtacgaaggtgccgaatagccacaatgatttggaaagtttggcgcattcgaacgttcgtcgaacaccgaaaatcggtcagcggaatgcaaaatggcggacggaaatgctaaaacaatgaataaattgggcagaaaaacggatggaccttccggcgagggcgtactcatttggttttcgctcaaacctagcggcggattataagcaaatttgttcgaagaatagaacgattgagaaaggttgggccgattctcgggaaatcggcagaacattttgggcggtatttttgaactgctaaa

SEQ ID NO: 16781 - DNA, 4110 bp, Heterodera glycines
ctgcaattggacaacggataagcttaaaagcatttgattcatcttttgacagtgccaattgctccccggtcaattcgttggtcagttcaaatggcacaacggcagaaagcgaataccacggcgaaaagtggacaaaaatgatgaaagcatcaggagaagaagcagaggaaaatgcctaaagaaaaaagacaaaaaagtaacaaaagactaattaaagtggataaatcaccgctttgatttgttccactcgttgccaaccattggttaaccgcttctgaattctcaactctgagcattttcggcaaattgttgggatgaggtgagaacacccatttggtcaccgctcggccatccgacgcattggcactatcatcaggcggaaattcaagcaaaatgtcggaaaagagagagacagtttggaggcacggacaattgcacagaatgggacggggcaaattgacgcattcggcgaaaaatgacggggctcaaaatcatttcgtgaattgggtgcttgaacattggccaaatggtgagcacaataaactccaaaatgcgaacattttcagtggtaatgtaccatttcgtcgaaatgacggcgaaaaaacgatgaaaatggtggagaaaagtgagcacattgtagtcgatgaagctgcaaatcagaaagtatgattgattgaggtcacagatcatttgaaaatttcattttcttacaaaatctcaatgcttctgaatccgatgactttgttcggcaacggattttgagggattggcaatgcttttccttttgaattgataatttccatttcatttgttccaattttgcatcgaatttccaatttgtccaacgtccatttgcgcgttttgaagtgttcatcaacgcggcggtcaaatcggtgactgatcagtgcaattccatggccaagctggtaaatgggcagcaaatcgaacacttccagccaacagtcggcagagatgaagctgaaaaaaacagattgattatcatggaagttcaaatttagattaggtaattaagtagctaattgtttacatcgctttttccatttctctctcagcttccttcggattgtctgacattttttgaattaataatcaaacaaaaatttagaaaaataggcaaactgaaaaaaaaattgacaaattaaaatggtacttgtgtaatttataaatttataggatcatttgctaaaaaatatcagtgtttaagcccataaatgcagggttacccttgaaagtttcccgaaataagagcatcgctggtcaaaaataagattttagggtcaaaaataaggacattttttaaaacacgcttccaaaactttgaatcgcttttttattcaacaaaatcaagcattactcaccgccaacctattttctgagcaatttcggcttagaaatgagaaatttatacatttccgaaaatcaattataagattttaacaattttgtcgaaacataagcaattggtaaatttcagtgcatttagaatcaaaaaaacatatttttaacaattttttcggcgcatttttccgaaaaatttttgggtatgggtgagggaagagagttcggcggtgccgataggcgccgccgagggaaatttttttaaaatttaatgcaatttgttaacgagctctgtccaaaaaatgaccaaaatttgcgatcttgggctaatttttaagaaaaataggagttttggggggccggcggtgccgataggcgccgctgggggaaaattttaagaatttttaatgaattttgttaggaattagccaaatttttcagaaatttcctcttttaaatgaaaataagacactaccccaaatcagaacatttcttagaaataagaacagatacacccctgctctaataggcgccgccggaaaaattcttgtaatttttaatgcgatttcttaacgattttgttcaaaaaatgacaaaattacgcttttgagctaatttttttaagagaataagaaaccgccgagagaaaaatttgaatacctatttaactgaaacttgttaagattttgcatattaattcgcttcaaaaaacatttctttcaaaaattatcattaaaaatctaaatttctccctgaatccaaaaaataagatgaaaataaggacaaagagcttaaataaggacaaatcttacaaataaggacaaagggtaaccctgtaatataggcataactttttgtgctgatcaaaaaattccattgcattaagcatttgttgttaagcagctactttttgagttattagcacctattttctaggtcgggtcattccaagtcacttcccaagtgtaatgcatgccaatttccaagtacataacgggggaactatggcaaaaaatttgtgactttttgacgcaaaaatatgctacaaatcggggcgctacgttaatattttagtataaaaaggcccttgtttcttcttctcctcctcattattccattcattctcccaatattctccagtcattttgttgctgcaaatgtcttcagaaaatgaaatgtaagaaattcaacaaaaaatttgaaaatttataaattctcccaaattttcagctttatctgcagcgattgttggcttttggtgttcgattttcttgcgccttcccaacttggccttggaattgcactgatcgagccgccgctttgacttctacgtggatgaacacttcgagacacgcaaatggaaattgaacaaacaatttcttattcaatgggacattcaagaaaatgggacgaagaaaatgcaaattgtcaattccgatggaaatccattgccaatcccgcaaaatccgttgcccaacaaagtcatcggattcagacacattcagatcatgtaaaaattgattagatttttcatgccatcacattttctgcttttcagttacatcgatcaaaatgtcatcacttttctccgccgttttcaccgttttttcgccttttgttcaatttacttggacattcgcactgaaaatgttcgcattttggattttgttttgctcaacgttttgccaatgctccgcgactccattcgtcttatgcttttgaataccatcgcttttcgccgtttgcgccaattggccccgtcattgctcaacaattgtccattccttcgcgctgtcgtgtttgaagacgccattttccccgcttttccgcccgatgacagtgccaatgcgtcggatggccaagcggtgaccaaatggttgttcacgcctcgtccggatggtgtgccgaagtggctcacaatcagatcctttgtggattcaccggatcaatggtcgtcaacgatggaacagctcaaagcggtgattatccctatttaattggcttttctatgattttttgtccgctttttaggcattttccaatgcttcttctccggtttctttttgtattcactttctgatgtcttctccgcttgacttcattgttccatttgatctgatcaacgaagtgactggggagaaattgtttcttctacaatctgaaaatgatttttggctcatccgttttcaaattggatgggatgagcgaaaatgggacaatgtgaaggataaactgaaaaatcgaacgaacccaattgtcattcggatcaaagatggcggattcgacgacgggtgaacaatttaaaatgcttaatcattttatgagtccaatcgtcgacctttgcttaaactttttgctttcaaatcgtatccaaaaaggtacggtttgttttgaaatggacagaattatggtacaaaaaaatcaaggatagtcagttggttggactcataaaatgccaatgtcttttaatttgcaatggaataatcatcgttttttcagtcttctcgacgacgcttctcccgggccgaatgatcagcagcagaaatgaatcaattaattaattaattggtgtaattatgtgaccgaaattatgttggcactttgccattaaatattgtctatatgtatgtatttgacgtttgcttgctcgcaaatgcgtccatttccattgtattttatgtatatatgtatatgaaattcattgtgagtaaattaatcgttgataaaatggctaatataaaacggtaaaag

SEQ ID NO: 16782 - DNA, 2576 bp, Heterodera glycines
aaatagtgaagaaatagtgacataattttcagccaaaaattaagcaaaaataatttttattcactgattgcattgcaaatgagtaggactgggatttttaagaccaaaaaacccaaaagagttacctaaaaaaaaattttaaaattaaaaatttttgccaagaaagtaaatttttgagaaaattttttttcatttcataggagtatattttgaaaaattttagcttgattcttaggggtgtatttttttgaaatttttaggggtgtattttttggctttattgcatttttgttaaggaattttccaaaaaatgtcgaaatagtgaaaaaatagtgacaaaacgccaaaatagtgaattttcactattttagtgacgaagtcgccaaaatagtgatttctagggtagcaacttttagtgacaaaaaatcccgaaatagttaactaaaatagtgagtaaaaatgccaaaatagtgaagaaatagtgacaaaaagtccgaaatagtgacaaatagtgacataattttcagccaaaaattaagcaaaaataatttttattcactgattgcattgcaaatgagtaggactgggatttttaagaccaaaaaacccaaaagagttacctaaaaaaaaattttaaaattaaaaatttttgccaagaaagtaaatttttgagaaaattttttttcatttcataggagtatattttgaaaaattttagcttgattcttaggggtgtatttttttgaaatttttaggggtgtattttttggctttattgcatttttgttaaggaattttccaaaaaatgtcgaaatagtgaaaaaatagtgacaaaacgccaaaatagtgaattttcactattttagtgacgaagtcgccaaaatagtgatttctagtgaccgatgatgacatcagaatcgaaaatttttaatgcagaaatgcgttttttaagctcctttcttcaaaacaattgagcaaaaaaaaagttttttcactaaaagttgcggccctactcattatatagttgagcatcgcagttttaaaagggtacactctttggttttgtcgaccctacataatctataaaagtgctgaaagtaatttttgtcagattcgtgatcatcacaatcgaatttttagggaccactattctgcaacatagctaaagtcaggacaattcattaaaaaaggacaagtcataggcttctctggctatagtgtttaaacaaattttcatgccccaagggcgaaaaatccataaggattctacacgtccggcatccatttcgaaccccgggcttcgagaactgaattgggcaagtccgcgttcagattcgtagtaagaaccttcaaaaaccctaacatgtttttgagtccaggacaaaaaaaggttaaaattaggaaccgaaatccgatctgcaacagaacaaaaacaattctttttactcaagtctggtcagttgtatccaaatcttagaaatttttaggggaccggcccgggaaaacaatatgcaaccattaaaaatatgccaatgataccaaatttactcgaccgatttaaattggttaaacaaaatcggtgtaaaatgaaaatgatgtagattgacagcacaaaacaatataaatccaaaataaactgatcatccatcttaattctcatcattcggctgcagcattgttgccggttcgtgtttcgacttaactcgaagtgtacaatttaactatttggtagatcttactgtaacttccgacgtcaatctgatcagggagttcagaaatagtaacgtcaaaacgatcttgcacactgttcaacgtttgagcatccgtttcatcagagacgaaagttatggccaatcccttggtgccaaaacggccagctcgagcaacctaatttaatttggacgacttagccattcctttgcttgttgcttactctgtggaggtacgtgtcagtatcctctggcatgtcgtaattaaacacgatattcacgcgctctatgtccattccacgaccaaataagttggtagcgacaagaatgcgtttttggaagtccttgaattgctggtagcgcgccaaacgttcttcctgtgccattgcacgatgaatggcgatggaggggaagttctgctcgatcaacagctgattcaatgcacgacaacggctgaccgaacgaagaaaaatgacgaccttagcatttgtaccgattaatatgtgtaaatacactgggtaaaacctggttgaactccaaagcatccaacaagtccaacaatttgcggttcttctcattttccttcagcctcacataatactgttgaagtccgtgaagcgtgagcttagcctcatcatcgacatacacctccataggctaaagtgttttgaatattaggataaaaatgcatcattctcagggaagaccaagaaagacattgttaaaaagaatgagactaatccttttgttggtacttaaaaacggccaacgtctttggagtttgttggatcatctgatccttttttctccccacactcaatttgaaacgcaacgtccgtctctctctctttgagttagaatagccat

SEQ ID NO: 16783 - DNA, 2451 bp, Heterodera glycines
gatcatctgatcctttttctccccacactcaattgtgaagcacaacgtccgtctctctctctttgagttagaatagccatttgaggcacccatttcgccgagcaatcgcacgatttctagaaataacaataaaggaaacaagagaaaaataacaaaacctcgtaacaattactccgcttctatcatcagcaccattcaaaccggacagattggtatgctgatggttcgagagactcaaattgacgttgagctccctccccgtgtcgtcagttttcatggctcattgaatagacaacgaacgggcaattgttgagaagaatttatgcaaaaacaaggcctatccgaacaccgccgattcgaagaggctaaccgcagcaaagaaggaaccgaactactcacttcctgcatgaacttcttgcagacaacgcgcagctcccgaggcaaagttgcactgaacatcataacttgcttctcctgcggcgtcattttgaagatttcttgtacgtcgtgacgcatgtcttaaattgcaggataggaaagaaagttggaaaagtcgtaccagcatccccaatcattttgtcacactcatccagcacgaagaatttgactcctttaagcttcagatgtccagtgcgtcccagtgctaaaaggcgacccggcgtcccaacaacaatgtgcggagtgtttttggccaggacctcctcatctttcttaatcggcataccaccaaaaaacacagaaaccttaacccggggcatgaaggctgtaacataatttagtaaaaaccttcactcctggcatgtacttgctgaaccgctcatattctttcgaaatttgaaaggcgagttcacgagtgtgacacatgacgagaacagagactaaaatgtgctgcttaaaaggagcttaaattgaaatgtcctacccgtgccatcagtcggtgtcagttgttgcaaagtggcaagcacaaacactgcagttttacccattcccgatttcgcctgacagacaatgtccattccaagaatagcttgtggaatacactcatgctgcactggaattcgattaacaattattaatgctccttcgtgtgttccctctgggcccgttccagacaaaaagctttttcttatgtaatcaaccttcagaagggtgctcaaatccacaatcaattatcgcacgaagtaactccggacggagcatcaaatctcggaatccgctgctgtgaatgctcgcataattaccctaaaaggtttgatgaatttttgagtcagttactttttactttaattttctttgttgcatctccgtttgttgctgcatcattttttgattgttgttcctgagtctcttcttgttcttcctcataatccaaaagttgttcctcgtccattatgcggaaatagtaagctcaaacaaagaaagcgaaattattgaccttaaaacatcatgtgcattgttaattaaaaaataaaaagtttttgcattgaaacagctttaaattgtaatgcatatttacaaaattcataaaagtatatttgatactaatacaggctaaattgttcagaaatcgataacataaatatatgattaaaaatgaatactatgtagtccataaaaaatgaaaaagctcaattttgcactttattcagccttcttgtaataaagaatactttgggctatcgaatgataccatgagtgtctaatttggcaaaaaatttccaagtgattggttatgagcaccggtcaattattttcatgcaaaacaagctcgtcgtcatctcaaatttgaagggcaaaatcgttaaaatcgggctttttcttttttttatggaaccaataatctacaatcattgccaaattttcaccaccatttcccaactgctggatcgatcagcttttttacataaatgtatttgcatgtaaaaaatctcaaatgaaaatcgaattttgttatttggcatttgtattgcatatactcctacaatttctttagtgcgtatgggtacatctttttattcggtgcgccaatccttcgtttggtcgatgggttaaactcctcactcgttccaaaaaagtgaacaaaaaatatgaagatgataatgataaagaagaggagaaagacgaatgcgatcagatcaggggaccagctggaagagggcggacgaagcaattggagacctgggggaggggggggggttgggtggaaggttggctctagtgaactttaggcgtccaatgaacttttaggcgtccattgtccagtttctttggccataacttttttattatttcgtttgataccaagaatgtagggattgaccaagtaataaaaaagttatggtcaaagaaactaaactttacgcctaaaagtttatttcatgcctttgttctgctttaccggttcgttcaacaacagccgtaaggagtgaatcgcgcacccattccaaatag

SEQ ID NO: 16784 - DNA, 1859 bp, Heterodera glycines
aaaatttttccgggaaaaatacccttaaacttgggttaattaaacccaaaattttgaaaagggggaagaaatttccccaaattatttacagaaatcccttccccggggaattttcacaaatggaattggccccggggaggggacaggaaatggagggcactggggccacaaacaaaaatcaataaccggggggttaaagaatgatcacaattggggggccatcacagttaaaggcaaatgaggggcggggagagaacggcaaaaattgccaaatgaaatttggttgtgaaattgggggcatttttgagccgcttaaataacaataaaattagataaaaagtggcaaatgtgagcagaacaaaatgggccgaaaatttgggcacaaaatgaaaaacgggggacaaaaatgaacgaatgaacaaaatgggcggaaaacgggaaatttgggaggttcatcgttctttggagtcgattcgccaaattggggacgggggcagaaaagttgcggtttgacaaattggtcattaatttgtgcgcagggcgggggaggaacacacaaaaacaattgacaatttgaaggaaaagggggacagagggatgaaacggcgaaaacatgttgcgcggcgggcgggggattggtgaagggcctcctccctcttaattccgccgatcattgatcggcgataggaataaaaattccgacaggcctaattaaattttattttattatgactcctaattattttgataatttgggccggcaattaacggcctaattaaattttattttattatgactcctaattattttgataatttattttattttttatatattaatttgtgtgcaagtatttcctttaattttaaaattttttccaatattccatcaatttttgccattgacagtgaacaaaagacatatcattttttgttatcccttctggcttagtttattgaattaaactgaaattctcgattaatccaattggattttgttttggattttcactgaatgaaaaaacctcataagggtcttttatacatggaaccaaattttcaaccataatgaagcaaaacccgaatatagttaataaggttaactcaaacggataggtttcaaaaaaattctttgaaattttttgggccggcaattaacgggcctaattaaattttattttattatgactcctaattattttgataatttattttattttttatatattaatttgtgtgcaagtatttcctttaattttaaaattttttccaatattccatcaatttttgccattgacagtgaacaaaagacatatcattttttgttatcccttctggcttagtttattgaattaaactgaaattctcgattaatccaattggattttgttttggattttcactgaatgaaaaaacctcataagggtcttttatacatggaaccaaattttcaaccataatgaagcaaaccccgaatatagttaataaagttaactcaaacggataggtttcaaaaaaattctttgaaattttttgggccggcaattaacgggcctaattaaattttattttattatgactcctaattattttgataatttattttattttttatatattaatttgtgtgcaagtatttcctttaattttaaaattttttccaatattccatcaatttttgccattgacagtgaacaaaagacatatcattttttgttatcccttctggcttagtttattgaattaaactgaaattctcgattaatccattggattttgttttggatttcactgaatgaaaaaacctcataagggtcttttatacatggaaccaaattttcaaccataatgaagcaaaa

SEQ ID NO: 16785 - DNA, 3278 bp, Heterodera glycines
  unsure (1)..(3278): unsure at all n locations
catttatgcagctttgaatggagcagcatttttctcgaatctcgacctgagagatgcgtacctccaaatggaattggacgaaaaatcgaaaccgctctgcacaatcaacacccactgcggcctatttcagtgccaacgtctcccagttggcgttaaatcggcaccatccattttccagcacttgatggaccaaatctgcgcaggaattccaggggtcttctcttatttggatgattgcctaatcgcctcaaagaccctggaagaccacgtcaatgcgcttcacacgctttttcaacgcatcaaggactttggcctacgaattcaactcgaaaaatgcaaattcctccaaaaagaattactttttctcggccacatcgtttcctccaacggcatacgccccgacccagcgcgctcagaggcaatccagaaaatgcctgcgccgcatgacaaaacgaccatccgttcatttttgggagcgctcaattattacggacgttttgttaaaccaatgcgagaaattagggcgccattggaccaactcctccgaaaggatgaatcctggagttggggagatgaccaacagtccgcgttcgagcaagcaaaggcaattatggtttcagaacttctgctgacccactacgaccccacacttccgatcgtcgtagcggcagacgcgtcaaaagatggcatcggcgccacaatcagccacatttttccggacaaaaaggaaaaagtcatcgagcacgcctcaacagttctgaccaacgcgcagcagaactacagccaaattgagaaagaagctctggcgcttgtgttcgcagtccaaaaattccaccggatgcttttcggacggaaattcacactgctcacggaccacaagccattgctggccatcttcggctccaagaaaggcatccccatttatgccgccagccgactccaaagatgggccctaatcatggccaattacgattttgaaatacggtacatcaacaccgcatcatttggccaggctgacgtcctctcgcgcctcatcgccaattatccccgaccagaggaggatattttgatcgccaacatctgcaccgaaaccgagtgctacatcagcaccattctgcaaaccaaaaccgaacaacttcccgtcactgcagacgaaatcgcagaggcgacaccgaaagatgagattttaaagaaaattttggcattcaccaaatcgaattggccaaagaaaagcagcgacccggacatcgcaccgtattttccgaaaagggaaaacattttggaaattgaggactgtttgctcttccaaaaccgcgtcatcgtcccccaatcgcttcgcaaccgaatgctgaagtccctgcacatggcacatcccggaattgtgcgcatgaaagcactcgcccgccaacatgtgtattggcccggcatggactcggaaattgaacggattgtccgtcagtgtgaagaatgccaaaaggctcaaaaatcaccgatcaaggcaccgcttgccccttggactccaaccgacaaggtgttccaacgggtacacatcgattttgcgggaccatgccaagacggtcacgtctatttcattttggtggactcattctccaaatggccggaggtctaccaaatgaattcaatgacggccgcggcaaccgtcttcacactccgttcaatcatccaccgactcggtattcctgaagaaattgtttcggataacggaactcaatttcgttcgtcagaatttgcggcactctgtaaggagttcggaataaagcacacttttacgccgccattccatcctcaatccaacggacaagtcgaacgtttcgttgacactttcaaaagggcgatgatgaagtgcaaaggcgacaagaacagccttgaaaaagtgctgctctcctacagatcaacaccaaattctgccatcgacggatattcgccagatcaattgttccttggacggaaactgcgcaccaaattggcactcgtccacccaaaaggacaaattgatcagtcggagaaatttgaaaaaggtaagttcaaacagcaccaaaaggactattcaaccaaaatggcacagcaattcgatcggaacaatggcacaaaagctattgagttcctcccaacggattccgtcctgctcttgaattatcgccttggaaaaagccattggctacagggcacaattgtaaaaaggttcaacaattcgccaacataccgtgtccacgtcccaactctcggccgaattgtccatcggcatgccaaccagcttcggcgccgattggattttgaggacaattcaaattgggaaccccccattcaggaacaaatggccattgatccaaatcaaaggacaccgccacgccaacacgcagccatcgatcagcgaactccacctgttgttgatcaggctaggcaaaaggctaaaagcccaattggcgtccgacgttcccaacgcgtgccgaagccggtcaaacgcttcacgccaggttgaaacgaggatgtttcaatctcgagaagggaggtgttggagaaaaagcaaatgtactttgctcatgttcaattatcgattattgatctttacatttgtccattctctcgtccgttccttccccctcacattgtctatttaaaggctggactcttcccccatgttcacttcttctcctgccttcaatttattatttttattcattattctctccacaccgaccccattcgccatttttattatttattattatntctcttcntaaataaatatttnttnttcttattcactcnnacaaanacacaacaaatttnncncantcaccantcttcttcaaccaacaanaanacacccaaactacacaccaacaaaaccaatantccctanacnnntnanttctncaaatactncantttttcaccatcaacaaaaccaatantccctanncnnntnanntctncatatattccanttaattcnctnaaaaaccaacanacctaanaaannttncnnttccncaataancnntttttcaactttnnactctcaaattcnncaccnncaaacatttcnccatnancncnnaccaaattaancaactccttnannccatncntntncaatcnnatnccaaccaacanctaatnnnccaaccaccncaaaacnccncntcancnattctnaaccatncaaatttgtcaaataagatcnacgcccgaatttcaaaattcaattncgaccctaggaggggaaacactttcgaacagtggttcaaacggtt

SEQ ID NO: 16786 - DNA, 909 bp, Heterodera glycines
atgagacgctcaaaaaccctaaaaattctcgagccgagatcgtaaaatccaaaaaaaaaaagccatgggtcgggggacctcgccctctcgaatagccctaattttaattatttttattatttttttccattttacgataggattttgaacttttttttatttaaatatttatttttacctcctcccctcaattgaaaaaagttttgatcacttataaccagatcgatactgatcacttcactgaaaactcagtgcttcgcctcagggaaaattgatcaatcactttgcccattcattcttcacattcggctgatcacaacggtgaaaagcgaacatttcccagcagattgtaatcattaaaaaacagctttataagcttcaaatgcctccccttcggaagcggcggaggaggaaaagccctggctttgatgctcttcggctttatccacctcttgtgccttacctttatcctccctctttgcggcttagttagccttatcccctgtgttgtggcttaggttttatccccacttgtggcttagctttatcccgtccccctcctttatggcttacaattagctgtatcctccccgccccttcccactcatctccgtgtctaatgtccattaaacgatcaccccccccccccgcccgcccctcggctgtgggctcggctcggcttttccaatccaatatttacccaccacttggggcttcttcgtcgcctcgggggaggggtgggggcaaacttcacatttttcaacatcctcatctcctcctcgtcctgctagcctcagtatggaagaggaggaagagaagcattttcaccattcatcttccgccgactgcttcttcctcccctcgggtgtgattttttgctgctaaagcccgcctcctcccccccccccg

SEQ ID NO: 16787 - DNA, 2111 bp, Heterodera glycines
gtcagtagtgcgtgtgacaatttaattataatttaccaccaaaattcaaattgctttgttggttcctttttgttttgtgcgaaacattgagccatttaaatgagtcagcgaacttccacttaaaaaattttgttattctaatttcaaaagttttacttaaattaaatcaattatatgtctatctggaaaggtttttgattcactgtattataattagacagcatgttcaattttgtccattcactgcacatctttaattcatatcataattatgattattcctcaaatgaatccgtctgtggctatttcaatctataatcgtcgtccagcataacgcaatctcgttcaaggataattctctcacctcccccccccccctccccccactttcttccactcatttttcctctttatctcttccgcctcccctccctctttccttcctcttcttgatggtcaataaaacatgcaaatatatggatttctttggttttaaatagggttcctccccgacatgtttcggggaattagtaaattgcacttgaaataagatggaagaatctttaaatgagtttttaagacttttttgttctggactttttctttttgtgtttttttagactttttatgaaaatttcctccccgacgaaggtgttgctccccgacattttttaaatttctccagccatccccgacaaattcattcgggggatttcctccccgtttcccgacattttgctccccgaggctcggggaggaaccctagttttaaatctcaaattgagtaggattcaatttttttttttatccatttttggctcagatttttagcatttttcaaatttttgcctcattttagttttttacaaacgcacttaaaagaaatgtgtttcaacccacatacaatccaaatttttatgaaatctacactaattttgcaaatctttcaagtttcagccaaaatattcattccatttttgtgccaacaatttcccagccgatggcacttttttgtctgtaaaaattgcgccaaaaatgagtcatccgcctccaattgatgctttgtccacctcaaccgccgcttcatcttcattggcatccacaggcgctgcgcggttagcgccggcgttgttccacgccggcagcgccaagacaaattggacggcgatggactgtgtgtggctggaggaagtgcacaacatacaggcaagaacggaagattacggtaatcgtataccataccgatagtttacggtagaattacgataatcgtataccaattgactacggtggaattacgatactcgcataccgatcaaactcctaaaaatgtctggttttttttttctatgccaaatggccatccctgttattactatttattttgaattatacaaaacgtgccctctctttaagtttctacagtatgcataaaatacagtataacttccccgttttactgttgcagaaccatttgtactggcgccagaacagtcccgtgttgttgctgagcttgtacgcggttgtgtgcacgttcggcacggtggtcaatttgtttgtgctgttgtcatttgctcgggtttcacaggtgggcaaaatgaccgattttttggattttttatttttaaaaatttaaaaaattattgcaaaattatttggcacaatttgtttttttatttaaaaatgtttttctccaaatttcaaataattaaattaattttttaataaataaattctaatattttattgaaattaaaaatgaaatattttaaaataattaaccaatttaaaataaaattttcttctaaaatataaaattattaatatttctcaataaattgtcattttataaatatctgattattcaaattaatctatttaaaatatttttatagtttcataatccgcaaaataacaaaattcatgcttttcttgtaaaaatttgcgaaatgaaaatattttaaatttttttttaatatttttaaaacaaaaatttacaaataaaaaaatatttttaatttttttagcttcgcaatttgcacaattatttcatcgcaaatttggccgtggcaggacctgcttctgtgcacagtgacagcaccaatgacact

SEQ ID NO: 16788 - DNA, 1584 bp, Heterodera glycines
gtccaagccacgaaatgtccaaaagagtagaaacccacgaaatgtccaaaatttttcaaaatttataaaaacaaaatgagtctaatttaggatttttagggttttcggggtcgctgaatacgaatataccctttatattaccccttgcctaaccttaggcccatctgaataataaaaaactcaaattcgagacttggacattttgtgggtcagcgtaatttagaaaccaacttaatcattcattcgtttcgataataaaaatttgaattttttccaaaatttttgttggattactgtaacaaactctgtttacagtttcaccacaatgcgtgtcgctgttgtcacatgcaaatcgcacacatcggacaacaacaatgagcagccggacgacgaatttggggagcacgtcagtgccattttggaaatggaaaacaatttgaaattgcgccaaatattttgcagaacgccaaatgcattgtttcaccgaatcaatcatcatcagcagcagctgctgcggacaatttcgagcagcaattgcgaacattgttgagaaatcatggcaaaacagtgggccaagcgaccgaagtgttggcacggcttgaaattgttggcatggacggttggtcaatgaccgcaattattcatttgtttgcctcatttgatcagatcagatctgatcagccaaccaatcattttccaatttatcaaaccgatcggttaattgcttcccattcaaaattttcaaggctttaaaagattttgggaattggcatggcatgccgagcccacagatgatcggggatatctgtcccagcttctaagcggctaatttaccaggaatatgccattcaaatttttcaaggaggacctgttgccggtgccgtgccaccacattcaccgcccttgagcaaatgccatcatttgtcgccctcccccaaatacaaccaacaacagtccaccggtattgttgcttcaacttcaaaatgctcctcctcctcatctgctttttatccaccctcattttatccacaatgttttgtgccatcgtcgttatcagtgatcattgatcataatgatgggggtggcacaaacgctggtggtggtggtggtgttgccaacaacaacagcaacaacatggcaccgtcggttgcaccaacaccagcaacaacaccccaacaaccaacagcaatgccggtctattttagtttggcacaaatttcagcaaccgtttccggcaccgcatcgtcatcaacagcatcatcaatttcggacaggcatcagcagcagcagcagcaggtcagagttcggcattcaaataatgattttcgagactgaacaaattgaacagtttgtcaactttgagattttaattggcattcaaattttttttttaattttataaatttggctcttcaccccttcatcaaattttcgattgaccccctaccccttttgtatgtatgcttgattagaggattagcttaaactatggtgccacaaaaattcatttattcacagtttgttccaaatcgcttttccattgccgacatgcaacacaacaattattgccgatttccgttgctg

SEQ ID NO: 16789 - DNA, 946 bp, Heterodera glycines
gctttttttaaaattcatataaatttgtaacaaattttgttataatttttccaaaatttgactcaaactcacataagggttaaaaagtgactttttgaaaaaattaccggaaaaattgttgtggaccaaagaagaaaaaaaaaaaagtttttttttggattctccttccgattttttttctgtctgtttacggcctgtctcgagctataatttgatttttaatgctaaattttgcaatttttttcgctttttatttgttaattaaatttaaaattttttttttcaaaatttttaagtttccatccgcctccggctgtgttggcgccgcctttctccaccggcggttctgacaatttacaacaaaattttcttcttctaaccaatacaaacggcaacaataatattaataatgataatgatattgatattggccaacatcattgggagaatgatcagaagcgataagagaaaagggacaatatattttttgtttaattaatttgtttttaattcgctaattttataaaaaaaataaaatgaaaaatgttttattgtaaaaaaaagagagaaatgaatttaagcatcaaaatcagaaaaaagcatgtgatttaagagtaagtgatcagaaaaaaacaataatatatttaaaaatgagaaagtttatcaaagaaataattattttattattttaatatttgttatttttgtcaccgtttttctctcccatttaatcaccaattaaaaaatgttttttttttgccaatttaatgcatttttggggaaattgtgatgtgtgcgcacttttcactggaaggcataactgcgcaatcactagtgctgctcgagactctcggtctcgattcgagaaaagtctcgggttttttggtctcggggtcgagtctcggagaggggtctttcataggcaattaaacaaattaataaataa

SEQ ID NO: 16790 - DNA, 2171 bp, Heterodera glycines
  unsure (1)..(2171): unsure at all n locations
gatggatggactcaaatggcatagaatccgaaaaaagagtccaatttatggcactcatagacaatttatatttacngcaaacaagcccaataagcatccaattaaaatggcaattaagcactcaaacacttntaattttgttaatgccagattttagataatttttttaataaaaaaataaaattggattggattaattttctaagccatgcttctgtagctgatatgcttcgcccaaatgctgctggtcaatttgctgatgatgcttctttctttgcttctccgctgttcatttgctgttcagtgcgcttaatcgttgcgccatgtcgcgcaaaaaatttttaattgcagctgcgcattcatccaaaacaatggctttgctttatccctctcccccctcccctctcttgtgatcgaagccaaccaatgtaagggatgaatgagaatatgcataaaatggattaatttgggggaaattagcgcgaaaagttgccctcagggcatgcgcggcgggagcgctttgaaaatgcttttactcgctcgccgcgctaatcacatgcgcggcgcgcgcgtgttgggctaatgatgagcaaaaagtgttagtgaaaacatatagataatatatatttcggctttcaggggtgtattttttctttttttagaaatcccgaattaggggattttggttcattagaatgatttaccaatatttctttttatcaactaaaatcgagacatgttccattgtaatttgtctttatcttttttttgtttttgattatttaatttaaaattgttaataatttatatgtttaaatcattttattttaatattatataccgttctttttcgaaaaaacctacctatttttcgttgaaaaaaaaatttttaatttcgtgggggggcggctttaaaacatgagcgaatatgcaaattcagttatttaaaacatgcgcgaatatgcgttatacagttatgtatttattcatggctttaggggtttcattttgttggattaaagacgagtctttttttcaaaaaatttactgatccaaaaaatcaaaaacaaattgaatgtttggcaaggtgaaaatatttgaaatgcgtttcattgaaaaaacaaaacaaaggccgatcacttggggaaggaggcgatcaaaatattcaaaagagcatcacatttgttgagaatgacgatacacccgttgtaatctttaaaaaaaataataatattaaataaattaaaaagagtagaaataaattgaaattaatcgatttaaaaaaaaaattaattttttattctactacccttattaataaatataaaaaatcaacgtgtaaaaatatgtaataaacttttaaaaaagcatgcctaacaatatgataaaataactgttttaaatgtaaaccatcaaaaaaaaaattttttttttttttttggcatttttgccgccaccaaaaggcctaataaaaaaaataccgacaaatagtaaaaaaaaattatattttcaaaatgcaattttaaaaaattaatttatatattcctaggctaaaatgaactaaaaaaattcatttttgtttatatggttgctaaagttttaaaatttagcacaaaattttaaaaattttctcgcgacgtcgcctgccggcactgtcccgccattttcggcacttttccatgttctattttcacggcacattttttgaaatttcaaaaccgaatttcgttatttcattatcaagtttaccacttacgaatttggcacatgatggactcgtgtttgaaattgtcgcgcaacaattgaaccaatgcgggcaccaattccctcaaactcggcaagtctttgttcatccacatgtccaacaccgttttgggcaccgccaatgctttggccatgagaagcgcccgctgggaatggaaccggacggacgaagcggggccgaggcggaacacgcggggccaatcgtgcggcgcggagacggcactgtgcggcggcaccagcaaagggacctcggcagagatcggaaaacacgaaattgagattttttgatttttgtattattaatcaaagcccaattcattttttacggtgttgtctaaataaactgtctgacttttctcgctgtctaaacatcagtngtagagaaaatcgattttttttttctatat

SEQ ID NO: 16791 - DNA, 1950 bp, Heterodera glycines
aaaaaatcggattttaaagtgaattttttaaaaccctgttaccttaaacagcataaaattaagaaatagtaattttttatattattaggacattacttatgttttttgaataattaatggttttttcaaaaagttacagacaatcaaataatcaggtacaatcacttctatcacatgtataatgctgtttaggcgatcaggaatgaaaaaactgagattttaacccgattttagacacctttacatcactttctcctctcccttttgccgtctctctcatttcttctccgcatccctctcccatttggtacatctctcatcctccattagtaccaaatccgtgagccagggtcccgaaatcaaattgatattccgaccccgtgcatcaattggacgaacatttcttcattttttcgatcgaccgaatcacttatctgttctccaaaaatttttaaaatgaaatttcgttttctaattgtaggtttgttacagtaaaaaaatctaaaaaattgttcatacctaacataaaacaaaaaatgtgtcgcatcaaactcactcactcactttggccaaagtttgtgccaactgatcaaatattttgcccaactcgcgcagatcagcgatcagtccgcgcgaagtcacgcgtgcccgattcaccgaccaaaggtcgggcttcatcaactgcacccttttgccacgccaattgctgtccacgatggcacgcaaattgacaaattttcgcagcgcgtcggaacggagggcccaattttgaagccaaacgaaaagcgaacggacgtcgtcgaagtacaacgagcacaactgaatgaacgttgtgtactgatagcagattttaatgccaatcaataaataattaattgtattttaatgcctttccaatttcgtcccttaaatttcgcccatagcctttttttatttaaaaaaattaagaaaaattcttttgagaaaatttcaagaaaaagattttgaaaaattttatgatgaatttctgttttttcgaacatttttccaaacaaaaaaatgctgtaaaaatttgctagcgatttttttttgaaaattttatgttgaattactatttttcgagaattttttcaaaaaaaggtaggaaaaaattttcaaaatttttttataaaattgtggaaaatttctgtttgaagtctaacttgttgctatactgtctgcctcacatgtaaaaaagtatgaatttttttttttgaaattttttaggcacaaaaaactaattagcattatctaatgctatcaaacatacaaattaggttatagcaaaaattataacaaaaaaaaaattcaaaaaatttatgtttttgagtgacgtcataacccccccccctccgccaccttcgcgtcctttttctgtaaaattggccgaaacagtgcgtgcaggcgcgaatttgcgacgcaactttgctcaagaaaatcgtagtgcgcgaaagtggccatctcagcgagcaattcgttgggcagacgacgacgacgggcgcccgggggacggacagagacatggcgggagaaattggagggggagaaggaggcggcggcaccaaccaatggcatgtggcgagtggaggatggtggcacggtggggacagagatggtatccggcatgggcacggtgtgctgaagaagggaaactgtaaaatgagagagggatactgtaaacgaacgctgacccacaaaatgtccagcccacgaaatgtccaagtctcgaatttgagttttttattattcagatgggcctaaggttaggcaaggggtaatataaagggtatattcgtattcagcgaccccgaaaaccctaaaaatcctaaattagactcattttgtttttataaattttgaaaaattttggacatttcgtgtgtttttactcttttggacatttcgtggcttggacactttgtgggggtgcct

SEQ ID NO: 16792 - DNA, 1618 bp, Heterodera glycines
cttaaacaatttgttactaattccttttctccccggtgactcctataattaataatctttggcattccaaaattacttggaatgggatgtgcaggaagaagccgatctccaagttgcgctccagtgactgcatgatcatgccggtcaacatcaggtggtagtcgtggatccaaatgaagtcttggggacgtgaatttcgcaccgcatcgatggcaaactgaaaaattaaaataaaatgactaatttgtgagtgcctcccccattcacctggtaattgacgcgaacataagagaaccaatgttcgttgagcaccttcgagtcactgtattcgggcagaatgtattccgggagattgtgcagtgcgggccacaaaagtccgttgctgatccccccgtagtaaacgttgtagtcctgctcctggacgataacctggaaaggccaaaagattacatagatgaatacattttattggggagagctgtatgatcgtctaaacaatcattgccgtttattatgcccagtcctttccatgtggaccaattgcacttcctcgccgctcaccgggttcagcttgtagttgccacggttgtagttgttcagcacgccgagcagtgacatttcctctctgatttgctttttgaccgccgattcgtcgtcctccttttgctcgtcgttcgcaatgacatggaacagaacgtctgccaatgcctggacaaaaaaaccatggttttcaaagtttccgacccgatttgcccacctgtttcatcagaggaagacccaaagtgtttgtcgctggcgctgcgatgtgtgccgggtccatccgttcgccaatgttcgggtctcggcccattttctcgaggtattcagtggaggtgattttgaacttgtcgatgttcatgccaaggttggccagccacatgttttccgggttcacctgggtaataatttgagcaataaatgccatttcagcgcagttttggccaattacacaaatcactcaccgacatcaccgggtccacgcacgagacgagtccgcccgagccttgcttgatttcccactcgcccgactccgactgtttgagcgccaccggcggcgcgttggacacgttgatcacacgctgctggaagtgctgcgtgttcactagcccaccgcacagctctgtgccgtcagtgccggtcgaatgttgcgcgtccgaagtggtggacaccgcactgatggacatgcgcttgtcactgcctcgacgaacatctaacgaaggaggaaccaacaattaattaacacggattgttagatgtaaaatgtgagtcgttttcgtatttattccgtcataaagtttagtgaggaatggcaaatccactgttttttgagtcagtattttaactgcccccaccgtggttattgttgtgctgctgttggtgctggtgcgcctccgcgtcgtcgtctgacagattgaagctcggccgttggcctgtctgctgttgtgctgtgccatttgtgattgccttggcgtccaatgcggcgagtaactcgtgaatttggtgttgactgccagcgccgcctccgttggccattgctgcggtggaggaagcgggggacagcgaattgtgcgaggcgtgc

SEQ ID NO: 16793 - DNA, 1460 bp, Heterodera glycines
cctctccgcccttttaatgttttttatttacactcgacgcccagcagcatttgtaagcgagcaaagcccaaaaaaaagatacaaatacacaatattatgctggtggatgactaattggcaggaaattaagaaggaaggaagaaggaaacacttgcaaattcacgtgggaaaaacatgatcactgatcagtgatcatgatcagttggttggctaacttctgcacaacccctccagcagagagcatgcgaccgaattttgtacataattgaggaaaataacttttagagcccggaaatttcaatttgcagttgccgatgaccaaaggtccctttttgagtcttttttaaagaactaataaggtggaggccgatccgacgggccgatagacaccgccgggtaaattttcataattttgaatgaaatttgggattgaaaaaagattttaatacttcgctacgtttaactttttttctatacgttaaatctataccaaattttgcatatcgatagagaaaaaaattctgcacatttttaacgctcgagttttatttttttacgctccgatccaaaattttaactcaaacaaaattaataatttcttttcctctccttttggcgtactattttcacatctctagcacacaaaaaacatcaaattcgaaaattctaataattttggttataagggtacaaaatcactttggacatttagaatcaataaagaaattaatagttttagcatttttgctgaaaacagcagtttaggacttgagttataacgtgataaaaatttgaaagtatcacaacttttttctgggatgtcaaattgcttagcattcgcttagaaaaagattccccttttcaaaatctttttttagataccaaatttgttcagtttacttgggaatgaagcgagttatggcagatcaaaataaaaaatacaaaaaaggcatttttcagtgtaaattttgaaatagcgggcaaaaatttacgccaaatgcgctatttggcgttatgagcaattttgtctgacatggggcgtacccatagtgaacttacatacctaattgaatttgttataaatttattaaaaatatttggttggcatgctgtttttgaaattttcaaaaaatgcaacttggatccctcgggatcccgtcccgcttcgagctctaccgatgaccataaaagagaagagaggggaaaggtaagcttaagctcaaaaatgctgcaaatgctttgcattttggctgtttatgaagggcatttttaagctgagcttccttttttgaatggcgataaaataaaaattgtgtgcttggaaagggatggcccagcagcagaaatggctttggatgagcatacaaaatctctccccccccttcccttcccttttttaatcgcattcaaatgatggcgagaattttctagaaacatttctatcgcacgattttctctat

SEQ ID NO: 16794 - DNA, 1500 bp, Heterodera glycines
tcaaaagttttaggaactgtacaaattattaaatgcaaaatcatttatttattgatttgggtaaaccaaaagcacaaaatcagaacaaatgctgagataactcaatttattcacccgaattcaacgtacactttcatacaatattaccatacagtgccatcaaggggaacacaaatttgattggaatcaaacaaataaaatcaggaaaacaaatcaaagcccaacaaccaaaatacgtgaataccacaaaaagaagcggagaatagaataattatacgggcaattaagtactttcaggcaggaaatgattgagtggaaaaaactagaacaagactataatatataagggaaagacagaaaagcgagggaaaagagaacggccaacaattcagtcaatccaaagcaaaatctgagcatttgtccatcagcatcaacgtttatacagagatcgagtgcggattcacctgaaatgtttaaatcttgttgcgaaattcaatttaaatgtttaaaattttgtaggtatataattaaacggtaatactggaggattgcggggttctattcggttttacgcgtcccatgacactttacgcgtccatggcattttacgcgtcccaacaacagtttacgcgtcccatggcattttatgcgtcccatgacatttgtgttcatggcagggatgtcattccgaggctcaaaaatttttggaaaccggaattaagtgctatccctggtctatggtattttagccgtcctaataactatgatgaaacctttttttgtccggtattcagtaattttttaactagaattttgttgttaaacataaagtataatacaactcatacacaggcaactcgaacaatggcttagaataggcctaagcttttggcttaaacctaggcttaggctttttttgtaaaattttttatattaataactttctgttgacattattaagaaaaattataaaaagaagattctagcttgtttttttaagttttctatttcaattttttcccctttattttttgccatgggacgcgtaaaattaaaaagtcaattttaccgaatgatgttgaggcactgtgtccaattccatatgaagaatcaattcagtgcaatatgtaacaataataatactaaaaaacgaaaaattggaaagaaataatgtaacatgaacaaatgtacgtattgcaaacattaattgaaaaagaaaagaattttatcccaggagaaattttaacttctcttacattttctcctttttaccttatttcatcaaaaatctttataaaatctgctatatttttgaaggtttttttcaaatttttaaatttattcgaagtttcatagattccgctgcgggatttgcgagattctaggattaatcccgatgaatcctttttttaatttcaggaaaatataggggtaatctgaggtgctaccccatacgatttttttttgaaaattttccgttttttagtgtattttgggggt

SEQ ID NO: 16795 - DNA, 1012 bp, Heterodera glycines
cgaaacgcaattcagactcaatggtgagtgaaatgaattacaaatatcgaagagatttccatttgattgcttcgcttcctcttcagagggtcgtcagttgcgcgttgagcaaattccgggcgccgaaacgttgcacaattttgaggagttacgcagaacgaactcggaggcgcagccggacgcacagcaaacgatgcgatccgtgctgcagaagttgaagacggacagaaacgcgtggcccttccaaaaaccggtcgaccccgacgaggtgggcatcaactgctgacaatcgagaggattagcgaatttaatagcaaatgagagtgcctattaaggtgcccgattactacgattacattcccttccccgtcgacttgggctcaattgccgagcgcctgaagttgggctattacactcatgtaacttatcatatattaaatgggcaatccaagcgaactctgagatattactgtgctcataattcttatcaggagcgaatgtttgtcgccgacattcgccggatgttcgacaattgttacaaatttaactcacccgagagccaatattattaccacggctacaaactgaatgaactttttgatcggctcacccgccaacattttgctcattgcaaattgcaggcgccgctgcccgcggtgaagccggagtatgtgccaaacgccggcggaggagggagaaaatgaaagggatttttgtggcattttgtaaatttgtgacggaatttacatcgatctcttgtattttttgttattcttaagtgcctatttaccccaataaaattccatgaaaagcgtgttttcttttgctgcgtttggcggatggttttgtttattattccatggggcggggggcaccatccttctataggattatactgaccagcgaatgaaaaagcgcccctactccaaatggtgttttgttcgtgcgtgaggaattgatccatccgaaataataggcgctcggcgtttgtccatcctttagaaggtgagaa

SEQ ID NO: 16796 - DNA, 1195 bp, Heterodera glycines
  unsure (1)..(1195): unsure at all n locations
ctgcannggtctttggcaattaaatcagtcggttaaataaaaattggtttctttggcttttggaacaatgactatgatgcttttcatttggccatgactccgccgatcactccaattttgtagcccatttcaagtcgtcgtctcttggcttccagccagtaattacactgaccaaaaattccattttccgccagaatccaatggcatccaatgccggatttaaccatccagttgtgatgctgaaaatggtaattaataataaaaataataggcgagaggtaacgcttaagctgggcggggctcgttttagtgcggagcagtttaacgctttaaactttcttggaaacaatcgtattaaacacacttggtatcattcgatagcccaaattttctctattaacctgcgaaaaaaaaaatttctgttttcatattattttggccattttttgaaattttgcttgggctatcgaaagatactaattaattgtaagaatgtttaatcttttgtttcaaagaaaattttaaagagttcggcccaattcgacttaagctaatttgtaaggtttgaatgtgaagaggagggaatggcttctgactgaccaatagcgacacgcgtgaggcgaaatgtgatggagtttatggtgttggcgagggaggatgaggtgacattgttgaagtaaaataacccatccgggaagattgaagtaagtgtgagaccatttgtgaatctgaaaagcaatggcaatggacaaagaatggcatagccaaagaaagaatggcacagccaaagaatggcacagccaaagaatggcacagccaaagaatggcacagccaaagaatggcacctgattggtcaatgccacgtaaaagccgcataaaaaccaaaaccaatggatcggcaagtgttgctccaactccctcggctcactcgtccagtgttgccaagcgatgtgtcccaatttggggatgcacagcataaaattgtccccattcacttccacaaaatcatgccgagtgatcgctgtcgggtcaacgtggtgttcacgaaacgaacgaatgaaattctgacaaacggaaattcccaagagtcagtgtctaaaacgatttctaaccatccctatccggatttttattacatcttttttttattttggcctttttggcacccgaaaagattagtcataattgcttttg

SEQ ID NO: 16797 - DNA, 1165 bp, Heterodera glycines
aaaagtgtccaccgttccccacgtatccgcgccccaatggacgacgcccgagctgaaatcggccatcagcacaccgacgagggatgccaaaatgagctgaccgacggggacaagccgaaagtggtaaaggagggagcagccgaccgacagaaaaagggctgacgcaacgcaaatgcaagtgacttcttggagtcgtttccctgagattgggtggatgacagcttaagccccatgccaggcttgcctttgccgtacatcgatgccaactgtttggccccggcatgggtcggcccccagcggggctttgcctcgcccatgcaaacgttggcatttccattcggactttcctcaggcaccttaaaaaaacccatcactcaccatttcttttttaaaaaagacaaccgcacagaattatcaagagaaatttggttgtctggggaatggcattcctcggaaaacggctgagaagcgacagacggagacggggaagggtcgaacgaagaacccggagggcattccatggaaaacgaacgaacgaaatgaatgaaactttcgatgtggtcctaatgggtcatcatcacattgtattggcgtcgttaattaataaatacattcgagaatcatctaatgaattgaacggatgaatgaatgcattttgacagaaaacggagagtgaatagcaaagagtgaagactcattgtgaggggtgattgatagtcgaaagaggaagcgccggaggtggagggggaattggaggaaccgccccaccaactctcgaattgctctatcactctcgagtgaggaacggggggagggggggggggggagacgggccaacgaatcgattggccttaaattggcttgctttgctttgattgtccggtcgaaaagccagacacaagcaattcccattcattcgaacaataacaatcacaaaaaattggcaatgggctgtaaaattcgcaccattatatgataatgtgataaatgataatcaatagaatgcgagaaataggtaaattaataaaagtcaacatgtgaatataaaatgtgcaataataaggaaatcgaaacgagggagctgcggccaactgaatgactgctaaaaatgtcggcagggctcatagttagggggggggaagagaataggggagaaaagggggag

SEQ ID NO: 16798 - DNA, 1376 bp, Heterodera glycines
taattacaattatttataagttcttctttttacccattctattattataaatttaaattgacgatttcacacctgcaaaaattgctgttaaatgcaaagtaagcgattggtttaccaatggtgcagctgggaaatagcttatctcctcacccgttccattccttggccattttcgctatttttcacaatggacgcccttctatcccccacttgaatattgttttaaaaatattaatgtctatattgcttgtaaaaattgtacttctccaccctttatcagatgcgcttggtgttctaataatctctgtttcgaacattttattatcactagacaccgttgtaattaatattttgtgtattttaatttttttggaccacttatttgcactttaaaattgttaataaaaacaataaaaattgttgaacccacgcggagtcgaaccaacagtcaccatgacgccatcatgcaccacttgacaccatctctggagggaaaacacaagggaaaattccgatttttgaggccccataacttttttgtttttcgccacaaattcataactcacttcagggttggacaatgttagtggaataaagctttttaaaaaaaggaaaaatcaggagaatttatatattttatttggtttttcgaaatttacagatgaaaaaagtcttttttccagaaattctggaaatttttggtttttcagaaaaaattcaaaactccgttctaaaagagagatttcacaaattaaaataaaagaaaaatccgcgattttttgcgttacaagagattttattttatcactgttttcaaggaagttttaaaaataaaactttgcctttttttctgcgcactagtttcgacatattacgtataaataacggtgctatgtcgttatataaaaaaccataaaagttatggggaaaagtacacaaagtaccaggttttcagacatttttggccataacttttttgaaacttaacgaaatttttgaaattttgcaggctaatagaggaaacctatgctatcatataatagcaagaaaataaaaaatctaagaaatttataacagacatcttttcgttagacataaaaaattttgatcatcaaaaattctgaccaaaactttcttagaaccaacaaaattaagaaagtttgatatcatttgatagctctaacatttctctattagctcaactaaatttcaaaaaatttcgttaggtttcaaaaaagttatggcaaaaaatgtctgaaaacctggtactttgtgtacttttggccataactttgttcaaacttggccaaattttttgaaatttagttgagctaatagagaaatgttagggctatcgaatgataccaagaatgttc

SEQ ID NO: 16799 - DNA, 1222 bp, Heterodera glycines
atttttgttcttgctaaaaattctaggtttaaaattttccttattctaaaaagttataaaatatttaataataatttaactgaccaaaattaagtttttggttatgttttacctgttttactccctaaaaatccttaataaaaaaaaattttaatgccttttttggggttttcaagcctttttatgtcttttttttcgtgcctattaaagtggctttttggcgatttttggtgcctttttagtctgctctacttattacatcgataatgctatataaccccgagtgatttttctatattatttttcatgtttattaaacatttaaacaagttgcacttttgaattaattaatttttgccaacattaaacaaaaaaatctatttaccccccccccccctggaggataaatagagactgggggattattttccaaacctcctagactgagggataatcggagattgggggattaatggggattgggggataattagagaaatacggtatacaacattgaagcatgtatattatacacaatgattttattgaatattttcatatgaattatacaacattaaaattagagttgagcgggaccgggaccggaacgggaattcccggtcctccgaggtcccagtcccggttcccggtccgggaaaatctcaggtccctgtcccggtagggcaaccgggaaaaaccagcactggtaagaatgggggtatgagtgaaaaattagtgatgaaaattggagttaaaagaaaaatttgaaaaaataattaattaaaatattctttaaaagtaactttgcaattgccgtttttctactgtttgtgcccatctttttgggtcaccgtttgcccacactcaaaggcaaataaaattgaataaatgaacgataaaaacgctgaatatgaataaattcaaataacctacgattattttttgtccatcccactttctcctattttggttttttgcgcgaatttactttctgacgtatctacgtaagtaaatacagcaaatgctcacattaaacctaaactcctttctataatttattataactagggatgtcaattttatgtaaatatgtacatatttttttcctggcttttccatgctctaattagtaggaaaaacactttcttttgtctgtttgcgaacaaaaatcgggacttttatttacatatttcgagatttcataatatttggtacaattttt

SEQ ID NO: 16800 - DNA, 1284 bp, Heterodera glycines
attaaaagctaaaataattttcgtatatttttcacaatttatttcaaaaaaccaaaaaagtccggatccaattttaaaaactaaaatagtgcacaaaaggggagccgccgcacggcggggcttaaaagcattgtacagcataattaaaagctaaaataattttcgtatatttttcacaatttatttcaaaagccaaaaaaaatgattcaattttgaaacgaaatagtgcacaaaagggagggatggttagacgaaaagaggaatttttagaaaagagcgcaccccatctgatattcccatttttccgttccacaactggccaaaggcgactgtgctcattgacacgtagttgtccaataaggtacttggactttccacagtaaaatgtggtacaaaattttggaactgtcccgcctcacggcggggcttaaaagcattgtactgcataattaaaagctaaaataattttcgtatatttttcacaatttatttcaaaaagccaaaaagtccggaaccaattttaaaaactaaaatagtgcacaaaaggggagccgccgcacggcggggcttaaaagcattgtacagcataattaaaaccgaaaataattttcgtatatttttcacaatttatttcaaaaaaccaaaaaaaatgattcaattttgaaacgaaatagtgcacaaaagggagggatggttagacgaaaagaggaatttttagaaaagagcgcaccccatctgatattcccatttttccgttccacaactggccaaaggcgactgtgctcattgacacgtagttgtccaataaggtacttggactttccacagtaaaatgtggtacaaaattttggaactgtcccgcctcacggcggggcttaaaagcattgtactgcataattaaaaccgaaaataattttcgtatatttttcacaatttatttcaaaaagacaaaaaaaatgattcaattttgaaacgaaatagtgcacaaaagggagggatggttagacgaaaagaggaatttttagaaaagagcgcaccccatctgatattcccatttttccgttccacaactggccaaaggcgactgtgctcattgacacgtagttgtccaataaggtacttggactttccacagtaaaatgtggtacaaaattttggaactgtcccgcctcacggcggggcttaaaagcattgtactgcgtaattaaaagctaaaataattttcgtatatttttctacgaatttatttcaaaaggccgggaaagtccggaaccaattttaaaa

SEQ ID NO: 16801 - DNA, 948 bp, Heterodera glycines
agcagaacaattcctcaggttttgaaaacatttttaaattaattattttatatttatcaattaattcaaaaaatatttaaattagttgacaattaagcgccgaccaataataatcatacgacgacttcacccgccccgccggttattgaacgaattgaaattcggctggttgacactgaaaacagaacggaagagactccattaatcattgtaaatagaatatcaaaaaattatttagaattagtcaaacaattaattctaatttatgatttgatataacacaattatattttgattattaataaatttaaattagttttttgttttgtttaggttgatgttgtgaagaaaaatggttcagcaggtgaaaacaaaaaaaaaataaattaacgaaaaaatttaaaaaagtttaaaagaatattaagaaaaattatatttaaaatctaattaattttggtttgtattatatgagtcgccgcaactattgaacaatcaattctggcggaaaacccaacgcttaatgagcaagttggaccaacaaaaccgacccaatcgtaaatttagaaaataattgtaaaagataaaaaggcatttaaattccgaacaaaaaaatttttgaactctaatttatgaattaaatatttgttaaccgatttcccatttttaatcgttctttagctttttgctgcgcttacatcagccaaattatcactcggttttgtacattccgtttgaaacgaacacttccgaaacagcaacagcaacaacaacaacgacaatgacaacaactaccgataaaccaacagcaataactgcagttgatggtcggtcattatatatttgttcaagaagaaatggaaggggaaaagccaatggataaaaattcgtccaaataattaattgatgaacaaatttagacgcaattagcagggaaatagtctaattgga

SEQ ID NO: 16802 - DNA, 766 bp, Heterodera glycines
aaaattgttgagtcaaaatttttcgtacttttttggttacaactttttgtaaattatttatcaaattaaattaaaataataattaaatttaattaaaacgaacatttatacttttgtcacttcggcttaccacgatgccgtttcttaaatccgccaaggggtaggaaaacaaaaaatgtaagacatataattcataatttggcttaaattcaaccaaattaataattcttggtatcattcaatagcttgaactgttatctatcagaatataaattttcaaattttttataatattatcaaaaagttatggtcacaaaatttcataaaatcttaagacagaattttttggccataatttttttgaaactcaatgaaattttttgaaatacaagtttaatttatagtcttacattttttgttttcctaccccttggcgaaatttatgaaacgacccagcacttaaataaagccatttttgcttaccaaaaagatccaatttatcaatctatttcaaaatgaattttcttcattttctggctcatcattttgtggctcatcatagtccggctgatcgtcttcatctttcacattcgaaagctgtggatcagctcggcttatctgctgaatgataattaggatgttaaaaactccaaaatagttttaaaattgttgccaaaaattaacaaattgttcaaaatttgttgtttgcacaagagcgggactccggggtaaacctgaggatcagaaaaatcaggggttttcagct

SEQ ID NO: 16803 - DNA, 3218 bp, Heterodera glycines
catttgtattttcttctctgtaatttaatcattggaaaatgcgaatttttattttactattgtaattttatcattggaaaacgcgcatttgtattttcagttgttgttaatgattgaaaatgcgcattaagtggaaacgcgtattttttattttactattgtaattttatcattggaaaattcgcatttgtattttcaattgtaattttatcattggaaaattcgcatttgtattttcaattgtaatttaagcattggaaaattcgcatttgtattttcaattgtaatttaagcattggaaaattcgcattttgtattctactattgtaatttaatcattagaaaacgcgcatttgtattttcagttgttgttaatgattgaaaatgcgcattaagtggaaacgcgtattttttattttactattgtatttttatcattggaaaattcgcatttgtattttcaattgtaattttatcattggaaaattcgcatttgtattttcaattgtaatttaagcattggaaaattcgcattaagttgaaatgcgtattttgtattttactattgtaattttatcattggaaaattcgcattttgtattttactattgtaatttaatcattagaaaatgcgcatttgtattttcagttgtagttaatgattgaaaatgcgcattaagtggaaatgcgtattttttattttactattgtaattttatcattggaaaattcgcatttgtatttcaattgtaatttcatcattggaaaatgcgcattaagtggaaaatgagtattttttattttactattgtaattttatcattggaaaattcgcacagcggcactgtatgacgtcccgctcttgaattcattcagcggcggtatggagatgtccagtttatgctccctgaagaacttgcctccgtcgttgcggttatatgcaaaaatcgcggcactgtaggcgcgcacgaagaacctctgtaaaaacggcgactaaccaaacatagagaaatgttttttgttttgtttgtgttttagcaaaggcatataggcagactcttgccttcgtgggggggagcagagcgatgacctgttttagtcgttttttcaaaaaaaaatttaaaggataggggcggtgttggtctgttccggtatacgactcgggatcaattgctttatttattacgtgtgccgacatttcgcccaaaattattgagctaatcgccctgaaccaggtctgtagccaaaaaaaatgttttttttatgaatggttgctcttcgaaccaaaatttttttaaaaatttaagttagccatttttttgccaaaaaatagcagaatttttccagttttcattagaagttagctctattttaagttaaataaaatattattggagagatttgtattcggatatttccgttgttctttccgtcctcgattggtgcgcctatttttcaggttaaaaaatctcgcaaaattttttatttctttcattatttacattactttctatagggcatttcttacagaacactgtcctaaagcaatggcaaactttttttgttagtctctaatgtatactttgtcatccttacaaatttttttagtaaggaaagtcaggttcgcgagtttatgggttgttttgagcacacaccatcccaaaaaacgagaagtgtaccaataaatagagagtgccagagaaaaacaatatctttttttctctaattttttgtctccttttggcgtactatctaatatttctattattaggaataacaacattcacttcgctctatagaactttttttccgccttacagaatttcttcatattttgcatatcgatagagaaaaaaatataggatttttcaatcgcttttttaaagaaaacaatcgcttttatttaactttaatttttattttaaggcaaatttaattatatggcaaaaaggaaaattgtgtgcaagcttaatgcaattaaatcggcacaaaaacgggtgcaaaatcgagaggagcgacaagagaagttggagagggcgagacaagccaaatccgcaaagaaaagtgagtttttcaccaatttttaactcaaaaatatatattttttttaaattttagccgctctacagccgaatcccaatgccgaaacgccacagcaagacgaagcaggaccgtcaacatctgctgcatccgccgaagaagcgatggaaccgccgccaccaactccaggaccagtgccgacgcccgaaatggacgaggaaattttggaattcgacgacccgccgccgtcgacacctgccacaccaattggcgatttggtgccgtttccgtcaacaccaactgcgccaatggacaccggagagacgaccccgccaccgctggccattgacgagcgatcagagcgcatcgaacaactggagaagcagctcaaggaccgggacgacaccatcaaatttctgcgcgagcaggtgctcaatcgagaagcgctgatcagtgatctgcgtcggcagctggacgagcacatggtaccaccgatggcaccaccaacgaccagcaaaagtgagtgaaaattttccttttttaatttcataaaatctgatcatttttcaattttagcgccaccaaacagaggaagaccgaagaaaagactggatgaactgcagcgcagcgccaggcgcgacatcgtcgacaaaattgtgggcgtcatcgatcgtaatcgctcgcgttccgcgagccgcgcatctctggaccggatccaccgagaaatccgccacaaattctcgcactacacgccaaagaagggccaaagctgcaggagggaatggaagcggaggatggacttctgctgcttgcccagctcgggacgcagatggcttacaaacggatgaaggcgactctaaggctgatcgacaggcgctttgacacttttccaccactgagaaaggtgcagtttttcattgatttttttgttttaccaactttttttgggtcgtcgaaataaaacgaagaatttgctcagctttgaaatatgatgtcatttcaacgccaggcgggcccggatatgtttgctctgacattgacggggcactgcggttcagattgtccacggcaaaagacaatctgatcagcctgatctctgcccgtggtctgccactgaaggtcagtggcgatcacgggcagggattcacaaaaattaccatttcgttggcccatgcatt

SEQ ID NO: 16804 - DNA, 1197 bp, Heterodera glycines
tacttcggcatttagctccaaaatttattttttatttttttatactagaataataaagattatgtgtctcaatactaaattgttaatttttttgcctttttgtataaaattttacgattttacacgccctaaatttggaactttttggcacttattacccattttagcacctattttggaggtttttagaacctaaaaactaactatcttggcagtttttagtagagaccggcgcgggacgggatcccgcgcgggattttgcggaatcccagtccgcaatcccgcattttttggaaaatgcgggatttgcgggattaatccagcggaatccagtcccgaaaagaattttgagttccaatcccgcagcgggatccgcaaatttgattttttgtgcgggattatgcgggatttaattaattttttaaattttttttttcaaaaaactagtaagttttgtaaaattttcccggcggcgcctgtttttgaaaaaatcgcgctgtaaaaaacgtgtaaatagtcactccttttcccaaaaatgttctaaaataatgaaaaatgacaaaaaaagattttgataaaataattggataattttttcaagcgaatatactaaaaacatttgttaaataccttttacttggttaagaattaaaaaatttagcctattaaaatatttagaaatttttttattatattgtatattttttgaaaaatttccgatttccgacgtttttggggtcggaaatccgatttccgacacttccgaaatttttggggcctcggaatgccatcctgataaggaccgccggacccctgttcctagttttttgaaaaattgcaccgcaaaaagtggttttgaaaagaaaaaaatagtcaaatttatgaaccgttaataatttgatttccgatcaactttttaccgtcggatccaatcgaaaaatcttagtcgacccatcagccccttttaatgcatcccgccagcccttaaaaatttatttttcagcattttttgatttttggaaattctttgaatttaattgaaatttttcgattttccaaaatcctgcaatcccgcacgggatcccgtaaattttaaatgcgggatttgcgggattaatcccgcgggatccgtcccgcaaaaaattttgagttccaatcccgcagcgggatccgcaaatttgaaatttcaggtctcta

SEQ ID NO: 16805 - DNA, 1595 bp, Heterodera glycines
gagtttctttggcacgaggactgtaagcgacgtaacgtcgatgcatttgatgaaattttggcagaaattgttgcttttatgcttgcaaaataagtctattaatattgaatgctctttgttgtattaaagaaatggggtgtgccttcaaaacgggaaagtacccacagctcagctggtgcttcatggacgaaacccaactcgtactgccccaactcgtactgtttttcaacaaaaaaaccctcataacttttgtcaaagtcgaccaaattaaacattcttggtatcatccgatagtccttaacgttctctatcacctgcaaaatgcaagaaaattttattgcttttcaaaaaagttatgcccaaaaagcgtaaaaaaacttttcgttcataacttttttcaaactcgatcaaattttttgaaacttgttggatagatagagaatttaagggctatgaatgataccaagaatgtttaatttggttgactttatcaaaagttatgacaatttttttttgtcgaaaaatagtacgagttggatttttcccgtgcttcatgagtatttggggaattgacgaacgatctgtggtttaagaataatgagtcgaatgtaaaaccttgaaaattaatgaaaaattttaaaaacatttatttatttgaatgattaaaattattttctttccattttatccttttttataattcaatttctgatcagcattgtcggttttactcactttagttggcctttaaagaatttattgtttaagcaaacaaaaatattaattaaatcccataaaattaaattcatttattcataatctaattgtaaaacatttttttaaatgggattttggacccccaaatttggcatttgaaagtcttccgttgcttctttttattgatggtttgccgatttctccttgattttggaggtcattattattattattatttttctgtccatttgcatatccgttttccatctattggctgagaacaaattacctttacaagcaaataaatcgttcatttattcacattaaatgccggctcatcacagaagagcatagctttttcaacttttcgatttcctgacgaattaattaacttttataaaaaaccgtcccataaaaaataattttatttgctatttaaatgctatttttattatatattcatttctatgaaatatattattaatttttgatccaacattttttttgggggggggggggggaacagttttccaggcgcaacgaacttaaaccaaaaaaaaaatttatcccgaaaatggctgatccttgcatttttcttaaataattcctttgacttttatctcgaaaaacttctgaaaactctaggttaggtaggcttcgtgcttcgtacgatttccactgattctggcgcttggcggcagcgaaaatcctaacaaataatcattaatttttaagatttgtgcaaatccaaaagcaaaagaaatgaatttttggcattttgcaattgttttgcttcatttatgtatgcaaatgttgtcagaacccactgctgaagtgcaggagaatggtatgtttttttttgttcaatttttaattat

SEQ ID NO: 16806 - DNA, 1010 bp, Heterodera glycines
tgcaattgaaagcgtgtaaaatggttgcggtaaaattaggcaaataatcgatactagaacacacaaatcagtcgtagtgaatgagagaaaggtagacaaagaaaagaatgaatggcagacaaacagagaaattttggtaagggttagaaagataaaaatgtttttacaaaattgaaaagaataaacaaatggcggatactaaattaaaattttgcgatttttatttaaaaaccgaaaaaagcacaaaaattgtccatttatcactggtactgtaatatacaacgaacctggcctttgaccgcaagaataagtgatagatgcaattttaattttaatttattagaaactggaacggtccgtttttaaattatttggttttcgttaagtttaatataaaaagaccaaaaatatacaaacaaaatcattatttccattttttcaatattttgatattttcatccatatttcggtattttacccaacaattttaaatatgcaccgcgaaaactcaatagttttcgaaaaaaatttccattttttaatttaaaattaccattgaaaaattttaaaatttttttaaaagaaaaaattcaaaaacaataaatttttacacatatgcgcttttgcttttagtctcaaaaatataatatttaagatattttgaaattaaatattttttgagaatttataactagggatcagggatgggcgaaacttcgagcttcgtgcttcgaaaacttcgcgttttttgggcttcgaacttcgagattcggcttcgggtaatttacccgaagtttcgggaaaaatacacccctaatgattggcttatggtaagctttaatttaaatatcattataaactttgttttttaatgtacagtacatgttaaatttgttaacataatacgccaaatttaaatttttcctccggcggcgcctatcggcacagcagtgccccaaaactcctttttcttagaaatatgggcccaaatcgcaaaatttgataatttt

SEQ ID NO: 16807 - DNA, 1762 bp, Heterodera glycines
ccccctttagcccctggggtggttgggggtctgaaaaagttagacttggggttagcgtggattaacgaaacgggaggcgcggcgcttttgcattttattatgtaacttgtcggggcgaacatttaaaaaaaatttcaagtccgtagcaccaggttgagtaggccatttgtccggaaaactggtaaaaatgaccgaatttggctgggggccggtgtattagaggtggcattggatgtgaaatgtggtgccaacgtgcttaaatgagattagaaaatttttggacaaagttccgagttggtcagacaaagtgtcgacttggccagacaacatgtctgcccctgacaaagtgtcgaaatttcaaattgtgcgcagaatgaatttatttaaaaaaaattctctacagcattacgagtataagaaaaaaaagttgatatttatattatttccttttccctttctttcactttcctttttccttttccctttccatttcttttcccttcacttttccctttcccttttcttccttttgaacgactaggctcggctgctctccggtagccggtaggggtcaactccgtctggccaactccgtctcagcaatgttcaaaaagctataacttttttctttgttggccaaacttcacaatcatggtatcattcgaaagccctagatgtttagaagatatttataagctatttctcagtgattaatcagctctcaaaaaattgtcagtttaaaaccgcaaaaaaggcagaattttcaaagttttttatttctatctttttttatagttctaaattttctgtaatttttagtaggctaatagagcctgtgaagagctttcgaatgatatcaagattgtttgattcggtcaataacttcaagaattatattgactcaaatttggctcagacggagttggccagacggagttggcccgttccgccggtagctgcttctgcacgaagataattggttttttggaaaatcattagacagaagaattccgctgaatgaaagcttttttgaaagtatagatagaagatgaaaaattcagcaaaatactgatccaaaattcacattaatagaaaaaatttctttcattttttcctgtttaaaatgttcctcaacgcgctttttgagttcctcgactgttatggcttccatttcgttttacatgggacaatatttcatgttaatataaaacaattggacttttttgttagcgctgaaaaattatttccacccaaaccaaaaagcccgctggcggtggataaaagagtattgagaaacgaattaatatatcatattttggcgcgattcagttatttccaccaaaattaaatatgaccgccagggatggcattccgaggcccaaaaatttttcgggaatctgaattctgaccacaaaatgttaaaaatcgtaaatttttttattatatttcattttaaatgttcttcagatgaaatgggtggaagaaataaataatggtgaataaaatgaatggaagtgaaaggaaaatggtaaattaaataaattcttcagatgtaacggaagtgaaaggaatttaaaaatgttgaataaaatgaatagaagtgaaaaaagggtaaaaattttgaaaaatgagaaaaaggttaaacaaatttgaaatttttgtgtatttatacattcttcacagtgacatcaatggccaatgtcactttgtccgtcctttggtcgtataatcctttgctcgagtccatcaattccttaatttt

SEQ ID NO: 16808 - DNA, 2958 bp, Heterodera glycines
acagtcaattcgaattcggtcatccatcagaacgaaggagggaattttgatggccaatcccaaaacatatttttgggaatggtgaaaatcgcaaatgaatttatggccaattaggcaaataatataaactgcttttgtgccaatattttccaatttttctaaaaaaaaataaataaccatcgtccgttgcgcgtgtcgtgccgtggcactcggcttggcttcatctcccccgccccgctcgcctggggctacaaaattcgctgctaattaatatcaacaccgtcctcctctcccgtcctcgtccctccaccctcagcagcagctcgtcgctgtgcccatatcggcacttgttataacagaaataagcccctgagggaaagggaaatgatgcgatgagtcccttcccccaccccacccccgggggatgggcgggggagaaaaggtggcggtgaattattgcaatgcaaattcagcggaccaataattatgctgctgctgctgctaataataaggattaataagccaaagcgcaaaagggaagtgccaatatttccaatatttttgtgtcaaatgcgccttttccccggatttaattaaatttttgcaaaaattttttccttttaaggattttttgcctgttagctgctttatcttatcgcgcaaaaatcattccctcgggggattcagctaaagttcaccaaattgattcgctaaaatttggccataattttcgacggaattctcaacaatattttagcccataaacttaagcccccctcccccggcttcttcttttcccttttcgtccctttggccatctgtcgtggccaaagatccccggaggcatttcatctgtccatcccaccaaatgtcctcaacggacagagcaaatcagcagaggacatttgttctctgctgtcgcaattcccataaaattggcaaatcgaagtttattccgtcggcactttccgatggcaatccttcaattttcaatttaaattttggtaggtaaatgtattttatctataaatacatattaatggtcaatcaattaaacgattgtcttctttagcagaattccgctgtttttactcaatttgaattgcctttctcttatcagtgcctccccccttatcaccagtgatcactccaatcgcttctctcttttcttcccaattcattcatttccttcgattattcacttttctctcatctcttcgaatttcttctgccacaaaggttaattattaatatggtcaattagtttaaaataaaataaaattcagagaaatggaggctttttttgatcggaaatgcactcagagatttaatgttgaaagaggaaaatattagcccaaaaaataactttttacaaattcaaatttcatttcagttctgttcatttttggcaaaactgcaacagatgccctccctctcccccccccccccttatactataccactaattcccccccccccccctttgcccaccttctgcccaattaatgcccattttggccccttttccccattttccatttgcccaacagacgccccccccccattcattgtgaacaaaaatgaagtgaaaaggtaattcaactgatgagacactttaacagccatttactaattggggaagaccaaacttttctcttttttttgcacttttcgccaatgaattaattaatttttgcttacaaattccatgcgattttccgtcccccctcccccttttttcgattgtgccaaatatcattccccaattcggtcaccacgtttttcttcagccattgtcctgctgaatgtgcatcttccgtctttcttggccctccgagaagggcacagattttcgtccaattcccagcggagtgccacctcaaaggtcactcccccgccgccattctctgcccattctcacctcccctggggggacgggggggggggggggggacaggtgctattcccctctccccgtcccgttagagtccgatgcataaattattccccccccgcgtcgccttttgacaccattcgctgtgtcctccgccggtgagaaagggtcgagagcgcctcgggagaaaaatgttgcggaaatttccatttcaatgctccccaatcaaaagttgttttgcctcataaaagggctgtcaaccatttatttgtgtttatttttggcacaaaaggttttcccctgcaaaattttcacacatttcgcccgggggtcataaatttgatacaaatgccccgaggccaaagagaagaagccgtgccatcgtaataaattaatgcccttgagaaagtcctctccccttgctgatttcttctctcctttaaattaatggctttacccgtcggtgtttggccaaaagtctcttcgaatgtcccggctttccccccccccggcgctttgtgctgagagtgttttcgggcggtccccaaatattgccgagggtcaaactttggattgattgaatgccccgggggaacattttcataagaataagcaaaaggggacgacagagaaggaagggacaactgttagccacactctcgacgaaataaactcactcccggcggcggcattatttgtccgtcccttgccaatttttatggacaaattcgcccaggggattaaattaatgagcgaatggccaatccaaaaagggcaattaaaaattaaaagtgttgcaaattaaatttaggctttaaaatctcgatttcaaaattgatccaaacaaataaaacaaatgaaaggctaaaaggaccattcccttttcttccattattttcattaaatgatgccttcgaggcacggggatttgtcccgaatttgcattaaattgtgggaatatcacccggccggcacccgtcccccccccccgctcattcattcaccggatgttatcggggggatcaacggcgagacggaggaaggggaaaggggggattaggcat

SEQ ID NO: 16809 - DNA, 2908 bp, Heterodera glycines
aaaaacgcctcataattaagagaatataaaatcttctctccaaagtttttattaagtgcacctttcccaagggccatcgggaacatattcacacaaaccgaatcctaattcggatcatcccaattttcgaaatcattgcgcattaagcggtactgcaatgatctgaggtgcgtaagggtttcatcatcatttggattttccatagcatcaaagccttgaaccaaatttcttatggccaaatcgttgtctctataagtttttttcctttctctaattcgtatcccttgcgttggatccaattcgtatgttggagcaattgtttagttaaaagcatatctagcggcacatgccggtgtcattttgacagcatcaatgatcgcaaccattacaactttgtccttgtccatatttatcctcatcaaagaagttcagagtgtgttttaattatttttaatttataaatttattctttttatttgtaattttttattaatcacttatagaatgccgttgtgatgaaattctaaaagacttctttcccgttacattcgttataaacacttatgaatttactgtctctgtgaaagaatacacacccaaagatgtcttttccaaaatctcgaaggaaattgggcatcctgttgaccaaatatgttttgcatgttagtgcttaattcaaaaggactcatattaaagcataaattaagctccgtctgattctgcagtgacgagaaaaatcaaaaaaactgaagccgacatgggacttcttttactctacacaattcgtggacaaggaaggctcgagatatttgagtgtccctaaattagttttgtgtgaatatgttcccgttggcccttgggaaaggtgcacttaataaaaattttggtgtgaagattttatattctcttaaaatcctcaaaagtcgggtcctcaaaagtcgggtcctcaaatgtagggtcctcaaatgtagggtccttaaatgtcgggtcctcaaatgtcgggtccccaaaagtcgggtcctcaaatgtcgggaaaatcctcaaaagtcgggtcctcaaatgtcgggaaaatcctcaaaagtcgggtcctcaaaagtcgggtcctcaaatgtcgggatccccaaatgtcgggttccctaagtatcgggtccccaaaagtcgggtccccaaatgtcgggatccccaaaagtcgggtccccaaatgtcggtgccccaagatttgtaaaaacccaaaaaaaaaagggggggggctttatcacctattttagtacctatttcattctttttagcacctaaaaatcctgtctctactattgagaaaagttcaaacgaattttggcgaagaagaattatttctttttttgaattctctgtataaattttgctttttagttgcactattttaatatttgtttacctgatccaacttgagtattcttcgaaacattcttcaaaaactgttttttatttttcccttttggcgatttcgatacgatttgctcattgtcaagaaggtacgggtcgcgtcccaattcatcgttcacttccaacaacaacccttgcaaaaacttcccttctgcgaattttgtcccatttttgtacaactgtatccaatattctacagtaacccacgtacttagatttttgaatttgacctaaatttaaagaacattggattttcctgtgttaacgaccttaatgtctaaatattttcctttgccccatccgaacaagtctcggtaaactgctttgattgcttccattgccgagctcattaagagctcgcctcgctcagtgccaaaccacggcttcacacacagacattcaaatggattcactaaatttaaaaaaaagcctaggaacggccgggtcgtatgaatccggcttacttatataatatgaaatatgcaatggaaaaatcaaaaaaaggtttaaagcaaaaataataaaaagaagcctgctaggctgaaaggacccagcgccgggtctggtggcgcttaaatgccaaacctttggctttgtgccaggtattgttgccagccagccttttttttttgttcaaatccaattgtaaggcaggcggccacaaaattttgaggtcgtgctgggtcatttcgtaaaatccaccacaatcattcccacccataattactttcgataatatacttggaaaatattttgccaaatttatttataataaatagataatctgttataatttaattaatagtagataatctgctatgatttaaataattcatgattttaaataaaattttgactacttttacagaatttatgttacaccctaacaattgaagaaaaagctcaaggctcgatttaaaaaaattatctaaatatttgtatgtgaaatttataaatgagttacaaatgttagtttttagccttcggaaaatttcatataaacttctttattatgttttgactttccttttttggcatattcttatttttgtcgagcatttaaatatgatagatcaaagtgtctgaataaaaacttgtttcggtaccagaaaagctgaagatccttttgctataattaaaatgaaaatttactccgtctcgacgatccctcgggcaaattcattttttgctgcttacattcccaacatttggcataagcatcggctgccagcgcaaacattcgccaatgtcggcaaattttcttcaattctttgaacgttttgcacaattttttgtgccgttccttttctggattggtggcacagttcagtgtgttttgccatcgtcctatttcaatgttggtacaattccattttgccacgaaattgcgccaaatgaaccgtttgctaagtgccaatgccttggccatgtcttgttcctctgatgggtgccatcatcttcgatcacttccaccgcaattatg

SEQ ID NO: 16810 - DNA, 1176 bp, Heterodera glycines
ggccaccatcttccaattactcccctcaacttcacctaatggatggccgtgctcaaattctctatccctgtcattttgttggatgaaattctcaaatttgtcgcccgacggatggaagcacatggtaaatgggggaggaagagacggcaggaggaggagaaaagggaggaggaacagaagcagcagcaggcgaaagcggaaaaaaataacgggaaaaagaagcagagcacgggcgggaaaagggctaacactaaaaaggctgactaatcggaggatgacatcacagggcgtgtgaaggcggactgaccgaccgaccgacgacggcccttctcacacatgccctaccgtactccaccgtactcttctcccctccctttggcccatttgttacgcttttgcttgggatgctttggatgttaacatgttccaattgctcgcccgttcatttttcctcgtttcttttgctgttcactttatccttcgtctcggcatattccctccgcctgctcattgtcctatccaatattttgcaatgctttgaccccctcttacgaccttttgttttcatccatcagttattttgattaaaaagatgtgctaaataataacaagcttggtcccactcaatcagtaacaactaattttgaatttcactaactgcgcatgctctgaccaactgcttttggaaacaaacgacaagatacagcacatttactaaccaaaactaccggaaatcgggtcgatattttaacatgattttacacttttggggagggcatattcaattgtcctaaaactggactttttcgtggctaattcaaattttggtctcaataatttaaacggcgagtaattttgggctcagcaaaaagtaacactttttggacaacatttaaacaaaaaattttttattagtattttatggagcaaaacacgtaaaacttaatcaaaaaacttagttttgatcatttaaatgattattaaataaacattttaattttttgataaggatttttaaatctataatctttatctagaaaaaaaaaattagatttaggcgaccaatttataagaaaatttttcacttaggggtgtattttcacaattttattgcatttttaatggaatttttcggaaaaccccgcaaaaaggcaccaaaacggcaaaattccaaaa

SEQ ID NO: 16811 - DNA, 2438 bp, Heterodera glycines
  unsure (1)..(2438): unsure at all n locations
tgcacagtgaaatagcaaatatatattttagtttttgtgtatataataaagttccgagtacaaacgatagcttataatttaattatagaatatntagttaattaaacaaaactatttgaaattaaagaaagatacgagtattgcaaaaggaagtgacagaataaaggcactcatttaacaaagaatagtaacaattaatcgcgaacacagcacaccccgtcccattcactcccctccagtgacatcaacgacgctgaccccaaacagcggttgccgtaacgggcttctgctgctgtgcagcaacagtatcaccagacagtccggggaactgttcgattgagtcaatctgccatggtgcgttcaccatttcgatgtcatttggctcagcctttggtggcggtgggtcatcacgtcgtacaatgtactgggattcatcataaaggtcgaactgaaaaactgcgtttttttttgttggacaagtagtgagatttaccaattcttcgatgatctcctcaatgcgggatttggcccgttcgacgttatcaacacggcctcggactgtgaccaaagagtcgcccgtctcttgtttcggaaacgaaatttgacatttaaattccttttgaatctgcttgagcacttccgcgccccgcatgatgaagtgacgatggtatttggggtcgacagtaatttggatttgcgcctgggcctccatgtcttccacaattgcttcaattcgagccttcgctccttcgactaattccttgcggcctcggattgtgactaaagagtcgcctgtctcttgcttcgggaacgaaatttggcaatcgaattccttttgaatattcttgagaacttccgcgccacggatgatgaagtgtcggtgatgttttgggtcgacatcaatttggatttgcgtctgggcctcctatcatgaaaaaatagtgaaggaataataaaaaggcttgcttatacattagttatagcgctacgaattatgcccaaaatttaatcagataactaaacgtatgttgttaaattcaaggcgccagcccggttgttacttccagtgatacttaccaagtcttccacaattgcttcaattcgagccttcgctccctcgacaaattctttacggcctcggattgtgaccaaagagtcgcccgtctcttgtttcgggaatgaaatttggcattcggactctttttgaatctgctttagcacttccgcgccacgaatgatgaagtgtcggtgatgttttggatcgacatcaatttggatttgggcctgggcctccatgtcttccacaattgcttcaattcgagccttcgctccttcgactaattccttgcggcctcggattgtgaccaaagagtcgcccgtctcttgtttcggaaacgaaatttggcattcgaaatccttctgaatattcttgagcacttccgcgccacggatgatgaagtgtcggtgatgttttgggtcgacattgaattgaatcttcgattgcggttccttaataaattggatggtgtctactctttgtcttcccattggctctgccagcccaccctttcttcgcccggtcgcgtgtcatccggcgcgttcctcatcgcctcgaagcggggctcgctttccaatctcgcaatttcggcactgagctgttgctgagcttgtttgaccagatcggtgggtccttcgatgtagatgacactgtcttcgaaatcgatcttcaactggtcgtggttcggcaccaaattgtgcaaattctgtccctttgccccaatgagaaggcgtcgcatccattctttgtaaggcaattcaatggcgatgttgctactcgctttctggtagactaaacttggaaagattttaatggagaaaaaatcattgaaaattccaacctgcgccagcggcgtcaccaattttgtccttgggtcctctgagaatgacagtttcggaatcgctgtcctctgggggcaactccaccagcacctccgtttcccggaaaatctcctccaaccccgcacgtttttggccgatgacgtagcgatgctgcgcctttgggacggtcacttccacggagacaacggactctttctaaaaaatcattaatttactcgtgtgttgcccaatcagcttatttcccgtgaaccttctcattgaaaatcttcaaaatttcgaccgccgcctcatcgacgccgtcgcgttcgcccgttatgattatcgtctcgttgtttgcgtgtggtggcggaatgttcactttggcgcccgttcttctcattaagtcttccactaaatgttagtaggcaaagttaaattcggattgataatgtctttgttttaaataacatacctttctcgttgttcattcctttgatccacgggtaaaaagctcgcggaaatgcaaggatttccgttttttgtttggcctgtgaaatcaa

SEQ ID NO: 16812 - DNA, 3768 bp, Heterodera glycines
tagaagcttaagtcctctgagccattcttcgaattctttgtctggtagaggcaatactttgaataaatcgtcaagagtgaaatttttaagcttttccattaatctaaaaagcaattgcgacaataaaaaagaaaaaaaaattttgaaaaaatttgaccccaaaaaggggggtacacacgcaaaagagggaacccccccaaaaggtaagataccacttgcttataaaacatctcttattaaaggttcaatgcaaagtgcccgttttgttgtgttcagcgacaggctatgacgtctctaatcgcgtggaggaccttgcattcgaactgaaaatggacattttgtcaattgcacttgggtcagccgaaggatttgaacaagcggacaaagcgttgcattcgactagccgatcgggaagatggattctgctgaaaaatgtgcatttggcaaccgaatggttgactcaacttgagaagaaatttcgccttcacaatccacacccacattttcgtctgattttgacagctgaaattggctccgctctgccaatttctatgatccaggtgtataatttaaaaatttacttttttcaaattccaactttttttcacgcttcgcgtgtacttattttcgaaccatccacagggctgaaggcgaatctgttgcgttctctttcctccatttccccagcacgaattgcgaaggcgccagcggagcgagctcgtctgtacttcattatttgctggttccatgccattgtgcaagaacggctccgctatcagccactcgggtgggccaattcgtacgagttcaccgacgcagatttccgagtcgcgtgcgatactctcgattccactgttgacatggtcgcacaggtcattctttgttttttgtgatgatggttttctttttctatttagaacagggcgaatgttaagccggataaattaccatggctggctctccggactctgctctctcagtgcatttacggaggaaaaatcgacaatgattttgatcaggcaagtatacagtgggtttataagggaaagaaataataaaaattttcatagtattataaatgtttggttttgaatatcttttagccattttctcacctttctcgctagatgcattatttcacacttaatataatttaggtgcttctcgatactcttctcgacaaactgttcacatcaaattcatttgacgctgactttattctcattgaaaacatcggagtgaacgccttgaacatgccagacgaaactaactcaaaggatgggttgatcaattgggttattaacatcaaagccttacaaaagcctaattggattggacttccaaacaacgcagaaaaagtgcttatcgccgaaagaggtactgctttcacaaaccgaaatgccatcatgacgaaatcatttatttatcaattatagggcaagaatttatacggaagatgatcaaaatgtcggacgatgaacttgcatacgaagcggatgatttggaacgtaacaagcaagcccctacctggatggttcaattttctggacagtgcaaatcttggctcgatgctttgccacaagtataccgtctttccctctgaaaagattgacattcatttaattgttttcgtttattgtttcctattctattttttttagcaactccagcgtcttcgacggactaaagaaaatgtgcgcgatccgttgttccgattctttgaacgtgaaatcaacttgggcgccagacttttgtccgatattcgacgggacctcaacgaattgttgtccatttgtcatggggatcagaagcagaacaatcacagccgtgaattaatagctgcattggtcaagagaaaacgtgtgccagacaattggctccaattttccgtgccaaaagacgtaacagcacttgaatggatgcgagactttgtgcaaaggatggaacaactaaagcgcttgtcactttctgaaaatctgagatatgaggaagtttggctgggtgggatgttctttcctgaagcgtatataacggctacgcgtcagctggtagcccaaacgaatggctggtcgctcgaacagatgtacatgcatatcacaaaaacggaggaaggacaattaaaatcaacggcattcacattgacaggtggttgatgatgatgaacttcgttttcatcgcacatttatttatagaccttcgcgcaattggcgttctttgtgaggccgacgaaattaagctgacagatgaagtgcatgttggagtgccacggcttcagttcacgtggaccttggaaggacattctccagcgagtgttgtggtgcctgtttatctgtactccaacagggccaaatttttgttcggacttaatttgttaccaattggatttgatcattctatgctaagccagcgaggagtcgcctttgtctccaattgttcgctttgattgacttttgtatcttttgtctcaaagaatatttatttatctgtctattgtttttaatttgtttccaatgaataaattttgaattgcgttttttgcagactaaattagggaaagggatttttatttttcccttatacttccatgatttatgaatagtaatcgaattaattgccttgtctaatgcactgctttagagccttatgcgcgttagggtaaagtaaaaagcacagtaaaatattaattaatggtgaatcaccaaatcagatagaatgtaatgcagattcaaaataagaaaggaatgatcatgattcgaataaatccaaattgaaaaattttaaagtgtgtaagccaatgaaacaattggatgggtctcacatactttcactcatcaaatcaatttgcttgctggtgcacattgagaaaatctgggcctttcaagcgaatagcttctgcgattccgttttgaggtgtcttagaaagtagctttgcaacatacatccctatataaaacacaattagaaattttttttttgtaaccaagcaagttcatggaactgtttcgaattgttggagacttgactggccgctgtttgatttaaatgagtaacattgttcagtatttttggttcattaaaatgttttggctcgattttgcgcatttgagtcgttccaaaatccggcaccacgtcgggaggaaactggttaaagtgaaaacaaagccagtgaactggaagggtgctgtaattacaaatttgtctctccacctgtcccatttgtccttcaaaggctgcaattgatgaagtgttgatgatcactccgcgctggtcgttttcgtccggcacattgtcaatcagcagcgggagggcgtgtctgatcacgttgatggtgccgaagatgttcacctttgggaaacagttacaggatgaatggacggcattttggcggtcaaacgtcgatgagtcgccgaattttgtcgaggtccatttgggctctgctcgacggattgtacaatctctgcgcgaaagcgattccagcgcaattgaccaaaacattgagaccaccaaatttctccgttgttgcgtccattgcctttttcacttgatcatcagacgaaatcttaagaaagtttggaaaatacgaatgatttcggttcagtgaaatgaacaaaaaaaaagaagaacgcacatcgaccggagagaaaagcacattgtcagtggtgcccaattcctccaccactttcgctacttaaaattttaaaattcacgtgaaaccaccgacgaaccaaaagaccccccccatccactgcgaccttcagacatggcaaa

SEQ ID NO: 16813 - DNA, 993 bp, Heterodera glycines
tgacgatttttcaaaatttgtaaccactttccaaaaagtctgaaacgcaaaataaagcgtatatacgtttcagcacctcaaattatgccataaaaatgcattttggctaatttaggagcaaaaataattttcatgaaatgcaaaaccatggggtcccccctatggttttgaattgcaaaattaaatttaatttcataactttttttaaattcaagataaaaacatgagataaagcacattagattgggcttaaaattctctgcaaaaaagctcttagacgattttttgataaaatcaactcctgacgagttatggacccaatactgaaataagccctcaattccggaaaattttctatttccaaaaaaatttttaaaattttttctgaaaatgacaccaatcgatagagcatgaaaaacggttgcttgaaagtggtcttcgttttgcccggaaaaatctgtaaaaaatcataaaattcaaaaacggaaaatttttgagggggcctagctcgaaaatttctgaaaatttcagaaatccaaaaacatggttggatagagctcgtcaagctgtacaaaaaagccgcttacaccgacctcctccaatcaaaccccggcgagttatttgccggcgctgaaatggcctaaaaaagtatgcaatttttgctcagtttttcggaaaaatcggtaagccctagggggtcggtgaagaagcaaaaaatgtgccaaacattccaacttaatttcctatgggagcggatttttcatttaggcctttaaaaaatttttgaatcccaaaaacggcaaaaaaaaatttaaaaaagccatttcagcgccgctggcgctcacctggccaccggatcaaaaaatctatagttttcccagatgcgcctcaaaaagttgtccgcaaggtcgaaatcccgagcccctccctccagcggtcttgagatttagtttttgaaaacgaaacacgatttgattattagtgtattaaact

SEQ ID NO: 16814 - DNA, 1837 bp, Heterodera glycines
ccgcttcgcggcctcaggacgggcgcttcgcgcccgtttttttaatttgtgggagggatccggccgcttcgcggcctcaggacgggcgcttcgcgcccgttttttaattttttgtgagacgttcggccgcttcgcggcctcagactggcgcttcgagtccgttttttaattttttgggggatattcggccgcttcgcggcctcaggacgggcgcttcgcgcccgttttttaattttttgtgaaacgttcggccgcttcgcggcctcagactggcgcttcgagcccgttttttaattttttgggggatattcggccgcttcgcggcttcaggacgggcgctccgcacccgtttttaaattttgtggtggatatcggccgcttcgcggcctcaggacgggcgcttcgcgctttttctctatttttaaagctttattataatttttaaatgcataatatgaaatatttattgaaattgaaaggaaattatttgtcgaaagtcaaataaaataaaacttttattcatcaaaaaaattaaacataaatcaaacaaacaatatttaattaattataacaattaaataattaattttaatacaaagcatttatcaaaaattattttatttaaattaaaaattatttttttattaatttataaatcactattttaaattaattaaaaacaaagaggtacaacagtgattaaatgagttacaatagtgattagaagaggtacaacagtgacaagaagaggtacaaaagtgataagaagaggttcaacatggtttaaaattatataaataaggaaaagtttcttattaaagaataaaaatcgaatgcattgaatatttaagaaatttgaaatgatattattttttacagataaaaaataataatgaaattatttattaaaaaaaatttaaaatttacaaccaatcttcaaattaattaaaagcattgaaaaataactcaaaaataaatagaaaaataatgtacaccgatcggatccgaacttcgcccccccccccaaaaaatgatgcctcagaatccccaatcacacagggattctgaggccttaacgatgtccaaaccaaaatctgattacatattcgtgatcagcaccctaaaatgtccctaaggacatgtttttggatggtttttgatggaaaaaatttttcactcaaaaatcctgtccaccccctttggtcccgaatcccaaaatcacttttatttttgtatctttttttaaaaatgtgataaaaatataaaataaaatttatataatagagcaagaaattgcggatttttgcagtattttacttttacagtatgacttttcagaaccgagttatgaatttttttctgaaaaatcaaaaatttccagaaattctggaataactttttttcttttgaacattataaaaccaaataaatcccataaaattctcccgattttttgctatttttaaggctttattatagttaaatcgatgaaaccatcaccgagttatgaattttcaaattttaatccaaatttccaaggaccaaaaaaattttaaaaattttcgaattttaaaaaattccaaaaattctgaaacttaaaatagacatcataatcgtactcagcacctcaaaatagcccagaaaaaaaattttcacccccattttggcccacaaaaaaaatttcgaaaatttctagggggcctagctcgaaaatttttgaaattttccagacttatagtacaccattcgatagagtatcgaaagctctacaaaaatgttctaagacaatttttcgcaaagatcaactcctgacgagttatgggcccgggactcaaat

SEQ ID NO: 16815 - DNA, 1424 bp, Heterodera glycines
  unsure (1)..(1424): unsure at all n locations
tcaaaaaaatgtttttaacgatttttaagcgaataggaaaattttttgaaaaaagttcgagtctcgggttttttgggtctcggtctcggggttttcggtctcggggtcgagtctcgggaaatttttggtctcgaacagcactaatggttagcataacaatcagaaaaatctgattaacaaatgaataaaaaaaattattacaatagtaggaaaaaaaagaaaaaaaatcgtcaacaaaaaaaagaacaaagaaatcctttgcgttttaattatttttacggattattgaaaagaataataaaaattttggtgtaaaacttatgtaacaccctaagtattataaaattttttaaaattttcgtccaattttaaagacgtataacaccttaaaaaagcccacgagcaaaaaatcagaaagtgaccaaaaaaccttaattaaaatgcgctttatttaactaataattttaaaagtaaactaacagcacaaacatttatcagataacaaaaactccctcaaaaaatcacagtgaagcaaatttgttttctcatctgatcagtgttgcaattcaaattcacaattttttagcaattatttcgtatttttggattttcatctttaatttcaaaatattatttcatttttattactttgagctcattcaatattcgttgctaaaagaataaatatttcaacgaataaattcgattaaattttttttacagattttaccgaacaatgaaaattcgtcaaattttgacgataaaaatttttttaataaatttagccttaacatcttatatttctttaattaaatcttaaataaaaaataaatttacatttcgatattgttgcaaatttctttttccaagttctcaaagttcgacttccaatttacatttttctgcaatttttgggatatttaactcataaaaatgtaatttgtttgggaaatattaaataataaatcgacattataataatggtctacaaatctaattaataaattaaaataattatatattaattaattaaaatcatttattccgtactgaaatgacccgccccttccgatcacccatcactcatacttttttagcttcggctcaccacgcaaaacaatgaagcctatgaatgtataacatcgtatttttgatttattttctgtaatatgtcatttgagtacaatctcgaaatgtttttggaaaaaagtgaaaacgaattaagtttggaagaacactggttggggatggttttacgaaatgaggaggaaattaattatggaataattaaagaggaagaaaacggggaaaatgcgcagagcaaaggcaaaaagcaaagcacaaaaattttttatggancaacggacactgaaaatgttcttcggatagattttgacggaaaaatagcacaaatgtgcgaaaaa

SEQ ID NO: 16816 - DNA, 1289 bp, Heterodera glycines
ggcttggccaagtgaggcgggattggttcccgctcctcttcaccattctcgtccctttcttctcttgacagacttttgccaaagatgatcaatttttgctattttgagacaattggcgcccatttttacattaaatggcttttttgaagtcgcgtttttaaaaaaaaaactatcttttttaggggggggggagtccggatatataatttcatcgaaaaacttaagaaaaatttaaaaacgcaacccagaattgatttttaaaatttttaaaagtaactacataaaattttttgaaattttgtgacaaacttaatttaaaaggtgggattacggattacggatttccgtaattgaaaatccagttacgcccagtcctggtgcagtgtgactacggtcactgtcctgaccaagcaaaaaagtagaaaatattcaacaaaagaatggcataaaattgaatgaaaatttgggaaaaaattgggcataaatcacaactatatttatcaatggatcaaagaatttaaccttcaaaaagaaaactgttataaatcaaaaacgggtgaacaaaattgaaattgtttaaaaatttaatgaataaaaatgaatataaacaaaaaaaagaaaatattcgaaaaaagaatggaacaaaattatgaagaaattgggaagaaaatcagagtaagcagtaatctaattattagggctataaattatatgcttttgcatatttttcttcacatatgctataaaaaagggggctcaaaaatagcatttatcgttaaattttttgatttggtgaaggtttttagtgcatataaaagcatattttggtctttttaagaatgaatgcatatatagccatttttgggcttttaaagcatatttcggtcatttttagcaaatttttgtaagaaaaataataaaaatgaaaaatacacccctaaggatcgacttttatgggaattaaaaaatacacccttaaaaatcgaaaaattttgaactttttctaagaacttttgaaaataaattttgatgcaaaagaaacaaaaaataataattttgtttgagtattaaataaaaattcaaaaaaaaaataaattttgaaatttcaaaattttttgcaattgtctaaaaaaagctccttagccattgttttggagtttttaaagtcaattctgaatttttgcacaatttttgtcatttttttgagggttaaaagccatttttggctgtttttaaggcatattttagtgcatatttgggcatttttcgggtttttagagcatatttga

SEQ ID NO: 16817 - DNA, 902 bp, Heterodera glycines
tgtttggattaaataggccaattagtgttgtcctactttgtgaattgatcaaatataaattctaacataaatggccacttttcaaaaagtaaaaaatatatttttatgtttttcaattttttaaataattcaaaatttaaataccattttcaaaaattgttttgaatggttccgtaaaatcgatgtccacaatttcagtgctgcacaataaatgcgctttaaccttttccagatttttgattcccatttcgccattttcacattgtccgttgtttttgtaacaataagccaaggtaaacacctaattaaaaattaagaacataattattttaaaatatattattttgacaaaaatcattttattccattttgcgatttattgttgctttttgtgacaaaatataaaataaaatgtgattttaatgagtccttttaaatttcgctgagtaaaaacaacaatattagagatcggcctggatccaggcctggattttttgtccaggaaatctaggtccaggtcaatttggaaatccaggttcaggttcaggctttttccaaaataccagtctctaaataataccaataaataattaaatataaaaaggaatttacactaaaatacattaaaaaataattatgattattaccattttaataaattattttacctttatgcaattgtcccggttaataaaatgtgaatcggaaaatgctttctctgccagcgctttcaaattttttcttttaggcaacataatttttttatgcgtcttcacaagcaatagcatggcgtcataaattgaaattgagtcaccgtttgaaatggaaaattccggtttcagtgcaataaaataaattcatttttgaatagctctttataaacgataatttaattaattaac

SEQ ID NO: 16818 - DNA, 1763 bp, Heterodera glycines
catcaatcaatactagaatatttttcttttttaattgcaaatattattttttttaaagatttgaattaacgcgtacatttcacatatccggttgacctctggtttccacaagagaaaaaaatatgtgaaattgaagtaattaaaaatgatcaaaacaaataaatgccaataaaatgtttcaccggaaaaatgagaatgtcatccatcatccatccatgcaaataattttaataagaaatttttttttgcttagtttgaagcttaggatgtgttttatttccatatttcattcataactttttcgtattaaaatttatatttaaaagaaattttcttaaacatttattttttcttaaagagaaataattggattttttttgttgcttttatctcaaaatgaatggtttaaaatttagcgtaattcacccaattaagagaaatttcatgtttattttttgaatatttttattcatatttcggagatttgtgctaagttggagcttatttttggatttttcgtccatacatattattatagtttcatagcgtgctaaatttgtgagcattttaattatttttattttttcaagcaaattttatttataaaaataaaatgtagagtactaatgcattcttacaatggcgtagaaagacaattaaataaagacaaataaaagtcaaaatcacaaaaaaggaaagcttgcggcagcatattttgtggcccaacacaaatcagacatttaccgctcagttaattagacccataaaatggttaatggcattttcatacttctatcaaaacatcaattagtctttccatccaaaaaacattgaacattttaccgatttaagcacatcaaatgagccatgtgagagcatttacagcttcattagttaatttatgtacacatatatgaagaggaatgaggttttttaggtacttttttcgtgaattttttatacctatttaaataccaattttagcgttttttcttacctccttacttatgaacattttttattttctgatcgatatttaatttcccatttgaaattaatttttaaaattataattttttaatttcataaattatgttttattacagaattggagagaaatgataaaaattaacaaattgcaaattccttatttttatcagtttcttttcattcttttaatttctccttttgaacattcattccaaaaaaactattaaatattttacgaagtaataaaatggtaaaataatttttaatttataaaatatatttttaaatttccttaagaattccgctggctttgttctactgctgtggaacattgtcaatttgcttattgtttgtgaaggaaatgtgctaaaagaggtaataaattaaaaagtaacaaaaattcatcaattagcattagttacactaattaacgaatcggtgaataattcagaaagttgacaagtcttttgcaagtgccgatcttttggttgcgcatgtgaatggacagcagagttcgtggaaggtgtgcttattttgtgtattgaaagacattttaattgtttgctaaaggccaaattaaatgccaaatttgccaaaatgacgccggaggagcagcagcaattaatggggtcacgtcggccatttcttgaaccaatcacaaaaagcacaaagcaacaaaacggaaagccacgccttaataaagcggacattccgttgaattttgatgcccgacaacacttttacaagtgtgccgatataattggcaaaatcca

SEQ ID NO: 16819 - DNA, 1163 bp, Heterodera glycines
ccctcctccccccccccctccgtttttctccaccgtcaccatcacatcattcttcgatcttaaaaaatcgttcgtttatttatcggacattttgtctgactctgttctaaatgagtacttgcacaaatttgcaaatgaatttctcacaattaaaatgaatcccctaaaaggcggtgacttcttctgtttgttatttaagcttttaaattctctaaacggcatattgttcatcataacatcacatcatttccactgtttcttctgctgaatccaccattatttatttgtctaaaaggtcaatccccccattttttcccaattaattctcttattttgcccaaatattggtctgccaaaaccacataggtaggtaataataattttcgtcatacatattcacacattttgtttgcatattctcccacacaacacatagtcagtcagccatcaatatccgtcccaattttcccactgaaactgcaaaatgaaaattctttgacgtttccctctccttttttggcatttctgttgcttaccgtattttttattattaagcattatttatcaatttttatttaaaaaataatcggcaataaaacagtggcccgacagtttggcacaaaatttattctttcattcattccttcgtttgtgccattattctctttgctctcaaaacgtgattccctagcgatgcccatcgacgctgctgctttgtgcttttccattgcgcggcattaatccttcccttttgacagttggcacaaatcgaagtgagtgacggagtgaagcgccgggggagggaatgttggggaggggaggggagaaaaaacaaaagtgcctcggtcaattatcgtccgggaggaatgagtgttcgtttcctgaacaaccaaccaaccgttagaaggaggatgaatatgattatgccgaaagggcggagagggagggaggagagagaatgggagggaaagggaaggggggatagaagagagaaaaggagagatggaagaggagagaagaggagggaggagagagggaaaaatagagaggggagggaggagagaagaagagagagggaaaggagagggaagagaggaaagtatggaggagtaaggagggatgtccgggagaaccccaaaacgggagagtttaagggcgggagg

SEQ ID NO: 16820 - DNA, 1796 bp, Heterodera glycines
  unsure (1)..(1796): unsure at all n locations
gtcatgtctcgagtgtgttttgaggccaagtctcggtcttgtaccgtctctcgagcagtttaaagcaaaatcatttttacaaangatcaaggcgatgcagcactgagtgaatatgatcagaaattcgtcaacgctttgcgtctcaatgtgcaggaaggccgtgactttgggtacatttttgtcgttttggccgaccaacaaaaaaatgttttgtccggacttcagcaaaaatctgattaatttttccttgtgattgtttctccattccctcccaatttatgtaacatggcaaaattgatgaaattattagaacaaagaaacaatttgaagtcttctaataacaatatcattgtacccatggcataccgtccattcttttccccttcagtcgtgcaatgtactccccttttcacggtgaacattcttccagcaatgtccaatcgcctgtgacgactccgtccagaggtcaacaaacgctgtctttgtcggctgctttggttcaacagcagcaacaatcgggcacgtacacaccgaacgtaccgcagggggatggagcagcaactgcaacagaccgtagggagggggggggggagtgacagacctgaacacatggaaaagcgaccaatcaattatactcttcattttggttttggcttttgttttttaacttccatttacattacacttttattggttgggttggcagaattgcgcctaattgcccaccttcgacaaccgaccaattagcaaaggatcggataatttgtcacttttgacgcgggggaggacgaaaagagtccgcaaatgttaagcgtccctaaagcccagcggaggaaaagctcatttgctcattagaatttgtgccattggatagcaatgaacaaatgccctccctccctttgtgtaaacattcaatcggccgaaagaaattcacagcgaaggcacaaattaatagtgcaaatgaacgcacatttgtattggtggtgaattggcattgcattttttgacgaaaacacacaaaaagacagtgggaagggaagagaaacggacagcagagcagcagcagaagggaatgcgcaaaaatgacgtttcccttccgccgacgaagaaaggaaatgagggcaattaaatcaaatcaattaaaattgttggaaaataatggaagagaaaaagaaggcgaaataataaagtggaagaatagaatgatagagaaagggagagagaaagaagaaagagacggagagagagagtgagagatgagagaaagagagagagggagggggaaagagaaaggagagagaggtagagagagaaagagagggaacttcccccccccccccctccctgctttctttttggccgaagaaatgacttttgtttgttttgctgggaggggaggtggggggggggtcccttcccacgatcattttacgcttacaattgaaaatttttgttttacagaattgacatatccggtttatcatttttgatttaaaacagataaaaattgaaacttagtctcatcactcgtcggtgtttacatcccttcccccccccccttcccatttcatttccaaattcaaatcctccaaaatccctcgtgattcattcccttcactggaaaggccaaaaatataggctgatcgatcgcataagtcacacacagcggaaagaatctgataaaagagcagtgaaaaagaaagaatttttcaagaagaaatggggaagggtggaagtgataaacagggacaaataccatcggtgtttgtttggagttcaccgcgggggggggggga

SEQ ID NO: 16821 - DNA, 2188 bp, Heterodera glycines
accttttcaatctataccaaattatacataaaattggttttacattctctcactttcgcccaaaaaagccgacgacgagcatcagcaaatttcttaccgccctttttcacttattccgacgtcgccggcgctaattgtgcctaattaatcactaatcgacgaccgggatggatggatgggtggatcggatcatcgttctccgatcattgctcatttatttttttcacgctaatcactaattctcacatttgctgcctttattttcacagcacaaaaaaagtgggctactgcacaacaattgttgataacacagcttaattgctcaagagtcgagaccaagaagagcacattgacgagagttaaaaaaacactaattcaactcgagattgaaaggaaagcgatcatgagatttcatagattcttcggattaaagcaattgttttaccgagaaaaattcgcccgagagaatagagacaaataaaaaattgctgggttaaaaaattgactcggaaacttaaaaagtcaaatgccagggaacaaaatgcccgattctcattccaaagaatcttggttctcgatctcgagacatttcccccgatgtttccattttttaattatttattttactcgccattctttaaaaagtgtccccccccccccccacccacccacaagcaattttccaattttgcacccttttcagtaatgagaagagaatgatgagaaatcaacaatgcaaccaaccaaaccatccaacaaggaaacaaagcaacaaaggcttttcgttttaaaaattaaaataattaattaattattaaatgattggtcgcctctctctctcccccgcccggcgaaatgccctccccccttttttcgacttaaaaggtcgccgccgtttttccattcaattgcaaattgaacttcctatttcactgttcactgttcacacattcaccatctctccccgtttccccgcatattacaaattttgaatgggttgtcacataaataaaaaaaaagtgtgaatggaggcgaagggacaaaaaaaagggggggggggcgaaggacagaaaaaatggcgacgaattaaattttatgggtttaaattttttaacggtttttaaattaaattatgaatgagcagtggcgacaaacaaacttttttggatcgcatatcggacgatggaattgacgagaagagattggaaaagatgaggtgaaaaaatgaattaatcgaatgtttatgatcccctcagggtactgatcaatggatttgccaaggtatttagctgatctctaagactttcccgtaggaaaatgctggtcccattaaatgcataatctcaaaacgatcggatatccccggcttttatcagcaaacggcaattactcaaggacagggggttagcctcgtgacccgagactgataaggcctttgtccctgagattagaagaggccaagacctattccggggacttatcttgactcaatcccgagattctcgagcaactgttagttgatgctaatgatactcacctgtcttgggttcaacgacacaacagcggtcggttgccggggcggtcggcgttcatggtgctgttgctgtgctggttgggcggtgttgctggtgttgctgttacaggttgaacaacactcgttgttgttgttgctgttggttgccgaccctttgttggtggtggtggtgttgctcatctttgaacagcacgttgatgtcgacatgataatacttcaaaaatttggagtgtttgaaaatggacttgaatcgaattcgaacaaaagttgcagggcttggaagggaaggtttggaggaaaatttgtcgagaaatttgcctaaaatttttcaaaaattcaattaggctattaagaagcaaatggtggaatatggcccgaggggcgaacatcaattagccggcaaaaggaaaataaaagaggggaatgagaaagagaggcaaagaaagagagaagtcgcgtgaaacatgtaatggaagaaaattttttttttgagaaatttgctaaattttttcaattaaatatgtgcttgttaagcagcagaaaatggtgggaggggtccaaaaatgcccccccccccccaccccccctcccccctcttccccaggggggcgggggcgaacactaattagcggtcaaaaggttggcgaggggaaa

SEQ ID NO: 16822 - DNA, 918 bp, Heterodera glycines
gatgagcaattagaggcgtgattggaagaaataattatcaagttctattgagataacaaaattcagtactccgctaaacaaaatgagcaccatctggcgaatatcattgaagcagaaacgactgttcgattatcacaaagcgattcgtgaattcaatgggaaaaagtaagatctggaagggaaagatcagtttcaaaggccgcgaggaaatatcaaagcaaaatgaaagaacaaagatcactttctaatgatattacttagacacaataaaccaccgaacaaagacaaacattagtaaaaccttaataaatacataaagagcattcattgagtgaataattaggaatcattaaattttgaacatttcaaaacggcatgcataagatgtatatagatcacttgaactttactgattgaagaaattcagcatttttagccctattgggctaagggcaatgaatgacgccgggcactttttgtgtcccacctcccgtgcccgcccctcgcgggcggagtgacgaaaaattccaaaatggaaaagcgggggcggcgaacgtttgcccgccggggaggagggggtgggaggggaatgagagggagccgaggcgggagcgagcaaagcattaaatgcggagcggaatgaaggcacctcaaaaagaggggaggaggaaggggggtgaatgcttctccccgctgttcttttttgttgtccgtctcctgccgagccgacggacgacgacccgatttattctggccgagccgacgcttatttgtggccacgagtcgattcgattcgatttatggccgagcggaagcgtcggggaagggcgatatattgaggctggctgtggtgccgtcattaatgaacagcagccgaatgaggaggggggggggacgggagagaaaattcgggaacgg

SEQ ID NO: 16823 - DNA, 231 bp, Heterodera glycines
gctcgagcaggacctgcagaagctagcttgatggggatcagattgtcgtttcccgccttcagtttaaactatcaagagagggaggggagcggcgcgtagcgggggaggtgggtggcggaagaagaaaagggtggggggagtatgagtatgatggtcaatatggagaaaaagaaagagtaattaccaattttttttcaattcaaaaatgtagatgtccgcagcgttattata

SEQ ID NO: 16824 - DNA, 2807 bp, Heterodera glycines
ttcaataggttctcgccctaaaaggacggaacagtacagttctcgtcctaaaaggacggaacagtacggttcacgtcccgaaaggacggaaccatgaaagagagagaaagaatagagaaaatttttaaactgcaattttttgaaaaagatttcaaatttggacgaggaaaattccattgattcacgtcctaaaaggacggaaccgtaagatctcgtcctaaaaagacggatccgtatggttcatgtcccgaaaggacggaaccatgaaagagaggagagagagagagtagagaaattgtaaaaacgcaattttttttgaaaaagatttcaaaattggatgaggaaaattcgctcacgtcctcaaaggacggaaccctaaggttcacattccgaaaggatggaaccgttggaggggggggggggaatgaggagtttaaattttgaaaaaagaaaggtatatttaaaataaataaaatgagatttttgtggaaattgaggaaatttacgaaaaatgttaagaaaaaagaaaaattattggtggaaatggggggacgacggcgaagttacatcattatgagcttttttggcgctccttgcaaagagaacaatttagaaattttttcactttttttttgtttatttttacacataataatacatattaaacattaacaattgcgacgctactgtaaaagtggtcgatttttaaaattttttgcacttttttggtctaattttttttccaaatttttttacaaattgactccatttaggctattttttgcaattttgtattcattttcgttcggtttagcactcccgtgtattgttgcccccccccccctcaaaatctttaaaaatttataggaaatacccgttttaacttaatttttttttctgaattaaggtcttataaaacgcacatcttcaactgcctcatcaacatcatctgccgcaaccggcttcaatttttttttgggtatcagctgtcctgccgacatcggctatgaatacagaagatcagttccaagttcccactgtggcccaattgcatgcgatctataaggaggacatgataaggcaatgaacgtcatgttgaaaaccgaaggctacaaaaatcgtgaaaacccgcttgcggccagtcctagggaacgtgcagcaacaaagaaacagctcaggtgcaaattatatctcgtaataccacaatttcaccccacccctttggttacttctgaaatttattttatatagttctttttaccggtaaaccggcttccagacgtcttgtactattctatacttctttgcctagtctttcattaaatttatatacagaattaagctaaatcaaattataggacacatttacatttgaatttaaaatttcattgcctaaggtgttactcaggaattgtgagacacatttatgatatttaacattaacggagacacaatatcctatttccccaatactgcacctatttgctggaaggatagtgttcacagatcatctttatattaaaatgggacacatatgtatatataggttaataattagtcaactttttgtgctgccaggcaaacgcatcactcataccactctcgcagacggaacagatgtccagcttgctgaacctatttttcagcattcaaacacttctcctgtctcttacacgtaattacttaattgcctgttatttttttaagtgtataaaaataattattttttgtcagtttggcctttggggcgttggcaacgtttctcaagtgcgatggcctgaacacttctgccgattccgcggctccactttctctctactacacgttcaaccgaacgaagaagaatatcctgaatgcagctggacaatttaaagacaagatcaccaagagagatgtcactcctccgttaaaattctacagcgacttgtgctttgcattgacaaccgggttcaacacaaacatacgtgaacttaacaacctggcacatctgccacttacatcggctaaaatggctttctacttcgagcagttactcgacagttagttgcacactttttttttataatgcaaagtagtcagataggacacagtagtgtgtctgcacgggtaccaccacacacataaatgtgtcccagtcaataagtgctccaagtagtcagataggacacagtagtgtgctgagcacttttgtgtctgatttaaagaacttaaaaagtttcttaaaaattcacttagggaaaaatgtctcaatttaaaagtctcaaaagtgtatatttaactagatggaatcggttttgaagtgccattgactatggacaaggaattctaccctcctctggcacaacttgttgactacaagttaccagtgtacggagacccttccaaactcaaacatatcggccatgcacttgcttccaaaagagatggaccggagaaggtaattaatgtccatgtgtaaaaaagtgatttcgcctatacttttataattttgttgttgtttcagcagcaattgttatttttcttgtccgttctgatcgcggtcactggcattgatatttctgccgttatggcttctttgggtgatgacgatttaaacctttctggcggtacagctatggacatctctagtgcggacattacgcttggcgcctccaacgttagaaagaaaactcgtcttgacatccttgtgaagcaactcttcaagacgatcagttgcccctggcttatttcatcatggagcagatcgagatggaagaagtcaaccagctattcaaaaataactatctcattaagcttgtgacgctata

SEQ ID NO: 16825 - DNA, 1143 bp, Heterodera glycines
tcattataaaaaaataatatataaaaaaggtgaaaaattgtcaaaacgctgtggctttaatatagcgccacctttgttacgtctttaaattctagctgtatatgctccttctgccgactcggctccgtgttggcacattcaaaacatgctagaaggaaaacggactacatcagtaaaaataatacgcagttatcaaattcttgaaaacatttagctccaaccgacatcatcatgcttgctgcctatctgggagtgaatctgttcatttcagtgcagtttaaaggtttccagcaccagtttggaattccaggtaatggtatttcagtcttatatagtatgagatacaaaaattataaatggttattaggctctgcttctgtaacagtcacattaatgtgtctcattctataaataaccagttacttaaaaaagacacaaatattttaggcaacagagcctaccttaaatcgaatctggaacgtgcagacaatgcgcttctttcgctgaatgaatgaattgtttttttaattgactttaatataattagctgcccatccaattcttcactcatgctggagatcaggctgcttcctgggtgatcgaaaagctcaaaaaggacaccgaattgcgtgcttctccttctcctattcaactcaattcatgttgcttttgtttcgacataagcactcagactacctacatcatctcaaaaccgaatgagttcctcccccgtcgcggccatactgaggattcccaagaatcacaagaagatggcgaataaagcacgggacaaagatagccgatggaattatctgccgatccggccggcacactaatgtaactattttggcctgcttttgcaagcgataacttctctgcctgcccccactgatttcaaaataaaatagtctcttcaacaatcactttatccttcatacgaatttcctcctctggatgtcaatgcgattataaatcctagcatatcggggcaatattaggaatatttgaaagtgtgtctccttaataagtaacatatatgtgactcaagaattcttagtaacacatattccaactgttttttaaattacaatgaaaatgtgtctcgtaatttggattggcttagtgtgtccctaaatgtcaata

SEQ ID NO: 16826 - DNA, 3558 bp, Heterodera glycines
ccaaaccagtaactgccaaattttggcctttgaactaagcacgaaatccttgtggcttttgttcccaactttactgccactttgcatttgtgtgtatgggttggccaaggtggcagaagtgggcgtattctctcgctcaattatttcggcaattgcacgttcggcttgtggcaacagaacaaaaagtttggaccattgctcggcataaactgtaacgctaatccaattgatgagcatcttaaagtggctcacaaatcagtttcataacatttatttgaccgtgtctaaaggcacctgtacgatttggttgggagcggtgcaatattcacgcatccctcgcccgtacagcttcagtgcttcttgcaagtttcccatttggacgtattgctggaacaaatcctcaagggcacgtctaattgactcctttcgaaggtgttggtgccatttgcgatgagattggtgccacaatataataccttaaccgcctcgtccttctgccgtttgaactcggcgagcagtgcctccaatcggctgttgcccttcacagtggtaacttccacccaagtcctgtccaattccgggatgctctctaccccctgaattccgctcgccttcgcagattccacgcgctgatacgcggcactaagcatcgaccaattttgagttttcaaaaattgacactaattagaccaatttaaaacaaaagtgcaaactttaatgacataagtgatgagcattttcaaggcttcaactttaagcggcggacaaacgtcggcaatgaacaacagccagaaagggaaaagggttttgtgctgacaattagtaaatgggacatttttgcagtttaatggacttggtgaaaatccacagggtgacgtttttaaattattttttttaaataaaagcaccccacctatcgtttttcatggtccacttaactgcaaaagctgtctcaaagaaacctgttcatcagagcataatctgtgtagtcattggaaagcgaatccaaatcgatgccagcggagttaactgtgggaggcttcggttgaacttctgaatgtggaaaatcgattctcaccaatatttaccaagtgaataaccgtgattaataggttcgtcaacaccaattggatcatttatattccctaagtcgaaatcagcagacattggctcttcgataaactcatcctcatcttcctgctccatcccctccataaattcgtgatcatccattaataaaatcgggcaaatcttttgctttaataataaatataaattaaagatcatttaaaaatttatgaaacgttccaattgtgagacaggatactatttgatctagagaccgaaattttgaaatgaaggggactttgaaaatggatcgggatggaacccgggacgaggctcccgtttttccgggaatcccggtttcagccaatttttaagaaaaagtttttggtctggcggtatctataaatgtctgacggtgaaaaaatgtaaatttttgcaatattttttaatataggtacctactttaccaaaattgtctatttttgcaaattttagtgaaattttgagggccagtggtgcaaagattattgacgatgccatcgagaatttgtggatttatgaattaagaaaaatgagtgcaattttcaaaatttgcttttttataaaaaaaattgttattttttatttcagtgaatttcattaattatcgtaaaatttaagactgcactaattatatataattataatttgcagtgcattgttgcgattttttcattgggcaatggtaaagaatttggtccctaatgaaaataaattaaagcgttaaattttatcaagatttaaaatttgaccagttttaacttatattttgaaaaaaaaatttccaactttttgttcgaattcgggtccggggttcggaattgggcaaatccaagttcaaatgcgtaatcaacaccctcgaaaaccccgggaaactgattttgagccgaaaataataaagttaaattagggaccacaattctttaccactgcctttcattggtaatttacttagtttcaaaaaattttaatttgggtttggtgctacatacaagattccaaccatcatcggttcatatgcaagaaaatatttattcaaaaaaatgtacaataacaaaaataaatttaaaaagaagaaaaattgctcggtattccagacccgtaaagagtaaagtagagatcggtaagagaagttcgaattcgtgtttcctatcagatgaaaaacaaaaatgcacgaagaattaattattatgcaactcacagtccgaacatccgagattatcccccacaaaaggtcggccaaacgttttgtattcaatggatataaagtgctatacagccaaattaaaataattattaaggaaggtgttatcacttttcggtccattcaaaaggcgggttaacacaaagccgttgagccacagaattacgaacaaagggatcgggatcatttgcaaccaattcgacgaggctaaatgctaatttgggtaatcgcacccaacgatcgactcaccgaagaatcgtgccgatgaatgattgatttcgacttcgtctgatcattgccacaaggcacgccaacgcagtgagccgcaacttaacaaaccaacaacatacaaaaagactaaataattattgctcaccggtgcataaatgcctttgcactggccaaacttccagaaaatatccgtgtcgattgggagatggcgaagtttttgcaacttgattaaaaaaataatgattaatcgaatttctttttggcaacgattcaattatttacttcgtaaagcacttggatgcagtgaatgctgataattcggccgaagcttggcctcatcgtgtccatgttaagcgcatgcgtaacttccctcagcacaccacgcgcatgaaccgacaaacaatcgggttgttcaacagtccgttcagacattgtcaaagttttgccttttgttctcaaattaaaaaaccctaacccttcttttaccaagtgcgtggatcagtgctcctctgtagtaatcgtcagaataactaaagcaaaaacggatgaattttagaaagcgaaaaatgaccggttagtgctgttgtcattgagcctaatcaggttgatgatgaattccaacacgtattccggacactctcttccgtcttggcctcgaattaagccaatagcagcgggcaaagcctaagatgaagtgttttcggcgtgaactaagttaatgagtgaacttgtccaagcaaattgttctgaaggttggaggaagtggccgcgtaattatttggtaatggaatgtcaggcgaagttttactcccaaaattctggcgaaagtaatcgatgagtgggggagactcgccaagacggctttcggggagactgttgtaaatttggacaagacagtgggcagcctctcgtcgaattctgaaagtagtttttaaaagtaaaaggaggagagacggaaaagacacatggtgttgttgatacgcagcagtgaaaaaaagttattggttaaatagcaa

SEQ ID NO: 16827 - DNA, 3823 bp, Heterodera glycines
taaaattttaaaaatattaataattttatcaaataaacgattaatcatttttatttttattccacaacttttgacagatgttttgacgtggcttggtggtttgatcagcaacaggcaacaaccgaaacaggtgttacgcaacaaacaattgaaatgataaaataaaatttaaatttttaaattaattttttttttgttaattaagtatttattgcttgtttagcgtcttgagtttgacgagcgcgaccgtagcggacaaactgggcacgactcgacgatcgaaacgactgtaaaaacaaaaaaatttaaattattggccacttcattttgatttctaatattatgtttgttcgatttcagcttttgacccttttccacaacttgattgatggatttctgatcggctcatcggctggggcaccgctttcctgcctgagcgtttccgttgcgttgctgtgcaagcagtccaaaaaaagtgaatagcgaaaatactaatttgtagtgccaataaaccaacaaaaaatacttaaaaaataccaattaaagttaagaattttgataaattgccaacaaaaaacgagaaaggacgaaaaaactatacttacaacatttttattccgtgtgatttttaaaaaaatgataaaaaaaattttaacacttatgcaaggttttccgaacaaaaaatttcaatgtttttgaatattaaataacggggcaatgaaggaatgtgataaaagctcagttgaacttaatttaatagtaattcttataaataacgattaatttgtcactcttttctttatagtgcgcctgggcaagtcaatgaagatgaaaagcggaatgtgagttctgaaaaaaataattttgaacaattccaccccaatgctggcgccccataaaaaacgtttttttactatttttaatttcccgctttctttttcaggttcatttacatctcctcggtatgtttgtttttttaattatttcttaagacttatggctgctgctgtgaattcttaaaattaattttaaaactaaaagttcaccatcccgcaatttaaacgggaattttattgtgttatttcttgaagtttaaattattttttgcttatatagacatgaaaatgcgcaaattccaagggatttttgaggccggaattcatgattatagaatgtttagcctctggttcattgtacaataaaattcatttaaaattttccgcccctcttcttaggtttgcatgttgccggcaatgaatgccaaaatacaagaacagctgaaggagtccgcaaaaaaagcatttaatgttttattgtgtttttttaattcaattttattcactcattttaaattttgatcaaattttaccattctatgaatttcatttatttattcgtttattttcctatttttcaaaaggttatttgtaatcacttcaaactgcgcctgttttaactgctgaaccatcttccacagaatcttaaaaaagtgatattctttattttaagaaaatttatgcgtatttaactaaaatagtgagtaaaaatgccaaaataatgacaaaatagtggcaaaaagtgtccaaaaattgatcaaaaataattttcattccataattgcagttgggtgcttttttcgtttttactgcatttttattgagaaattttccaaaaaaaagttgaaatagtgtaaaaatagtgacaaaatgtcaaaaaagtgaattttcactattttagtgaagaagcgccaaaataatgttttctagtgacgaaaaatgtcatcagaatcgaaaatttttaatgcagaaatgcgttttttgaactcctttcttcaaatcaattgagcaaaaaaaaaaaaaattttcactaaaatcacggccctagtaataacttttttatttgaagatatgtagaaaattctaataaaagcaaacagtcgcaccaatgctgcagtgaaaaattcaatttacgaagagaaaaaatttacaaatattttgttttgtgtatttttggattgataatgttcctaattgaaaaaatcataaaaaagactaaaataggttctttttaagcgatttttaagcaatttttagagaataagaaaattttttgaaaaagtctcaagtttttgggtcttggtctcttaaagccagattattctaaatttttaagaacaaaataaaaaaatatattaaaaactgttgatttattttttttaaataaaaatattctattattaatgttttcattgttttccatttaaaagaaaatgttacagcacaaatttggctcggaattcataaactggtttctatttaataacataaataaacttggaaatgtgaatttaaccattaaaaacaaaaatcggctgtgggctgtcttaaaaaagtaatacctggaacccaaatatttttacatataacttaatcactgacagcagtgcaaataaggtacatttcctttccaatattttcttaacaaaattgagcaagaaaaaaatttggggaagaatttttgataaaattttccaatacctaggtgtgtattttttgaattttttaggtcgatagtagcaaaaatagtggcgaaacgccaaaatattggcaaaaaactattttagtggccaacttccaaaataatttttttttagtggaaaagctccaaaatagtgattcttagtagagttgagcgggaccgggaccggggcgggaaatcccggttttttcaggtcccggtttttggaaaaccagaaatcccggtcccggttttgccagtcccggtcccggcgggactaaataagcactggtaagaatggggtctgggtgagaaaagagaagggaaaatcgaggtcccggtcccgacttttctagtcccggcaagtcccggtttttgtcaaatttcccggtcccgctcaactctaattcttagtgatgaatagtggtgttaaaccgaagaatttccgagctaaaaatgagtttttcatgcatttctcgtcgaaataaaaccgcagaaaaatagttaaaaactaaaaatccggaccctactaatcaagtgcaaaattcaaaaaaaaaattcaccactagtattttttcacaaatcctcgagctcaactgatatttatagacagcaaagaatagtaaaatattgttaaatttaaaaatattcaataatttagaggaaaatagttagatattttatttaataaaattttatcaattaaagtggtcataaatagggctgccaaaagtatgcaaatgcatatttttttcctggcttctcaatgctctaaatagtacgaaaacactttcttttttgtgtttgcgtataaaaatcgggacttttatttgcatatttttgcatattttgggcctttatgcatattttgcatattttggcttgttttacattttcatgtatattttgccattttttgtgcatattttccgattttttgcatattttgccatttttcgtcaaatattttccgattttttgcatattttgccattttttgtaaaatattttccgttttgaatatcccttaagtaaattttggcagacaataggatgagctttagtgccgaaaatcttgagaaattattgattttcaattgaaaaaaaacccgataaaatttatgaggaataaaaattttttattggatttgcacccataattttcaagtttttttgtgcatatttggtgcatattttgcgatttttgtgcatatttggtgcatatttcacgactttatttgcatatttatgcgcatattttggccacttttcgtgcatatttttggcagcccaaataattatttat

SEQ ID NO: 16828 - DNA, 3243 bp, Heterodera glycines
atgtttcgcaaattcattgcgatcggcgaaccgaatttggaggcgatggattacgctgccggcgtcgcctcctttttggtgatcgccgtcggcggagttttgatcggtctgctcttctctctgatcacttgcattgccacaaagtccgatcactccctcccccccttccttctgctgatttgccattgtcagattgaccactcgtgttcgcatcctcgccccggtgttcgtgttcatcgtcccctacatggcttatctgactgccgaactgttcggcctttcctcaatcctcgcgtccgccccccccccccactttttcttctcagcttttccccttttagcatcgtcgcctgtggcatttcgatgaaacagtacgtgaagggaaacctcagccacgacgcgtccaactcggtcaaatactttgtcaaaatgttggcccagtgcagtgagacggtcatcttcatgttcctcggcctctccgccgtttccaaagtccatctttgggactgggctttcatcgtcgccacaattgccttttgtctgctttatcgcgtcatcggtctttttccgttcgctctttcgctgttcttttaatcgtcgcttttcttcccccaggggtcgttgtgcaatgcatttttctgaatcgtttccgcaccaaaaagttctccttcagcgaccaatttgtcctttcctacggcggtctcagaggtgccattgcctttggcctcgtcgtctctttggaggattcgcttccgccaaagcaaatgtccgttaattgcccatcaattcgttccccgtctattaatgaagtaattattccctctaaggttcgtcaccacttgcatttccgtcattttcttcactgttttcttccaagtgcgtctttaattaatcctcctgctaattaccatctctctctctctttctttctctctctctctgtaattaccgtccgtcttctctttccttccttcacctcctcccaatttaaaagggcattaccatccgtccccttctccattggcttaaagtgaagaaaaacgatgtggacaaagaggaaacgatgttcgaaaagctctgctcgcgggtgaggaattttgtgcgccaaaatcggcaaattattttgcgcctgtcgcagaattgtgactatttaatggccggcatcgaagacattgttgggagaaaagggcccaacgcaattcgggacacgtgagttggccaagggaaaggcaaacacagcgaacggacgcaccaaaggttcgaacggttcaacgccaaagtgctgaagcccgctttgatgcgcggagagcagcgaaaggccttcgacgcgtcgccaattataagggcatataacaaattgacacttttggaggcccaaagaacggtcaggggaagtgtccgaaggtgggcaaaggccgcggggcactgaccgttgaaaatgccctccccaaacggacagaacgcgcaaagacgcccccctcggccatcgcatcggcccggcgcccagcccttcgtcggccagcgccagttccacactcactcatttccaatggaaggaaggaaggaattccgcagagcgaaggacggcatacgaaggggtcagtcacagtcactcattggaacggaaaatgtcacatttgctgagagtcggcacatttgccaaaaccaaaagcaacgccatctgaacgtttaaatgcgtttaatttttcggcagatctgtgcgattccgtcgcagcaaaagccaaccgacgctttttacggaatatttgcgcgacttttcgataaaaatacaattgaattggagaaaacggagagagacgacgacataaaagacaattacatgatgtatttcattagcaaaagtgaagaacatccgacgaacatcagcagaagaaaggaaccaaacggagaaaccgacggagaaaggaggggacggtcattgagcccaaaagtggaagttagcgacagaaaacaattgttaattggggccaatgatgagttatcccttcagagacaaacgcgcacgtcgaaatgttccgttgctgctcatatgagcatcccggtggaccaattacagccaagaaattgccgaatgtgaatcaaaaaaatgatggaacggacaaaaaaacgctaatggacgaatagtgaaaaaagaaaggacgaagggatgcgcaattggcaacgacaaagaaaaacgggtgtcatgcaactcgtacaatgggtataggctaattttgtaatttattattgtacgagttgccattgaccccaaaacgatccaacccaaagaaaacagacaataccagtgaatgctcaccattttttgatttttgtaaaaatttgtatagtgaataaaatggtaataattgtccgctccgtccgtccgatggtcaattcagtcaatttggggagatggcactcaaagggactttgagttgttcgaccaatgcgtgcaatttgaccagcaaaatgcccaacggcgctttttcggttcccaacaccgccaaaagcattgatgcgacgcgcgtaagcacaacggtgccccggtcgcagccgataatcacttccctcaactcgtcacggacacctgagaaaggcaattgccagagaaaaggcggaggacgaaaggaaaaccctgccgctcgaaagtctcccaaatgttggcgagtagcgccgaatagacattgccactgaactgacgggtcgcctcactgacagtcctcgagacggtcaaccctataaaaatgaatggaagaacagtcgacacgacacaccaatccgtaccgtccttgttgaagaggagcacacccgccactgctccgccgacgacttggccgaggaaggcatccaacgcacgggtgcgtatcataaggcaaaagcaaaaccgaaggaaaacggacgaacaaagcgaagaaacggaaaaagtaaactgatagaaacgattaggctaaggaggaatttgtcggctttaagtttatttggtgaatagaaatgttccgccgtcgcaattcgctgagatcgaaacagaaaaaggactcagaccgtccgctgtcccttttttcttttccgttcgttcagtcggtccaccgatgagtacactgtgagttagtgcacacgtaatacaaacgcatttcttcctaaataacgaaaggagtgagtcttttacgactatcggaaacaaattccggtgcgaatattattttgaaaaatgaacgaatttaaaaataggcatctcactgtcaa

SEQ ID NO: 16829 - DNA, 1135 bp, Heterodera glycines
tgttcgagagcgtttgttgcatagaaaatttctcaaaaaaagagatagccatttttctggaatatctattaaatataaaaattatttgaaaaataaaatggccatggcgcaccgcacttcgtttcatgttcgagagcgtttgttgcatagaaaatttctcaaaaaaagagatagccatttttctggaatatctattaaatataaaaattatttgaaaaataaaatggccatggcgcaccgcacttcgtttcatgttcgagagcgtttgttgcatagaaaatttctcaaaaaaagagatagccatttttctggaatatctattaaatataaaaattatttgaaaaataaaatggccatggcgcaccgcacttcgtttcatgttcgagagcgtttgttgcatagaaaatttctcaaaaaaagagatagccatttttctggaatatctattaaatataaaaattatttgaaaaataaaatggccatggcgcaccgcacttcgtttcatgttcgagagcgtttgttgcatagaaaatttctcaaaaaaagagatagccatttttctggaatatctattaaatataaaaattatttgaaaaataaaatggccatggcgcaccgcacttcgtttcatgttcgagagcgtttgttgcatagaaaatttctcaaaaaaagagatagccatttttctggaatatctattaaatataaaaattatttgaaaaataaaatggccatggcgcaccgcacttcgtttcatgttcgagagcgtttgttgcatagaaaatttctcaaaaaaagagatagccatttttctggaatatctattaaatataaaaattatttgaaaaataaaatggccatggcgcaccgcacttcgtttcatgttcgagagcgtttgttgcatagaaaatttctcaaaaaaagagatagccatttttctggaatatctattaaatataaaaattattgaaaaataaaatggccatggcgcaccgcacttcgtttcatgttcgagagctttgttgcatagaaaatttctcaaaaaaagagatagccatttttctggaatatctattaaatataaaaattatttgaaaaataaaatgggcatggcgcaccgcacttcgtttcatgt

SEQ ID NO: 16830 - DNA, 1662 bp, Heterodera glycines
tttttcttcttccacaataaaatccatggacaatctcactatgtccacttcactgtcataaaatcctttggtcggatccatcaattccttaatttttgcaattttattaagcacaaaaagctattttgactgccactcactgtaaaagtaatcattataagtccccagcaagtcgatttgttgttaaaagaatggtcaaattttttagtaaaatcctccgttcctttcttttgtgaaacaattcgaaaagtggcagaacatttgcagctccaatctccatcttaattaaataaaaattatttgatttagcattttataatttactttcttttggagcggtgcagaaaaggtaaaagcccagccatttctcagtactattttctttggttcttatttgtgcccaaattttccacggcaatccttttgtgtaaatgcatttgcttaatcgcctgctgttcacttcctctcgcacaaattccgacaatttctcaatttccatcgaaagtgtgccttctttctgatcagaaatgcgtccatggcacggaaatgccattgggtattgtccgggcgcaccgcggagattcgggtggcaatggtactgtaagacggcgagcagttcttccactgtcagaacgcaggaagatactgtgataaaaacgcgaaattcctcgactcgagaattaaaacttttaaacagttttgcggactttttactgaatttgttaagaaaaaatttctatttttttattcatttattaatctatccctttaatatggatgggcacgttatgaatttaaaacaaagggtgttaaggcggtcggcatttatacataacaaatttggcgtgctttaaaaaagtcggaatccaaaaaccgatcttcaggggacatgtccgcgtcgggagtctcgatcccaaccaacaataaacaggattaacacaaaaaactaccaatatttagcgaaaatttcctctttgtgatcagtgggaaacgtattttgaaaagtgccggaccaagcgcagaacgacgattttcagcggaacattcgacggcattttgacggcacttttcgtctgcccaacgaatggcctgaaaaaacaaatgaaattagttatttttaatcgaataattaattaattagtacagctttccaaatggtgagttcgtcgtcgattttcaattggtcacgttcgaaaatttcgcacaacaaattttgatcaatttgcaaaaattcttctgattcgaataaagtttcggcattttgatcaatataatccaagcagcgaagagcaaaatccttaaaataaaataaatccaaaatttttattgacgagataaacttgttttaggggtttttattgtctggaaaaccgattctggcatctattttggcccaattcgaacataacccggattcgaacaaaaaaaaatcgaaaattcaatttttttttaacgtaaattcacatttattgcacaaaatcacggctcttatgcagtttaagtcccatatttttttcatttccaagaaaaaaacatacaaaatatagggtttttcgggagcgctgatcacgctctgtcatctaattcgaccaatttcgaatctcggacccgaattagaacaaatgtggataattcgaaatttttaaattatcacgccaaaat

SEQ ID NO: 16831 - DNA, 1839 bp, Heterodera glycines
aattccgcacaacaaattttgatcaattgcaaagatcttgctgatacgaataaagcttcggcattttggtcaatgtaatccaaacaatgacgagagaaatccttaaaataaaacaattaaaaatattttgtataaatttcgatttgcacattttggttgagaagacgagcttcgacaaaggcaagaaaaacatttggcaactcattaatcggaaaatccaacaaggctttgaccagcaaagaaacgttatatttattggctaaaaatgtttaaatataattatttatttattttttaaatttttcacccgcgtaaagcactgccatggcattttgtccgttcaattcgctcaaatcttccgcgtaaaagaagctcaacatcactctgaacgcttatgcttcaacatcggtcacctcaattacgtgaggacagtcggcaaaaaaaatgatgaaaaattatttttagaaatattttcggtatttttttttacttttagtctttgagtttttgtcatcaaaacggaacatcgacccaaacacatcagaagcgaacatcatcacgcatttgtgtgctttcaaaagctaaataaactcggaatagaaatggaaggatggggttttatcgggccaaaaatgctaaaaattatccggtgtccttaaccctatcctgcaaaattttgtaatatttttttcaagggcaaatttatgccctaacacgaatatgatgtttgtttttagctcttatgcgtttttacaccggccccccttacgacgaggggggggggggggggggtgtcgagacaacccttgtatatgtatgcacgaatctgacatccatttctatgaattccgaaccctgaacgcgaatcgaacaaaaaatcaaaaactcaaacttatcaaaaaaaaaaatttatcttttgcaaaaaaaatgattaaaacaaataaaattaatcagataataatattaaaaatataaatttcgactttttattcgaattcgggtttaaaaattcgtcaaaactggtgttaggttcgtgttcagcgcataaaattaccctaaaaaattgttaaaaacaaaaattcagggagggtgaccggggacaaaaaacggctacaaatccctgctttttctcagccgttgaaaattaaaaaaaaaacactggcaaattctgactacccaattcggaattttttctggttattgacctgttgagaactatgtattacctaatcaacatttgtgggttcaactcacctccttttccttcccaaccaaaaagtgaacgtccgccccttcgccagtgctcaacatcagcttgaaacggtcctgcaacttgctggacatgtgaaatttgaagaaaaaaataggacaaacaaattgctgaatacggaaattaaacaatgattagggctcgaaattatatggaataaaaaacataaaatatggactaagaaagaccgaaatacggacataaaaagcgcaaaaatggccaaatatggaccaaaatatggactaaaaactgccaaaagccagggccggcacttggaaaatgggcccgggtgggtaataataaagttgatccctcgccccccttttttcgaaaaactttttttttgtttttaaaagtcatgaaaacatgtttctatgggttttcggagtcgcttatcacggatccggcacccatttcgaccaattctgaaatccggaccgaattcgaacaaaaaatggaaaactttcgaattcacatttttggttcaaagtttttttaaatcaaggctcccagatctgaggatttatcctcattttgtggtttttgataggtcaatgaggatttttttt

SEQ ID NO: 16832 - DNA, 1825 bp, Heterodera glycines
cttacagcatataatcaaaatattttatacatttctagcttaaatatttttgtattattcataataataaaaatacgtccctatttatttcttttcatcatagatacttttgtatagaactaattaaaaatgcataaggcatttttaaaatggccaagtttcagtcaaaatctgtaaaaaaatagtcaaaatttcaaaattttcctaaggcgcctggcccccaaataaaaatagtggattttattcaaaaaaatgcccaaaaatttctgatcaccttattttttttttttgtttttcaaatcatttttttttcgcagcgctctttttctaaagatttttaggagaaagaggtcccgcggtgccgataggcgccgccgggaaaaaatttgaaaatttggatgtgtctgttaacagattttgtccaaaaaaaatgataaattttttcgatttgagccaaaattttttatgaataaataggtttttcttatggcgcgcgaattttgaaatttaaggtctattttgtaacagatattcaccaaaaatttatgaatttctgataaatttttgtttttttttcttgttttttttgtcaaaattactttgaaatatattaaatttcatgatttagtcaaaaaattgaatttaatttcaacgaatggaaaattgagttcaatacgtcaatagattatgccaagtatgattgattttcatgggtatttttggtttaaaaaaatcctattaatcaaatgaaaataaattaaaaaagaaacagtaaaccgtgttcgaacttatgaccaaggcagttttagtgttcaagaactaaccactacatcacaatacatataagttaacaaaatgcaaattactttatttaataaaaaaatattaaaaaaaaattcaaattttgtataattttttgtcttttctctcacaaaatgtcattcttaggggtgtatatttaaccccgaccccgagtcggggttaagggtcggagtcggggtttgtcggggtttaaagcgtcggggtcggggttaaccccgaaaaatggtcaaaaatgtcagggttcgtggtcggggcggggttggagttgcaaccctactttttccgattaaatgtcggcctcgtcaaggatcaacatcacattttgtctatgataatgtaccgttgtagtttggtattagtagtcgaaacgtccgattttaggtgagtaggcaaagtgtcgagtagctgaagtgtcagtaggcaagatgtccagtaggcgaaatgtccgattttgggttagtaggcgaaacgtccaataggcaaaatgtcgtcgtgccaaaaaaacaaagaattcacttcgctctgtagaactttttttttataaagatttttaaaaattttgataccgattgagaaaatttatatatcggattatagaagcttttttcaaaaataaggtgcacaaaatgttgcccaaatacaaaaaattctatgccaatatattttctctggcacatccatttgcttaaaaaatgtttggtaaaagcttattctcatcaagagcttccgaatgatgatgagattgtcaatttagtttgtttgctcgaaaatatgcatttctctgcactctctatcgttttttgggctgtgtctaaaagtcggatcccctaatgtcgggtttctaatcgcccattcgcaatgtatctgctcagttatatgtgcggttctgggcatgccgcgtttgaacagcacgcggattgctttgcggaagtggagaaccgcgagcagtacgtacactgcaagcgaaccgcgtcgcgtgccatggaccgtgcaactgccgaat

SEQ ID NO: 16833 - DNA, 2104 bp, Heterodera glycines
ctgtacgtaaaacgtttttttcctaaaatttatgaaaaccaaaattaatgctctaggtcagagatggtaacggaattccgacatttctgactttttgcagataaatgtgtcattatttctatcgctcgtttatggtccttaactgtatgtgacaagagatggcattttgtcaggacagagatttttatccgttggacctaatccgagaaatttcaaaaaaataatttgggatctccgagaatcagcggcagcggcatctctccacttataaaatggcattgcactgtttatgttcagatcactcgcgagtcgttgcgcgtcagtctgccgaactgcgacttggaaaaggcattggaacaaccgcagcagcaggagaaacaaagcggagctaatattgataatgataatgaagctgttcaaaaacgtcctcagaaatcgatcaatcactttgaagggatcgactaatggaacaaaagccaaaaattgaatttacaaaattataaaaagtgtgatcagagacagcgattgtttggtgggtgctgttttggttgaaacggttactgatcagctgctgcgcaaaattaaagaattgtctctgcataaacaaatcgcaaaaaagggaacaaaaattcatcaccaccgttttcaaaattggggtgcaccgccgtcgataattaatggcgcaagatcgggtggattaatcccgtgaccgtttgataatctttgactgtcccaccaccacgagatgagaaaaaattattcatcttttccccgatttaaaatgcgtccgctttttttgtgctggtcatacgttccgcagcagctgatcacgatgacgtccaccgatcgggcggacaaggcacggacaaagtgcccattcggagaagcaccccgggggggggggcaatcagtgcactgcacacaatccctgccgcttgttggcgcacaattcgccgaatatccccactgccccccaaatccggtgtcctccaaacgcacaaaaccacccaaaattttgaaaatcatcgcattgtaatgcattttgctcaaaacacacaaaaattagtttgttttatttaaaatttaaaggaaaaaaaaaattaaattttagggataattttgagtaaaaattcaatttaaaattggggtttctaaaattttcggttcgtttcttaagtgtgcatttttcgttatcattgcattatcaattttttgaacatccttaaaacatgtgcgaaataggcatagattatgcgcttgaattagacacaaaaaagtcgaaaacagacaaaaacaggcgtaaagtaatcgttagacaaaattattaatttaattcaataatcaccataaaagtttgctcattctcgcgatggatttcagcatcaaaaaacaattttctaaatttgattttgcaatgtctcgtctcattttgctgcttcttttggttgcgctgttctgcgcttgcgctttggtcgagcacgcatccgcgcagtggggcccgtggggcggcggtcgctggggcggaaaccgctggggcggcggatggggcggcccgtggggcggtcgatggggaggcggctggggacgaggtgatcattttttatccgcttttattaattgccactcatcaacaggcaattaaaaagactaaaaggggtccggaaaatgagatctaattaggcaaaaggggcggggcgtaaatgcctggaaaattaattgtaagtgattaagccaatttatattgttaattgggcagatataaaacaacaaattagcatttgaataatttcttttttcaaaggttggggatggggacgccgataaaccaacgggaaaatggcgaagatttggaggccgcggcaacggattttcaatgtgattggcgacgaaagatgaacatgatcaatcagaaaaaccttctcaaaacattttttgtaatttatacaccgctggacacattacaaatcgtcttgtaatcagaagcaaaacatatgaccaataaaaggtgcaattccaatgcttttcattaatttgaagtggtaaaaaggcattatttcaaagaatttttattaatgttgacctacggcaaaaggcatcattagca

SEQ ID NO: 16834 - DNA, 1010 bp, Heterodera glycines
gcaggtcagaagatagccatttttccaaattttcacgatcaaatggcgctcgagaaaaaaattccagaacaattagtatcggcgtcattatgctgagagtgcggttggaattcccttgactgtagaccagaaaaagagatagccatttttccaaaattttcacgatcaaatgcgctgagaaaaaaattccagaacaattagtatcggcgtcattatgctgagagtgcggttggaattcccttgactgtagaccagaaaaagagatagccatttttccaaaattttcacgatcaaatgcgctgagaaaaaaattccagaacaattagtatcggcgtcattatgctgagagtgcggttggaattcccttgactgtagaccagaaaaagagatagccatttttccaaaattttcacgatcaaatgcgctgagaaaaaaattccagaacaattagtatcggcgtcattatgctgagagtgcggttggaattcccttgactgtagaccagaaaaagagatagccatttttccaaaattttcacgatcaaatgcgctgagaaaaaaattccagaacaattagtatcggcgtcattatgctgagagtgcggttggaattcccttgactgtagaccagaaaaagagatagccatttttccaaaattttcacgatcaaatgcgctgagaaaaaaattccagaacaattagtatcggcgtcattatgctgagagtgcggttggaattcccttgactgtagaccagaaaaagagatagccatttttccaaaattttcacgatcaaatgcgctgagaaaaaaattccagaacaattagtatcggcgtcattatgctgagagtgcggttggaattcccttgactgtagaccagaaaaagagatagccatttttccaaaattttcacgatcaaatgcgctgagaaaaaaattccagaacaattagtatcggcgtcattatgctgagagtgcgggttggaattcccttgactgtagaccagaaaa

SEQ ID NO: 16835 - DNA, 3001 bp, Heterodera glycines
  unsure (1)..(3001): unsure at all n locations
aaaatcgttcgattttgcaaaagtaatggctatacaacgaatgcaaatggccaaaagatggccaaccgtccgctgattcatcccaattgcctgcctccctttttcaatctctttagaattaaatatcatttttttgcataatttgttttttcagagggtcagaactttttcatcaacccaataggaagaaaaacttggagcctggcttgtcggcaccgtctatcccttctttcccaaaaaacccaaaataattttcatttccttcaaatttcccgtgtttttttatttagataattctgagttgatggctacatcctcttgtgctgattgtttctttttccctttcgtcactttgagtttgaatggcgctggtgataaaattgaggccaactttggccccaacttcagatttgatttggtcactctttgaaggaagaaaatatcacttttgatcagctttattgattttttcctttttcttttcctcagtattttcataaaattattttacttaaatatttgatgaattacctcaaaatttggcattttgtcagtaggatttcgtatttgtctcaccaatccctaaacttatgggactgggaatcagggaaccggaattcaatccgattcggtcagattctcgatcccggcccggaaagcagttaatatgtgcattttgaccttttaatgaaagaaatgtataaaaaaaatcaaaagaaagcggagcgaaaagataaggccaaattggacgacgaaatattggggaaagaataaaaaaaagaactgaaattaagttttaaagagaaattttatacctttctatcaactccatttttgaaaaattaaaaatttgttatttactcattttaagtcattgtaaagtcggagttttatccaaaaacgatacaacaaaactagcttaattatttttttaaaatatattttcatgcatattaagggcatgcatagtttcattattaagtttggcttaaattcataatattggatttttatgcaaatctattaagaaattataacaaaattagaaaatttttcgtctcgcctcgggaccgtaggccaattcttataattaaaaaaaacaaaaatgtcaacaaagtctgtttgtggccagtattattcttattttggaatattttcgatggcatcttagaaccttaacgatataaggaagtgtttcacagccgaccaaagtcaaagttgacgagaactcaatcattctatctccctatacaatctgatacagcaacactccagcaaatggcactccaaataaaaccgattacaatgagaacggatcaaggatgtaggaatgccgacttccgattggcggtttccgacattttgggctcggaattcccgttagagatggctggatttttctgagcatcgtaattccgactgccgaaattttataatattaaaatccatttaaacttatttttcatagaaagtcctctttaaaaaaagcaggtcggaaaatccataaaaagtggaaattctgttgcaatctaccaaaacattcttattaggttaaatttttatgcattaaaacactcaattaaacagatgtaattttttgattaattatacacagtgtcaggcccgtatccagaaaaaaatttcggtgaggatacccgaagagcttttttttgctcttcgagccaaaaatttttcttcattgttatttttcaaaattttaagcgcaggggcgaagaagtctcgtaacttacgaagaatgccccaatttatttcacaaaaggaattgctgtttattggcgatgaaaaagagaaagcaaaaattatatccttaatgtgagtaactgaaagctgggatgatcgcttcgtaatgaaaaaaggaacgggggagggaggggagttgcaaacggaagagggggaaaattcggatctctttacacaacacttccggtcacaagtgcgacactccgcccggcgggtatgtggggaggggtgtcaaaacgaatcgaattgagcggcacgggctatcggtcgagtttcgccagcgacgttggggagtggtgtacatgggatgtgccgtgttggaaaaaaaggaaaatcatttgaattattgggttggtaaccagtaatcccagtaaccacttgaaatgggcgaggagagtcatctgggcgatggtacacgtattttgggacgttcggtcggtcccatggctgggatagtgacaacaaattcggtgcttttcgaaactggagccgtgtcggaaggaaatgaagaatagtcggtatttggtgtagaaggattaagcttaggattttcagattaggttgggggaagggaggattccattgtgggggcattattggttagtttaatttgaggaaatttgggcgggattcgttttccattggtattacttcctcaatggaattctaacggagcgaaaaattaagctttaaatgtttgtggacattttgaatgacaataggatcaatttttggggttttctgggtttcaggttcaggcgagagggagtcaattccgaaatatagagctgatgtggcaagaataggatgggaatttttagcaattgctttaagcgatgatttgagttttgggctggcctgggagggctgagttagtattataatactgacgataaaaacaaatacaacagtggggattatcgatggggatggtgcatgtgcgtgttgtttgagttgcaacggattatagtggtgctggtgggttgagcggtccttcctctgaaaaagaaaatttttatcgagcaagtaaggtaagctgttatctgcaatatatgaaacaacaaccttacattagagaggcctgtcaataccttctttcgaattcttttttccccaatatcttattggttttttattctgccttttttgtcaactcgttcacccttttctccatttctcgctggcttatttgccatccgggggagttgttcaanaaaaatctttataaatcatccgtaaa

SEQ ID NO: 16836 - DNA, 3272 bp, Heterodera glycines
ggggggaattttgaaaatttgagtaaaattttttaaccagattttcaaacaaaaaaagtcttctttttgggtattttttgggctcaatatggacgggatttctattttaaaaaatataaaaaatgtgtcaaataaaataaacttatgaggaatcatattttgtcgataggaaatccatgagcctaaaaaaaaaattcgaaatattttactttctgtagagggattgaaccaggggaaagaagaagggcaggtcagggagactatccactaggtcatttgcgcaattgtccgtgtcacttttaaagaatatattaatatatttttaaatttttcccttttactctaattttcatatctaatttttcaccaagaccaccattcttaccagtgcttgtttttcccggttcccggttgccctaccgggaccggaacctgagcttttcaaaatctgggaccgggaccgggacctctgaggaccgggaattcccggcccggtcccggtcccggcgcactctaattttgttaatttcgatttttaggtcaataatttaatattcacaagcaatcattttcttttaaaatatcaattccaatattttttattttgtttctaaatgaatgctttcaagaaggcttcattttttaaaaaatattaaaaggatttttcgtaacaatttatcagttagcttatttgtcattacgtaaagaaaaagctccaaaaatttttaaataaaaaaaaactcttcctttgatacataaaagtaaacaaaaaaatttcatataattttttacaatatcccataataaatttagaagaatttaactctatattccttaaatttgaacatttttagtgctaactgaaataaattgactcaagtcataaaattttgtcactttttgaacaaaatgccgaggtgataaccgatgaatatttgcgaagtttatgacaaataataaaacagaaaaataatcatttaaaaactgcttaattttacgcgaatccttggcttatgatgaaattgattgtgctgacccgttttttgcacaaataccggacccggccaaccctactttgggcttcaattgtgcaaattttgggtgttcttttaatttaaaaaatcatccttatattttcgtaaaaggaagtccaaattcgcaacaaaatttcagaatattattttagtgaattttatttgatatatctttttaaatctcggctataagcttgtgaaatgcgatggcaaccctgattttaaatttaatcaattatattaaataataaacaattatttaaaattaatttattatttttatattcttttattattttttaatttgatattttaaattttggcgatttgatatagtcgtaatggtcattgtcgaaatgtccagccacctttttgggttaaatttagcaaaaattaatatttattttgacaaaatgccaaaaatttgaaatttttttcataaaatgtatattttttacattcatatgcaaaaatcccgattccaagtacaatcttggaaataagtacagttaaaattttccaagcacaaaagccgaaatctaagtatgtacttggcatcgaagtacgaatccgagccctgcaataattgtttattgcttttcatttgacttacacttaaaaaattattttgaagcttttttcaagataaatcattttttgacgggatttgctaaaaattacttcacaactttaatatttttacaaaattcaaaaccgatgataaatattctttttagaataatgaaactctccctacaatttttcatttattagttgtggcattggcaccttcgttttcttctgacatgctattttttgcgcaagtttttcgtaaaaatgtgattaagaagtgtcacatggcgtagccgtattagctattttaagatttgttttttaaatgaccaaaaatttattttaaaaaaataataaaatatgttcagatgaattgtcgcaagtttcattttattcattgaactcttccatatttattcttttttgataatttttcttttgatattttaatattatggaatattttaaaaagttttatgaatcttatcttttaaaatttaattttaatcaaaaaatttttaaattaaagtattctctaaatttctttaaataattttcaatttttcatcttgaacccttgacatttgattgtgtacaaaattctctatctgttgcacattgtgaaggtatttcttttgagaaaatctctccccacatttttgggtcatcattttgctgaaataaaaatcaatgggaatattgggggataagcaaaatccaattcaaatttgtttcttttttgggtcaccgttttgccgtgaattattattttatgtgctcgccgccgtccatcataaatataagtgaaccatcccatctttcttcatttaactcttctggtgcattttttacaaaataatacaataattattattttatgaattcataaatttgacttttgtgattattagcccctaaaaggaacctcgggaatccaatatgtctttttcaccaaattcaacaattgccgaatttacttctgatcagggtaattaagcaataaaattcgagtaattattatagtaaaattgttgactaaggatttcaaatttaattttagcaccgtaccaaaatgaaagtcaacaaatgcgaattacagaaatggaacggatgcaaaaaatgtctttacatggcggatacggtagaaaattctttgcttgtacatttggagattatattagaattttcaaattattattatttatttttttcatattaatttgttcaaatttttcgctgtagacagtggacacaaaatgggcatggcaaagccggacaccttggcggatcgaatgaaattgttgctgagcacggccaaaggtgtcgatgcgcattttttagttgggcaaagtgacaaaaaagaggcaagtgaaattaataaacaattaattaattacggtctaattagcgaatgacatttttagacaattaattacggtaaaattaaattttaagcttgtgcatgctcacaaagccattctgattgcttcttcgaatgtttttgaggcgatgttccaaacggacaaagaaaacttaaatggtaccaatgcaggaaagagtaagcaaaaggggatgaattatgaacacataagcaaattaatatatatgcatattggactagcctcatcctctggttgtttttactcctgctatttgccctaatta

SEQ ID NO: 16837 - DNA, 1297 bp, Heterodera glycines
cagaaaacagtaaaaacgctcctatcatgcactaggcgctgagatatatgcacttcattttgacaacactcatagtaaaaaattatttcgttagaatacgagaaatatgatcaagaagagacagtctcatagtaaaaaattatttgttagaatacgagaaataattgaaacgaaacactggttactaatttgcatatatctctgcgaaaattccagatccaaaaaaatcagctataccattcgaaagctgctttcaggcgctctcagaaaacagtaaaaacgctcctattcatgcactaggcgctgagatatatgcacttgactttctgcatataattgccattctccgcagcaaacttcgcgttctcaagcgtgaatagttaatttttttgtgctgaactgtgttagggttctccttgcagtgcgctcaactaagtctcttggagttagagcatttttcatggtattttcaagaaaattgtgcaatgtgggcgacccggaacattttagacagtttccaaaccaaacactcatagtaaaaaattatttcgttagaatacgagaaataatttgaaacgaaacactggttactaatttgcatatatctctgcgaaaattccagatccaaaaaaatcagctataccattcgaaagctgctttcaggcgctctcagaaaacagtaaaaacgctcctattcatgcactaggcgctgagatatatgcacttgactttctgcatataattgccattctccgcagcaaacttcgcgttctcaagcgtgaatagttaatttttttgtgctgaactgtgttagggttctccttgcagtgcgctcaactaagtctcttggagttagagcatttttcatggtattttcaagaaaattgtgcaatgtgggcgacccggaacattttagacagtttccaaaccaaacactcatagtaaaaaattatttcgttagaatacgagaaataatttgaaacgaaacactggttactaatttgcatatatctctgcgaaaattccagatccaaaaaaatcagctataccattcgaaagctgctttcaggcgctctcagaaaacagtaaaaacgctcctttcaggcgctcagatatatgcacttgactttctgcatttaattggcattctccgcagcaaacttcgcgttctcaagcgacccggaatagttaatagtttccaaaccaaacactcatagtaaaaaattatttcgttagaatacgagaaataatttgaaacgaaacagtgcgctcaactaagtctcttggagttagagca

SEQ ID NO: 16838 - DNA, 1214 bp, Heterodera glycines
  unsure (1)..(1214): unsure at all n locations
atcaatttagtttttttcatttaattgcttttttattttttatatttgagaataaagaatttattattggtttaactcggttatgacttaagaaatcaacaacttattatataaataatatttacaattttttaaatattatatatattttttttttattaattaaataaattataattttaaattaaataaataaaaataaattattattattaaaacgcacttcgttgaccatgttcaacagttcgtcctctgttggattgagtcccaatgttcgcattgcgacacccaattctttgatgctcattgtcccattcccgtccttgtcgaacattcggaatgccgttgcgaactcttggatttccttgaaaattttgatttaaaaaattaaaaaaatatatttccatgcctcaactgtcaggtcatcgtcgccagcagaggagccagctaaaaaattgccaaatttcattaaaacattgacaataatgcattataatggaaaaatattcgtccttagaatcaagcacgtccttgaaaatttgatcaccctaaatttttgaaaaaaaattcaaataattgttaaggtaactagaacatcagggatgtgtgccgacacccacaaaaagtttcggaaatcggcattcccactgctgaaaaaatttcggcaatcggaattccgagccaaagaatgtcagaaatcggcaaacagaaaacggcattccgacacctccctgctatacttaagcacgaaacttaaaaaaaaagtcttgcaaattgattgacaactgtgttacagtacctagacctaataaaacagacagccttactgtattgacgatgcattttggctgttgctggtattgttgttgattctgcaggtgtcccaccgcttggttgatgtaatgaagtggaagcgatgagaaggcaattttcactgccagccaaaggggtacggtgatgtggtgaggcgattactgtaccaatgggtgatgatactgtagctgttgttgaggcggcaccagttggaggcaaggcgctctgtaaaacacaaaaattttaattttaaaatttataaaaaaaaagcaactatgggatcagatggnggggaggcattttattggtacatcgttggtggacatcgaataataataaataaattcaattcaattaccgtatttcttaaaatatacccccccnnnnnaattagaaccccc

SEQ ID NO: 16839 - DNA, 2125 bp, Heterodera glycines
  unsure (1)..(2125): unsure at all n locations
agaagcaatttcatagaaatggaataaaatttgtgtaaaaatgaaaaaaaaattgcaaaaatttattgcagattaaaaaatgtattagagacccaggcttgataaaaaaatatttgttttacacataaaaatattttaaaaaaattcttctggcactatacgaaaagtgacgaattttttgaaaattattaaaatcagggaatggataattctttggtttttcaattttcatgatttgttcgagttcggattagggattcggaaaagactaaaatggatgctagaatagtggatccgttagttatttgagcattcatttttttaattagggttaagccccgacatgtttcggggaattatgaaagccgtaaattgcacttgaaataagatggaagtatcttgaaatgagtttttaagacttttttgttctggactttttctccccgacattttgctccccgagggtcggggcttaaccctatttttaatagtcgagaagctacaaataagattataacttaattttcattcatttaatggatgaaaattaggaaaattttttaaatccaacaatgctttattaaaattcttaggaattggcaaaattttcgaaaaaccattgcttacagaatgccaataaactaatgttaccatatgccctaattggcctaattttgtttctcggcctaatgagctttatacatttgattttatcgaaatcttcggcaggtgaatgacctgatcggcatttatccagggccatctaaaccctagaattttttatcattagcccgacccgctctcgtcttacaagcacaaaatgaacttgatcccgaacatttaaaattcaagattctacaagataatgtgacatcagttgccaccttcggaatgccctttggtggctgtgccgtctgctaatgcgtgccgacgcagcggcagccaccagttgcgcgtcacgggaacgcctcgcttggccaagccgattgccagccgtggcaccgcgcattctgatggccgttaatggccaaatccgaatagagaaggacgtctcaatccgcacagtaagtgatgggccgtataagccggaacggagatcggttgatgatgaattttatggcggcttaatttggcatggcatccaaatattttgccaaaacgctttttttattgtcagcttttcctcatcagctgatggccaaattccgctgctgctttgtgtagaaatttgttgttctttttttgttgtttttgccgatctgacccaaacggaatgccaaaaaaacggcttctcctccttttttgtgccaaaatttccgccgatgcgagggtgccagcagcaggaaacaaacacacaaatgaagtgggggtgaatgtgagttgcttttcctctacataaccagcagcagcagcagcaggcagtagcgaaaagtacggcatttgtgtgccgtcgtggtgtgggcggagggtcgaccgaccgaccgacgagacgatgggccaggaagggaacggcacacgacgcctccccggggggatgtcggatagccgccgcccccgccctgccgcccctctcattttataagtttcttccgcttgggatggcggtggcacaagcacaacacaaaaattgggcggcggcattttctcatcatgtcggcacacggaactgcacccgtcaatggaagaattaatgaatggcatgaaacggttggttggttggttggttggttggttggctgagtgagtgagtgccgtgttccatcattgtagctagttgtcttgcgaacagctagccagccagtctcccggaaactttttttgttttcgcgtttcattcattttcggcacaacatcctcgccgtcgccgccatttgcatcttgggtaattagcgcccattagtggaggtggctgccggatgttgtcgaagttggactcgttctcttgaagacatttgtcctttaatttcgtgtcaagagtgaatatgtaatgttcgagactgttgtttccagagcactaagcacctgtctatcaatgagtttcatccattttaagcacatcctcgccgcagccgccatttccgtcttgngtaattagcgccattaatgggggggggggggggtgggg

SEQ ID NO: 16840 - DNA, 2182 bp, Heterodera glycines
  unsure (1)..(2182): unsure at all n locations
agagagtgctgaagactcggacaaggagtgggcagaaagaacattgggtgaattttatggatataaaganccggagtgattaaagacagtgatatgnagatataccacgtatttaagtatattatattttatattttattaaaataaaatgtctaatttgttttacgttcttctcccaagtgatacccctggctataggaataagccaaataaatttagggttcatctccctcgtagtttaactttttccgggcaatggttgtgtgggcttcatagtataatatatacaaattcatggcccgctgttggaactactgaaaatcaatgggtaaaggtgcattttcgaaacgggaaaacaataaaaattgatattcccactggttcctaccaaaatgaagaagaattggaaaatgctataaatgatgtgataattactggaacggaaaaatcgtttgtggcggctcgatttaagaggcaacaaaatttggcggaagatggtgtcgatttgtttttccattataatcctgatgattactgggaaagaattgaggaagaaagacaaaaatataatgaaatgatgaaatctatagagaaaaaatcatccgagcgtgctaatgaaatggacaacgatagaaaaagaaaaatagaggaggaggaaattgaccctcttcaaaaacaatctttgattaagagggctcggttggacgcgctagaggcagaagccagacaaagggacgaaggaaaagaggagaaagagaatagaacaggacaagaatttctcaaaatgtatcctgataactataaggagaaattaaatgaagttcgactagaattaataagagatttattcaagatccaagaccatatgaaaaaatatcagggcattgccgacggtagaaaaattcaagaacttaataaagaggcattacgaatgagaacagcaatgaaacatagaaggaaaaatttaaatgcttttagcaaggctgtctttaataaagacttacaaatatcagccgaagaattcgaaagaacaaattatgaacagaacaaagactatgttgaatcgttttttgatagttacccaactgattactgggagcatattcataaaaaatatcaagggcttcaagaagattatagaaaaattcgcgaatatcgggagcagcaacaatttacaaccgaagaacagaagataaagtcaatacagagtgagattgaccaactccggcgtcttatcgactatagaagaaagagattcgcagcgttagagtatgaagctaaaaagagagattcgcaacaacaaccggtagcactagcactaacacacggcgaagtgctgaaggagcgaataagtcaagtgatcggaaacagaccgcatgatgatcgtggtgatgatcaaacgacaaaaactaatggtcaatcattagtcagtttaatagaacaattgcagaaagaaagagatgagagcaatgctgtaagtgaaaaggaaacccaaggggacaaattaaccgttaaatcgaagagtgacgtcaaaggggaaggaaagacgcatggagatgtattaaaaaataagctagaagagattggggataatgaagatggtggtgatgatgatgatgatgatgttgatactgaaaataaaaagacgagaggagaaattttagctgataaaatacgaaaccgttctgaaaacgaagaaaaaacagaaggaaagatatatggagatgtattaaaaaataagcttgaagagattgggtataatgatgatgatgatgatgatgataataataaaaagacgagaggagaaattttagctgataaaatacgaaaccatagtgaaaacgaagaaaaaattgaaggaaagacgcatggagaaattctaaaagaaaagctttatgcggctaatgatgatgatgtacaattagttgcgccaaagggtgaaatatttaaagaaagaattgaaagtatcaaaacaaccgataaaactgaaaataaaacccatggcgatttattacaaaatataattgcatcaaggcacgttgagcgaataagatttaaatatataaaagaacgacgaaaattttctgtgtattttaacgaacaaattattgcttatatcgaactgtcagcccagcttgggtatatactaggattcgatgatccatcaaaaatacatagcggg

SEQ ID NO: 16841 - DNA, 2140 bp, Heterodera glycines
  unsure (1)..(2140): unsure at all n locations
aaatatggtgcatcaaatatttgatccaaataccngtaaaattcgatgatttgntaatatangagcnaantggtatgggagataattaaccattntcatggagtacctccttatcaacgagggtatgggcgtcagcgaggtggtggagtagggatgttntacgatttttatggagagcaatcctcccaaaaataaaatctgtcggaacattgttgggtaaagaagcactagcaacaggctcccgtgttttagacaccatcgagaatggggaatctccaaagagtgcaataattagccaagtcaagaagggacttgataatgtaatggaaaatggtggaattggacggcaatatggaactggtgtaagaagaaaaagtattaaaagaaaaacaattgttgggaaaactattcctaaaagagcaattaaaaagattaaaagatcagacatatttggcggtttatattaaatatggtttttaagaaaatcgatcaagagtccgtgaattcgataacatcagctttgtccatttttaccttaccccctacaaatgtttctataagtagttcttgtgtacgtgaatatttaccgcttaatccgttaagcgatatccctttccactttaaaattcatccaagttcaaattttattgatttaaataaatgttatattctaaccgaaatgtcgattaaaaagttcgactccgctactaataaatatattatactcaaaaataacgaacaagtggctacaatcaatatgatcggttcgacttggataaagaacctaaaaattatcgtccaagggcgcgagatttatgactctaactctttgtatgcttataaagcatactttgacgcggaattatcatattctaaagatgttaaacattcgcatcttcaagcaagtggttattacaaagacagtgacaaccaggacggaactgataacaaagcacccaaggatttgattgtagaagaaaattattttctgaaagccagactgtgcaatttattgcaaaattggatgctgatgtgttcaaccaggatagatatatggttaatggaattgagattgacatacaaataacgccgaatgacaacgattttatgataatggcagcatcagacgataaatataaggttgagatcacttcttgtaagctatatgttaagtcgttggaaatcgttgatggtctcgctttggatctacagaagaagcttgaaagcaaagaagcaaaatatgcccacagaaaaactttgattaaatcagtgttcatcagtgagaatcggaccgagtttaatggaacactgtttacagggcaactgcctaaaagagtaattctcggaatggttgaaaattctgcatatgtaggctcacaaaagaagagcccgtttaattttaagccatttaatcttcgatcagtttcgttgatcgctaatggaaaacaatggcctgcagcaccttttgaacttaactttgataaaaatttatatacacgcgcattccatgaaatgaatgaatctttgggaatgaattccaccactgacagtaatgggatcaccctagaaaaatatcgaagtgggtggacaatttttgtattcaatatgacaaatagtatggaagaaaatgagtgtattgatcttatcaccgaaggtacgaccaccgtttcggttcagtttcgaaaacccgttcagtcaggagggattactctaattgcgatgagtgagatggattctatcttaattttggacaaaaaccgtaccgttatgacagacactagcgtttgatgtatatttaagtgaattgttttagagtattctatttgtcaaaatgtttttatttattgtgttaattttaataaaaagtacttttggtcttaacggaccaatacttgtgccggaacgatcgagggatagagaaatgacagacatttattataaaattgcttccttcaataagtcatatttaattcagaaaaaccaaagcgaattattaagtttaattgacggattagtagcccattttgagacttgtaatgccgttgaaaataaaactttggccgaatggctatactgtattttagtgtccctgttttggttagtggcactaataactggaatttttttatctttcgaattc

SEQ ID NO: 16842 - DNA, 1383 bp, Heterodera glycines
tttcgcccggttcgatggactggaaatggatacggtaatcgtaatccaagcactttacgatcagcacgagctcatccggctggcgaatgagcggccgcggaccccacgggtgcaccaaatcgccgtccattttgccaagcggcataagcacacggccttgtagcaaaaatctatgccagcagaagtgacggataattggttgaccgatatacatttttatagtatctcacacacctttttttgccattttaacgcccaattttggtttccttttatgcattatcatgtgactcacccgtccacattgtacaacggcagactggcggatgccaaccgatgtgccgaaataccaaagttggtgccgcaaccgccgcccaactcgctggttgcactgcaacgcgcgctggcatagccgctgctgttggcactgtgcggcggacaattgttggtgccgtagtggccagactcatttggcgtggttggcacattctcttcaaccaatggcacaccgcgcacaatgaaacacagctgggcctcacgtggcagtgcagaaatgtgcacatcgaaatcggccttttccaaattaaaaaaataaaaattaatttttaaagagtttacccaaagttgaagcggcacattgacaaagtgatactttgtcacagcagtacggggcgaacttgagcacattccgtacgatttggtgccgtacatcaggtgaacttcgacgtaaaaactctgcaaaaatatgccaagaaaaatcattttaaaggagaaagaattcatttaaaaaataaatttaaataaatttattataaaaattaattgaaaatttattattttcttattcaaaatctaaaaaatagcaacaaaatgaaatttttatattgttcttaatatgattcagaaaaatgtgtataaaatttcgaaaaaataaaaatgcaaaaataaggacgtaaatttaacaaattagaatcaaatctcaaatctttttaaattcattaaaagtaagctgaaacccttaatttttctactttttgactaatttctaatacaaattatcaataaaaaaaaatttaacaatattctagtgaaatttttctgaaaaagttttttttgtaaagttcgccaatctttaggagtcaaaaataccaatttagctgagggagagtcattctaataaagcctaaacctaatgttaatgtgaatttggtcgtgattaattcaattctatgtttttacaacggcggtatttggtgtgcccacttataaatgatcaatgatataattgcttttactcactttgtatttggttgtccaatggccgggaatgttgtgcaccgactcaacgttcagcagcaaccgctcatcacacagtgatgagtc

SEQ ID NO: 16843 - DNA, 2773 bp, Heterodera glycines
atttggaccgagattaatcaggataaagaaagcagtgaccgaacacagtaagcacctcgtcttccgcgtgttcgtctcccgccgtgggttcaatcaccgaaaagtcggtgagtgcggaacgacaataggcgaggaagagccggagaagtgcggacacaatgcatgaagtggcattggccaacgattcggcacaatttgccgaaaaaagcatgtcaatggccgcgaccaaatccaacggttgggtgttgttgatgaaggtggtgatcattcttggaacataactctttatttcattttatcagtaatatttttgcatataattgccaattattccctcgcccctctctctctctcttctctcgctctctatttttctcactctctctctctcccttcatctttccgctctctctcttctctctctcactttatgctttggaggaccggctgacgaagccgcttgtcctgcgggttggccaaacacttttccacgtgatttttcaacgtctcacaaaaagtgccaaagatttcggcattcactgtcggataggctggaagtgaccttaaaatgccaaaaatattcaatttaaagttgatttgtagagattcgcagctaatttcccacaaaaggaatcccttcgcgcattttcaaaaattatgaaattttaaagacaattcgaacagaccaaaccataaatattcatagatgccgaatacgcttaataaggtcgtgctattacttgtaattctaaccgaaatgaaaaataataatttctcttaaatttaaatattttttttaaatggacaaataaaatttgagacggaaatgcccttttattgtaagtacgaagacggaagtgacccccgcccaccgaaagatgctacctctttgttgttccattaggtgatggggtggacgggagttgacttttgccaacttcgagctcaacatcactgcccttcgccaacagatcgccgacgaacggatgcctccctaaataaattaaaaaacatttataaaatttgaattggcatccaaaagtccaattggaattttataggaataagagaaaaaatcaattaatttaaaattgattaatgctaggccaataaatgcgcaccaattggcacgtcgcggacgagaaattcgtcggagccgtacactttcagcgcgaagtcgcccgaggggattttgccctgattttgcgcaattgcctcgggcgtcagcagatcaagcaacactttttgcagaatttcttcgctggtgttgcgcgctccgcaagtgaactccaaccggcgcggctcttccggcgtgtcgcgcgaccaactgaacgtgaaaaaagcattagccgatggaattaatgccaatttctgatcactcttggcactgatcatggctattttcggatcaggcatttaaaacattggagggataagcttagagcggggcattccgtactgacattactcaaatcacacggagtaagcgttttatattttaaatttttgcccaaatattctttcataagtcatggggttgaatttaaccctttgacaagaggcgaaatatcactttgcccctctttgcttgaaaaatgctttaaacaaatcattttccgctgcttacgtgccatcttggtggacaagcaatttgatggtgctgtcttcgtcgatcacaaaatagtccaacaccggggaaaggaagaacacattttggctgggaccaagtgccattttccggcattcgtcggccaacaattgtttctatttaaaatgccaaattactaattggtttgatttattcaattagtccatttgaccacctccttatggaaatcgcagctcaatttgctcgaagccttcagatcatcgcagctcagcattctgtgcgcggctgttctgcttgctctccgtttcttcaaaattttgaaatgctaatttaagcagcccaaattaattattataataattactattactacaataaatttgtccacaatgagtaatttaattgagcctaagtgatcgcaatcattttttggggaatggaacagcaggaaacgtttctttagacaatgttccaattcagggtttttttatagtgtttaacctcacgataataagcattctcaaatattttaatgcttaatcacattgtgttgtattgactaaaaatttgcacaaatcgccccgtggatttttgtctcttttcactttatcttcatgttttgaaatttttcacggaaaaacattgacataaggcttatttgtgcaaaaattattgtctcagattactacgaactgagttacaaaaagtggactttgtcaaaattgaattttaatccaacaaaaacaaataaagcacctaatgcttaagcatttcttcctttacctttaagcattccccagaagaagcatgtccattgcagctgcttgccttgttcgccttagcaatgtcggaagatgagcatggaactgtagaacaaccatcgacaagatgaagctgttcattggaagagtatgatgatgggccgaccacggcactttccttcgtttttgtgtcacttttttgtgccgttttcatttgttgcagcttcacatacaatgggtcaaacttaataattatttggactttgaactgatgacatgaaatggttgattacttcttcaattgccatcgaattggtacttcgcggtgatcgcaaatcgatcagatcaccattgaatgttgctgatcggaagggcacccgaaggggtggcgaaaccgatcgaa

SEQ ID NO: 16844 - DNA, 1578 bp, Heterodera glycines
aaaatttattaagattttaataaattttgttctactgtacaaattattaggcaataataagtaaaataatgattagtttttaaccatagtgcgacattgcggatcgacatttgcggaccagtatttcccgattgaactgtcaaaataaagaaaaaaaaattttttttttaaattttcaataaattaaatactcccaaaggggggccacctcgtccaatttggcctgaattaacggggtgtttaaacgtggcaaaatgggagcagcattttttaagtgtatctgatcattggtcctattctgtgagcacaaattatcaggtgaaagaaaacttgactgttatgcgactggtgcttccgctagacatttcttacgcaattttgtttggcatttatttgctcatcggcatcattttacgtcgatttcgtgccgtgatgtcggagattaattacgtagcattttacaatacggcagttactgtaagcaattaagattttgtaattatttttgatagagtaaaggaacaaatacatggattttttgaagagggactgaaacgtgaaatcacccgccggacaaattttggatttttctagattcagccatgcatccaaagctgattggattttttgaaaaataaattttttctgggtccaaccaagcagtgtatcccaatctccgaatttttggactaaaatccaaaaaaaattttttttttgattctagttttgttgcagaatataaaacctgggcccattaaattccgtgcgtcagcatcagaaaaatgcagccgttccgaatttttggatttagaaccagatcagagtcccaaaaaaccgaaggacctggatcagaaatttttagcttttgttgctgcactcacaaaggaaggtctggaggtgtccgtggaatttcggaatgaaatttggtgggtgcatagagcacccatgggttcttaagaaaagtggttttattttctgcgaaatgagtacgagtgccgagatatgacgtgccaaacttttttctatcccaataaatcgaataaacatttgcaccgttttgtgttgttcggtggtgcagaggttgtgcgtttggcgtttgtttttgcccccacaggttcgaatccctcttatgcaaattaatttcccccatcttatttttgcttttatgcaattgaatggccaaaaaatcaatcccactcgcacccaaaaatttatttttcgtccccgttcctaaataaaatgtccataaatccccaaaatattctcaccttcccatattatgacaaaaaatttaatggtcgaattggtcaacaccgtcttgtgtccagtgttgcgacctggagaaagatcggtgttgttggtcgatagttggaacggttggaatgaatttcggctcccacaaaatgtccaactacaagtcaaacaaattccaaaacacgggactggattttcccaaccattggacgtttatgtttttcggtactaaagtcggggtagtaaaaaatccatcaaatatttttagagtttggaagcaattcacaagaagaataacggaatttgagaggtttacgacattaa

SEQ ID NO: 16845 - DNA, 1309 bp, Heterodera glycines
  unsure (1)..(1309): unsure at all n locations
atcatatattgttgatntagtaaaatgcctaattaggcaacatcctcaaagggtaaaattttttttcgcttataattgtgttgtttttgaaaatgtggattaaatatttcattatgggtgggtatgaattcgattttcattaagaaaatgagagcaaaaatatttaaataatgtttaaattgcagaaatattaaatttgtacaaaaatgtgtaaattaagttttataaaattgaaattttttgccaataattccttgtttgttttaattatttgcgaaaaaatctcattttttgatgaccaaaaagataagaaaatttatccccaagaagatgagttgaaatgctcattattttagctaataatttaataacaattttcttatttttatttttttttgatcagtagagtagaaaataaaattcattaaaaagatgtaatcagcaaaaaattaattataatattaataaatattacttatttttaaattttttacataatgtggatgttttttgattgaaataaatatgatcagtagagaagaagtaattattttaaattattttttcaaataaattggtgttgtggtttttttcggaaatcagtagaaagctttgatttttcacgtgaataaaaatgccaattaatggacaaaaaatatacatatatgatttgggattttattttaaaaaaattataaacataatcccggaaaaatgaaattatgcctattactcattttaattatatttataattgctgaaattaaacgaattgaaacagctaataaaaaattactgcaaaaatcattcgatgaaatatttggagaaaaatgggaagaaaaggaagaagaaaaaagagaaataattgggaaatattataaaataaaagagaaaataaagcaaaaaggaagaaaatattcaaaaaaagaatggggaaaattgaacataaaatagcgaaaaaattggggacaaatcgaacaaaaatttataaatggattaaagaattaggacttaataaaaaaatacagaaaagctataaattgaaaactgtaaattactgatcaaaattttatatcatcactatttaatataaattagatttcgaccttgacaataatgatttagtttcatggaaccaggtctaatttattttatttttttactaaccttggtttttcctagacctgctggattttcttggattttcccagaatacccatgtccagcaggtccaaacaaccaattttttttccggcgcaagtggaacttaatgatttttaaaattaaaaattcgattgactttttttaa

SEQ ID NO: 16846 - DNA, 2796 bp, Heterodera glycines
acatgaaaacgaagtaaaagtcattagtgcttcaataacagatcatttgaaccatttttagagtaaaaatctgaaattcgaaaattttgattttcgactttttgttcgaattagggtccgggattcggaattggtcgaaatggatgccggattcgtgatcagctactctgaaaacctctagaaacttgttttgtaagacttttaaattttttgtacttaaaattccggcggtaagccattttcaatttatttctcacagcataaaggcaaaaacaacgcaacacttttttgttttgtttctgatgtattgtactttaaaggcaaattaatcacaacaaaaaatgaaaggaactttttgaacaaaacatttttaattaaataaatgattttcataatgcattttccattgaatacaaagaaaagggccataaaaataacaaaaggattgggtggggatgagtcactgcttttcctcttccggctcagaaatttgcatccaatgatttggcagtcgctcttgaaacattgtcacctgaaaatgagaggagattaatgtgactgaaatgaattaattaattggccgggactgactttgttgtcgacgccggagacagccaaaatggtggcacaaaatgaccaactgacgtgccaaattgctaaataaccaccatatatttatttcttcataacttgaaatctcacggtcggtgtatttgcatagaactcggttggtccacttctgctcgtccccgtccaaattacagcgccaaatgataacacgcccatcctgtaaaatgcaatgatttaatgcaaaataattagagcggacgggaccgtggccccgccgggagggattttgccgggactcacgtcccctttcttggacaaaccaacgggaccggtagtcccagtcacggggtcccgcccgggtccggactaaacccttgtaggctaatatcatcgctaaccactccgcacgaggcgattgtgctcgtctgcgactcggacggtgcccaggcgacgtcgcgcacccaattctcatgtccgtcgagttcggcttccattcgccaagtgccgggactctcttccctatacaaagaatccgaaaattaacgctactggcgaattggaaaatagtgcagatagtctccacccttccaaactttttttaccgaaagctaaaaaatcattagaaaacaattaataagttttcttgtctccagccttccaacgcagccatttatattaaaaaaatattcggaaaacaaaaactaaacaagttgctattcaatctgaggttatttcatgtgaattttgttgaaaatgaatttcgacttgttccctcttttgcagttttggggtccaagtgaatttggacgtaatcgacgagcaaaacttaagccaaggccacatttaacttcactttttttattgtataatctatcccgtcaattgtgaagcgccaaaaagtcctctccgaaattttccacaattaaaatttgtatttcgacctccaaactttgacgagacggtcatttccacccgaaacaaaacgctttgggtcaatttgttcactgacatccaaggccgactgcagtcgtttggcgggtgcccaactcaccgcgttgcatccctaaaaacatttccgagtcatgtgccagattcgaattgaatggcacaacctcgtcgtgggcgttggcaattttcaccggggaccacacatcgcccatgaattggattatggaaattgagcagtcggtggagcaacaggcgaagatcagtccgtactcgggggcagcccaactgatgctgttgatgctggcctcgtgttggttgtattcgtactgaaatggaatcactcaatgaataaacaaaaagcaattcaaagtgtggcaaaattgagcaccgatttctgccattttccgttcacttccctccatacgatcacttttctgcaaatgaattaagaaagtttgttaatcctctggcatattgtgacgccgtcccccaatgaaattcaaaatttagtaatgttcagtttaagtcacgaaaggtgaatgaaaaattatgcattattagggatatcacaaatcccaaattcgaataaacttaaaaattatgtagcgttttttatttttgagcaaaaaaatcgggtacttttcggttttggggcctagattttaatttaaaaataaatatcataggtcgcacagaattgcaaagactaggcttaaaattatattgcgggcgtacataaatgccacaatttgagctgtgatttcttcaagttgaatatgtgtcatttttttggcatcatagcgccagatgaactcgcacaaattctgtgcgtcttttgttttaaaaaaaataaaaataaaatcaaatctaggccccaaaaccgaaaagtaccaaaaatcttgtgtcggtttcacctgtcatgtgaacaagaggccaaaacgttgtcaaatttgggatgggcccagctgacttgccaaacggggccgtcgtggccggtgagttcagccatcggaaacggttgtccattggccctaatttcgaaaattttgatcagatggtcacttgagcaggtggccagccgagtgccataataattcatttgtgcatcatgctattaattcaaaaaaggtattaaaatatgtttagaaatcactcacaattatgtctctgtgtccagtttcaacttttgtcgtaagtgatgccatcaaaacaattgcaaatgggattctttggcaataattttataacgaatgacaaattatttaaaaaggctgaaaa

SEQ ID NO: 16847 - DNA, 893 bp, Heterodera glycines
attacaaggaatacttatgtggaaattgtggtatagagcagaatccgggaaagccaaaaatgcgcgaattcgtaaccagaaatgctagtcttatgaagcgaaaagtacagttatatttttctgatagtgttagtgagaattgcaattgaaacattatttatcatatattcaagcattttttaggaattaaaatatttaggaattcttgtagcatcctattcctacatgttgaaattgagtcgaatacattgtgacatttatgcattattgtaaaaaataaaatggtttttagctgcctacctgagaaagtttaaaaatgtctttctcttcaccatggttttgatgaaagagtcgatctaacatataatttcgtgattaacctctaattacaaggaatacttatgtggaaattgtggtatagagcagaatccgggaaagccaaaaatgcgcgaattcgtaaccagaaatgctagtcttatgaagcgaaaagtacagttatatttttctgatagtgttagtgagaattgcaattgaaacattatttatcatatattcaagcattttttaggaattaaaatatttaggaattcttgtagcatcctattcctacatgttgaaattgagtcgaatacattgtgacatttatgcattattgtaaaaaataaaatggtttttagctgcctacatgctagtctaatgaagcgaaaagtacagatataaatttttaaatactattattattttaaaatttaatttattattatttttatttaaattttagtgtgggagagatagagagggagagagagagatagagatagagaaatggtcagttttcgcacatttgctttttgtggccctaatgaggaccgtttggattatattgatccaaa

SEQ ID NO: 16848 - DNA, 994 bp, Heterodera glycines
  unsure (1)..(994): unsure at all n locations
tttctcgcattttntatcggcgagaatgacgcggtctacgtccttctcatatatttccgccttcgctctttcgcgcactttggttgtgccaatttggcacaatctccaattgggcattttctttgtccccctcctcctcctccttttccttctcctctccttcggaccctatgccatccatccaaatgtcagaggtgtagtcgaaaaatggtgtgaaatcggctaaaatgccatttattattatttttcaattattatttaaattaatttaaattattttttactattttatttttttttatttattttttttttgctattttattactaatttttcaaattaattatattttcgttaatatttattttttatttttttactttttataaaagcacttaaaacttcggacgaatgtctgggaattttttccatttttttagggagaattgggacggatttggttcaaatgattttaaactggcactttcggccacagatccggacagacccgccctagccagccgattctcgaacttaattaattacttttttggctgttcccttttaaaatttgcgaccaaaaatttgttcgttgcaaaaaggcgacaaaaaagttcctttgaaaagcaaataatcaatggctctttagtaggaacttttggcactaattgctttttttatttttaagatttgtaaattaattatttttaattttatttaatttttatattttcatctttttatttaatttctatttttattattattttaaattttcttttttatacactctccaataggcttggattatgccgccgccatctcttggcaccctgccagccgccacatgtcaccacacccctccaataggctttggcttctcctccccaccgcccaataggctttggcttttcctccccaaccgcccaataggcttgggtttcacccaataggttttggttttcccttacccacaggctcttgacccggaac

SEQ ID NO: 16849 - DNA, 3029 bp, Heterodera glycines
ttgctcacattgatttgctgcacatcgccaaaacagattgcttccgcgtgtcgacgatcagatcggcgctccaacaaattctggcaaaatattttcaattttaaatttccaataaattccccaaaaataatcgttttataattaattagttttgccttaaacaattttttggctttattgaggcgaccatttttcgcactgttccgttgcgctgttccgtcaccttaaaggacggcatgccaacaattttatatttttttaatggcacacctcaaaaacattttccagtcgaatttccacggatttgtcaatttcgagtccgcgcaagtgtaattttttgtactttatttgatcatcgcaaaacaatgtgatgttggccaatgcatccaaatttggcctaagaaaaaaattcaaaaaattttacaatttaaatgagaattttttcttaatcattggaaaattttaggaaaactaaaaaattgtaattttttttttgaaaaaaatataataaattttttatattttttccgcttgcctttcgtccgggtgctgttcccatcgcattgtgagaaccaaattttccaatgatcttccatgttcaccatatctttctgctctaatcaccaaaaaaaaaaaagtttttatttttctgaatttttaaaattaaaattttttgaattttaaaaattttcaccttacgctaaccaccgaattgccctcgtcgtgtgagccgtcgacacgacgtgttttcaccaaatgggcctcctcatttgtataaattgccgacccaccggcataactaataaattttaaatacaattttttccaaacaatttttaaatttaattaaagcgaattcttttaaattttttaaaatattatatatatttttttaattactgctgttcagcgcggaaattgacaccataccaccgattgggctgaagccaattcacagtgtatcggcctgaaaataattatcaaaaaaatcaaaatgattttctgaaattttcctcacccctagtcaaaaccaacaaaacaccggtcaaattcatcggtggaagctcttcgcctgtcacagtgtcaacaatcgaaatcttaaaaaaatatatttaatttaaaaatattttaaatttacaaatttatttttgcgtcttaccgccactcgcgcagtgtccggtggcccctgccgtgtggtggtgataatcatttgggttgaggacacatcaatgctttccaccttattaatttaaatttcatcatttcttttttataaattaaatagtaaattaaaaaatatattttttatttaatttaaaataagacttcaaagaattttaaatcgttgattgattgtggattagaagaaccacctgatcaaccagttcactagcaggatttatcggcatttgtgttgtggtggcaaaatgttgttcagcaacaatcaccgtgccaatgggcaccggattttggggaaattgcgcaacggcacaccgtaccaatgcgacaaccagcaggcacacaattgtgccaataaatacacccatgtttaatcaatcaaaatcaatattcactacctaattaagaaacaattaaaattattacaaaatgccaaaaaaacgaaatgcgctaaaaatcataaaaaaatgccaattgcaaaatgtgtaaacattgtaatatccgatggaatttgtgctgttggctggcaagacacacattcattccgctcggttggccaaattgtggcccctggcgatttgtcgagcaccgtttggcctttaaaaagcattcttggccaagagacataattgtgggccaatttttggttggtcgcagaagtgtgtgccatggaaacgaagttgggaaaaacgaaaaatgctagaagaatttttttttttttttgcggtggggacacggcgtagaaaatatttttgagaatgcgagtgtgaaggatgggaattttacgaaattttatgggattttttttttaaatcactgcaggggcacagctaggggggagggctgaagtggctggctatatatagcccacccttgtcgaaattgaaatgaaaatttttatgaaaaatgaaaaataaagtgaaaaaatagaaaggtcgtcgctcggaggggcttatagtcccccccccccatccctcgaaacctaagggtctggttttcgtataattcgaaatatccccaattccgaatacttttcagattggctcctggtcctatcaatctgaatatcttcggcttgttgttgatgagcgtgacgtgttccttggtgatttctacgataaccaggaatggctgctggtaaaacatttttatccaagaaaattgtaggcatactttgtaaaaaaaaaaattttaaatttttcatagaaaatttcaaataaaaaaattgtcgtataaaaatttcaaagataaattttctctcatttttttttgtatattaacatcataaaatgtagagagcttcgaattctatgctaacattcggctttgaaaaatcttaatctaagttttgatcggacacttagaatggaagaggccttaaaattttcaaaaattgaccccctcgcccattccctccgttcaaaggtcgatgcaatgatttccaacgggtccatgctgtacttgcgcaacgaatccttctccactgtgcaaattcagctgctgcttcggcgtcaatcattctactacgtgttcaacttggttttccccaccactttggtcagtttttaaaaattttgaaatttaatttatgcaaattgtcaaatttaaatttgcaaaaaaaaaatagggtgcctttaggcatcattgaacagggttttttaaaataagtttttacaggtttcattggttgctgtgatcggtttccatgcgccgatcaatgcgactgggaggcgtgaaagcaaatttcgacttggcgttatgacattggtaaaattgaaaatcacacacgaatggtgtcattaaatctgattttttttttggattttttaagaaaaattcaggattaaaaa

SEQ ID NO: 16850 - DNA, 2643 bp, Heterodera glycines
aggaaaagggtaaataccgtaataaatatttcaaatactctttattagtgccaccaccctctaataaagcccccacaaatagcatggggttgaaaatcgggtacattatcatttatctcccgcgacaaataatttatcaaaaaaaaacatttttagaaatgtttatacccatatcttgcgattttctatcccgtatatttgtaattccatttgctattaataagtttttgtttatccatccaattcaaattgcccctagtttaggcgtcgatgtgcaagaagtgtcctcgagttccgccgggcccaccagtgataagtgaaagaagaagaagtgatcatttgaggaaggaaatgaaatgattattttaggcaatgctttatccgctaattatttgctctttgagctttatccttttgttttggctatttattgtttgcttttttaggttgatttttgcttccgaatatgcttggatacataaatattttctgcttataaatttatataaatttctgtttttgattagtcaaatcttttttaacatccgaattcgtgctctgcaccttaaaatagccctagaaaattttttccaagattttcaaaaaaaaaacgggaccagtaaactccatgattgccgttattgccacccaaaaagttataaagcattgaacatgctatggctttgttgtacaagcctttgctcggctccattaatccttaacacaccgagtcaaaaacgagacatgtgtcaataaagagagagtgcagagaaactttttttctctaacttttctctccttttggcatactatctaatattttcattattaggaaaaataacattcacttcatcctgtttaacttttttcctgcttgttaaatccacaccaaattttgcaaatcgatagagaaaagaaaaatgagcaaactttcagtgttttgagtaaaaattttggcctagaaagttattcaattcgcatttatctgaaatgtttttaattttttaggatttatggctaaaaaaattattgcttacgcttcaaggcagaagaggtgctgaacaactgaaaaaaaggcgagaagctcagacggagaaggcgaggcaagcctatttggccaagagaagtaagttttttcagcattttttactcaaaaaaatcaattttttaaatttcagccactcaacagccgaaccccaatgccgaaatgccacagcaggacgaaccagggccgtcaacatctgctgcatccgtcgaagaagcgatggagccaccaccaccaactccagcaccagtgccaacgccggagatgtacgaggaaattttggaatttggcttttcgctgccatcgacatctgtcacaccaatcggcgatttggtgccgttttcgacaacaccaactgcgtcaatggacaccggagagacgacctcgccaccgctggccattgacgagcgatcagagcgcatcgaacagctggaaaagcaactgaaggaccgcgacgacaccatcaaatttctgcgcgagcaggtgcgaaaccgagaagcgctgatcagtgatctgcgtcgtcagctggagcaatgtgcggcaccaccaacggcgaaaaaatgttgatcatttgcaacgcacctcacgccgcaaattggctgaagaaatcgccactgtaataaaccgggacagatcatgttcggccagccgggcgtccctcgaacgaatcaatcgggaagttcggcacaaatttgcccattacaccccccagaaaagccaacgacaacaaagcgaagcaattgatgcagcagacggcctactgattctctgcctcgttggcacactgaaatcatacgaaagactgaagcgcacatttcgtctgatcaactcggaaattgatgttcttccaccgcttaaaaaagttagaaaaattagggaaattttgttcatttttttaggttttggttatcaagcaaaaaatttgtgcgccattacattatcaaaaaattgaaacaacagctggtgttggatttgtgtgtctcgatgtcaaggccgctttggaatttcggctcagttcggccaaggacaattcgatcagcttcgacgacgaattgttgatcaaactgagcggggaccacggccaaggctttaccaaattgaccatcagtttcggccaagcacttcgaaacaactctgcttccaacgatttcattgctgcagttttcccggccaaagacaccagggaaaatttggaacagtatggtgctcttctctggccccaaattgatcaaatgaatgcattgatcaacagaccgattaagtggtaaaaagggtgaatatttttttaaattgtctgaaggtttatcggaggtgatgtgagctttgtgtgggcactgatcggtcattgcggatcagcagtgacttcatttcaatcacccatctgtaattgtcatcgtgatcagatgctcactgaaggatggcagtgtcaaacccggacaatcccgcagtcaacgcaacagtcagaacaattcgccaagcagtggaaaacggagagaaagcaacagccgcagttcggtccagcacgatgggaattgtcaaggcaccgctcatgaagacaattgaatttgatcggattattcccgccaccgtttcacgtg

SEQ ID NO: 16851 - DNA, 1021 bp, Heterodera glycines
gtgattttcggtctctagaaattaaatttataatcgaaattaaggcttccaaacatcgcaagacgacgacaccgaaaaagaaattaaggaatttctcgcgccggaaatcgcgaacccagacgcgaacccgttggatcgaacggaagaaaatcgctccccgattttcaatcctcgccaaatttgcggaaaaatatctttcagcacccgccaccagtgtcccaagtgaacaaacattcaaagtcgcccgtgatgttttcgattatcgccgttccaaattatcacccgaaactcgcagaacaacttatttttttgaacaagtctcttccccacgaattacaattattgaaactatttttttgtgtattttattaaacttgttatataatttctacataattgatgaaatttgtgggttttttcccaaattaacatgtaaaaattaaaatttgtactaacccggaacccggtcccgggcccggcagttttaaaatccgggttgaccgggttaaccgggttttgagaggccgggcccggaacccggttaattctggaaaaatcaacccggcccggagttttttggaaatttcggtctactaaaaatactttattttctttaaaattggctcaaaaatcagcaaaatttatgcaatttttagacaaaatctgttaacaaatcgcattaaaaatcataaaaaaattcccggcggcgcctgtcggcgccaccggacgcccctgtccaacctccaaaattttttaaaaaatgtcgcaaaaaagaattttgaatgtaaaaatggtcgccaattgtctcaaaatcgcaaaaattgataatttttgatgaaaatctgttaacaaatcaaagaaataacaaaaaatttttccggcggcgcctatcggcaccgccggacccttgtaaaaatatttgatttgaagcaattttgcgaaatgttcttatttttgaccataaaatcttattttttggccttaatgttcttattttgaaaatttttcgatccgagccctg

SEQ ID NO: 16852 - DNA, 2170 bp, Heterodera glycines
  unsure (1)..(2170): unsure at all n locations
ttgaaacggtcttttgaaaggnatcgctcaccaaatcacgacaacgacgatcagaacgatgagccaaactggaaaaccgctcgccgaatcaccaatcacacacggttctccgcctccgactgattccatcacttgacgaacattggtctgaaacaacaaagcagaaatagatgattcacctgtaaaaacgtcaaactcacgaagtacgccttccacttcgtgcacagtgccgtcacttgtgtgagatttcccaagttgactttgaacactcgaccgtcaggcaattccgctacttccttgacggttttgatttggcaggtgacactgcgggagttgcaaccggagccagcgccccctccatccggacagttagccgattcagtctgaaaccacaaaaaactgattgtttatgtgacaaattgagtgttttcactcacctctgtctccaacgctccgagttcacaaaatcgaccgctgacgacgaagttgttcactgatgagaggcatgatgctgatgttggcgcaaatactttgaagctcaaatcctcctttttgttcgtctggaaaccaaagaggatcatagcaccagtggcattagtggcgtcggaaccaattctgaaatgggatattgggatgattgattgtttcacaaataaacgggttttgcacaactcacagcagaccatcgtcaaccgctctgaagccattgatttcaccgtctttcgccgtggcacaactgaggctcgccagacgcacgtgctcaacgccagcatgacaaccgatgaagagaaaagcagcaatgaacagaagcggacgataagaaattgacattgtgttgctgcgttaatagaaataatgaaaatccccgatggaatgatgtcttttatagaaacatggtgtgcataattctcctaaaagacatgcgttactgcgaaatgcaattggttgttctctatataagggatgtatgtgtagtctataaaatggttttgattcccattactgcaatccattcacatgcttctttttggttttgttcatatgtatacaaaaaatctttaattttgtttatttcaaatggacttcatcttttgtaaaaaaaaaaacttccaaaccctaggatttttttcaaaattcaatgaaattcaaggtgttttggggtgtccaggtctccatgaagcaatgacctgaacatttttttttgtaatcagccttaaatttgatagatagactatttggggtcaaaaaccagaattttgaaaattttattccaaaaatgatcataaaaaatgagtgagtgaaaatttagtttataaaagcgagatcacgcatgtttcaagctcatttttcaacttaaatgcagcaaaattttgtatcatctatctcctgatttattgcctatttcgactatgctccattccctttgctaacggctttcgaaaatcacgaaatggcatttacaccaactttttgatgtgatcaacggttttcgagtcctcccctttccccggatttctactctcaattattctccgttttgatcaacggatttgcgaatccccccttcccccgatttctactctcaatgaatctccgttttgatcaacggatttgcgaatccccccttcccccgatttctactctcaattattctccgttttgatcaacggatttgcgaatccccccttcccccgatttctactctcaatgaatctccgttttgatcaacggatttgcgaatccccccttcccccgatttctactctcaatgattctccttttcaacggatttgcgaatccccccttcccccgatttctactctcaataatctccgttttgatcaacggatttgcgaatccccccttcccccgatttctactctcaataatctccgttttgatcaacggatttgcgaatccccccttcccccgatttctactctcaatgattctccttttgatcaacggatttgcgaatccccccttcccccgatttctactctcaatgaatctccgttttgatcaacggatttgcgaatccgcccttcccccgatttctactctcaataatctccgttttgatcaacggatttgcgaatccccccttcccccgatttctactctcaatgaatctccgttttgatcaacggatttgcgaatccccccttcc

SEQ ID NO: 16853 - DNA, 2120 bp, Heterodera glycines
tgaagctgtaaattgcagcgaagtgcgcgtcgacgaagtgccgttggacgagcgtcagcaaatggccaacggcacagtgatgcttttcctgttcttcctgttcgaagttggcattgcttccttggcattctgtccaagtgccttttttcactcagttcctctatttgccttgtctcctcgcaatttggaagcatcgtcaacattcttgctaccagttcctcttcttcatcggcctcaccgacattctgatgctgcccatccaggggctcgtctccggcatttacagtctgtttggcgttgtgttctgtgctaatccgccgtttaattttgtcatcgcttcgtgcggcgcaggtgcaaaatcctatcaattttatccaattcaaattccaatctctgtttagccctttttgccgctcagacgagtgccaattttttcttggcattggaccgactcgtcgaaacaatttctccaagacttggcaaagttttatttgcaggtaaattagcaaaaaaggcttttaattgccattttttcagaaggccgtgcttggcgatggacaatggcatcgtccgcacttggcctttattatttttgcatggttaaaccggccctatttgcaccaacctatggcaattggttcatgaacccttaccaggactacgcttctgtggcggttgaactaaaagacgtaattgcccataattagctaattgtctaattaataatttcctgttagtacattagcccattcgctgtttattacgacacttttttgtccttcggattccccgcgatttatcttctttttgttgtgttctttttgcggaaacaagaaatgaaaaagaatattcaacagaagcgaccgaccacaattgttgtgtcgacccattcgcttttcaaaaaggtgaaaatatttttaattttccaaattaatttcccctttttcaaaggttgcaaacaaaaacaaaaattgctcttcgggcggtcattatgcaaaaatcgtaagtcaatcatttatcagcagcacctaattagtgtgttttccatctctaattgccaggtgtttgtccaagtggccgcaattaacggcataaatgtgggcacttttgtgctttataccgtaatgcagcaccttccgatgagcaaatcgctgattgtcgtcggcttctacttcaactatttgatgtttggtcggtaataacacatctggcaacaattaactgttttattaggcattccgccaatcgtttatttattcgtcaaccgaacaattcggaacgaatgccgcgcgatggccaaaaaattggtcaaattctgatgaaaaggaagcagcactcctccaccggagatcaccaattatttttcctaattcctttatcattctttttgtatctcttttcgttttttcctttctctcattccctaaaatttgtaacatttttttttgtatttattaattagcgaataaattgcatttatccaattaattttcatagaaaatagaaatgacacaaataattgcaaagtgtcagaacaattatagcccatgctcatcagtgtagaacaattgtattcatccgcatcaatgcgttgttcaccagccgtactgagtggccaattgctgggccaatgaaaccgtttccactcggccgacgtccgtgtccgtcccttcggtcactccgacgagaaatgctgaacactttcatttttaattaacgaaacaacgggaagtgctgatgaccctctgttcgttcttgcaatcgtaacgccgtgttgtccgtcaatctctcctgaacatttgtctaattatggcaattagtgagttggatcgaaccgctgaggcaagtgttgttggcagcggacgggggctgcgtaattggatacctaaacaaagagtaggaataagtaattaaaattatgtctattacgcacgtcactccttcgcaggctaagccacggcttgccaccacgccgggctaaaacaactaattaattggggcaatggccaatgattgtacatttttaacggtgctcactgcccccttcgctttcattcggccccaactaataaacaactacacgatattgaaagggaaggggcgcggaaatctccttgaaa

SEQ ID NO: 16854 - DNA, 1653 bp, Heterodera glycines
acataaaaaccaggaaatgcaaaaccaaatggaatgattttttgaaaaatttaaaagcaaattggtaaatttaatttaattttaatttatctttctctctccaaaactaaaaataaatgcgaatatcctctcataataaaataattaaaaattagacaattttgaattttgaatttttttgaaatttaatcggtcaaattcgggaggaccatttgcccattatcagcgaagagggcacttccacagtctccgccgggtgctgaatcatttggccaatgcccgtgaaaatctccgcaatattgtgaaaatccatcttaattgtgtgagcacaaattatccataacagcataaaattggcactttctcttcttttatttctatttattttaccgggttttccccaatgccaaaaacattctgttgattggccaacaaagcgacaaaaattgcggaaattaatgtcgaaagcattttcatttcggagtagaatagttatgcaaaaaacaaattaaattaaatttttaaattaaattattttgtcatttaatggattcgctttcataataatgaacagaataaatgggatttctttcttttcttttgatttgggtgaccgatttttcctgaaaacagaagtgaaaatgctgtgaatgtgcgcgatggattttgtggcgatttcggcggacggatcattcggcgaaatccaaaagtgtcggagcattcgcgcgcttcggacgagtgcgctattttaggtcatcaaaacctcgcaaacagaagaagcagatgagcaaccggcgcagaaaaagcacacttatttaagcaattaaaataataatttgtatataatattaattattagcaggtcatttcggcgctttgaaagggtttaatacacaaaaacacctgcttttatgtaatatttgtgtatctaatagtttcataaaaaaaaatccgttcaatcccggaatctgaaccagttcaaacccatggccccaaatctctaaccacgcaattaaatgaaatcattttaattttttgttcatataaattggtggtgtacaattgattagtggttttctgtttttttaaacattgtttgacttttgggtttgagatcagctccagcggactgctgccattgggaccaagtcgaagtccttcaaaagctgacagcagataaatgagcatgtgatggcatttgtcgttaagggcaccaaaacataatttgtaacaaaactctgtcacaactcgccagcagatgcaagaaaagaccaagatatttccggcagcgtttgattaaaaaaacaaaaaactaaatgcattcattttaaattgtttcacgtcgtttactaaaagattaaattataaatctttgggtttaaagtcatcaaaaaagtgacaatttttatgcaaaattcgctaattagatcagataaattttcaaaattttcttggccgcagctttggcaccgccgttgtcctccccttcaaagattttatcaattgtaactttatttcgactgtttcgtgcttattaatccttttggttttgccatatctcttctgcctctcttattataacagttttccatgaataaaataaaaataattcggtcggaaaggcttcccggcgaatgaatgaattcgcattgg

SEQ ID NO: 16855 - DNA, 209 bp, Heterodera glycines
atcaccaaaatttggacaattattttcgatccgaccccggttaagactaaaaatcaaggtatgaattcgaactgaggcgatctaagcactgggactactgaatcatataaaaatagacacttcagtaacaaaaacgattgaataaaagacagttaacaatagagaccggcgcgggacgggatcccgatttatacaaaattgttttttgg

SEQ ID NO: 16856 - DNA, 1806 bp, Heterodera glycines
aaaaagttttgaaaaaatcgcgctgtaaaaaacgtgtaaatagtcactctttttcccaaaaatgttctaaaataatgaaaaatgacaaaaaaagattttgataaaataattgaataattttttcaagcgaatatactaaaaacatttgtgaaataccttttacttggttaagaattaaaaaatttagcctattaaaatatttagaaatttttttgttatattgtatatttttggaaaaatttcctatttcttgcaccgcaaaaaagtggttttgaaaagaaaaaaatagtcaaatttatgaaccgttaataatttgatttccgatcaactttttaccgtcggatccaatcgaaaaatcttagtcgacccatcagccccttttaatgcatcccgccagcccctaaaaatttatttttcagcattttttgatttttggaaattttttgaatttaattaaattttttcgaattttccaaaatcccgcaatcccgcacgggatcccgcaaattttaaatgcgggattaatcccgcgggatcccgtcccgcaaaaaattttgagttccagtcccgcagcgggatccgcaaatttgaaatttccggtctctagttaacaacggtggtcgatcatttcgccactggtcgtttcgtcactgttcagttcgtcactgatttgtgaggaataatttttaaaaaatgttggcaaaatgtcattgtgtaaattattttcattaaataatattttttatttcggaaatgattattaaagaattatgttgaaaataaattctgcatttaaattattatttcataattatttaaaatatatatttttaattctttgttacatgcgatggaaaatatgcacaaataagagtgcgaattggtcagtacattttgatttgggctaaaagatcgttatcttaaatctccaattgaggcaaatttaggcatttttcgtgtacatattttttgatttagttttggaatttgacgggacgaattcaagagggtcaaaaactaacaattcgttggaaggatgacattacatttggggatcagttcttgagccaaaaccgctgtttagcaaatttgcaaggtggcaacacatagttgctgattatgaaaatgcgccagcaaatggcattagaaggaaaggtattaggcgaaatccctctatgttgatcaggacaacaatttgcgtcagatttttgctgaatttgagcagcgagcagcacaagaccccatttgttatctaagagcatgttcataccatttggggggaccagagcgtttgggccccggggtcgtttgggccccggggtcgtttgggcccccgtttttgggccccggggtcgtttgggccccaacccaaaaatagaaaaatgtgctttttaaaaaattaagattctaaaaactaagcctgagggatccctcgccacttggcataagttaagtttaattaacattcgctcattttttacaattttacttattccaaatcctattattttttaatagttaaccaatttgatgtacattctgatttggacatttttcaaaaatggctaacccaattgcaaccaaaaaacaaaaagtaaaattgtcttacgaacgccacctttacaccttcgctaaaatgagttctgatgggatgacaaaattttggagatgcgagttcaaaaaatcaatttaacattattttggagtttctccggggaatttctcgcaactatcgaatgaacccgtgaatttctgttaatttttacattgtttattgttaaaattattgttgaatttatttttaaa

SEQ ID NO: 16857 - DNA, 2620 bp, Heterodera glycines
tgcttttcaattcattaattttttgacaattgtatcttctgtggcctaattatgcacttttctacctaaaaatgccttcttcgtttgtttaattattttaaaatttcatcttccattcataaattatgcatgaatttttattgaaaaatgagttaaatacaatttatggtgtattgatgagaaagacagatacatcagaaaacaaaaacattacaaagtgtggccaaaattcttcacattgaaatcgctgcctataattcccttcccaacatatggtcggtaacatttctgtaggggcatggatacgaccctccctccctcccgaatgttcggtcggaggaagttaggataagtgacaatgattggctcataatcacccgttgttgcgtaccgcaccacttcttctttgaacgtctcgtaacgcatgccttggttgttgatcacgtcgtagttcagcgtcaatccgcgcaccttgagcacgtattccttttcggcatccgccccagctccctttcgtcgcaaacacagaccatactaaaatgtgaaataatcaatacagattgatgaatttaacttaaaatttacctgttttgcacccccactgcaaaactccacaatgtcgtggtccgggtactcgtcagtgaactggcccagatgtggaccaattttgagcggacatcgctcctccgggtggacgaggatgagactgtctgtatctaaaaaatatttgcaatttatttcatgcaattttttagagcatatgtaccggtgtagagtagctcagagcctggcgacctaaccaccttctgcatggctttgagcagaacaagccgcgcagcggaagtggtccacagagagatgactaaatttatcaatttagcacaattttataagtttattctcaccgatgtttgagcaagcgtgctcatcgacccagtcctttttgtggaggtaggtgatgaggatgtgcgtctcgtccagctgatcgatcgatgtgacttcgatcgatttgttgtccaagtactcggccagcgtcaccgggtcgtcagtgatgagtgtctggcacaggccaaagttgcgaagcgaaaaacgcccccctaaaaattacattttctgtccaaatcatatgtcaaagctcacataaattgttcaggcagagctttgccagggaccgttttcccttgttgaccaccatttttgcaggatcaatgttgatgccaaactgctcagcacactctcgtacaaattgttcttccttctcagcgtcccctcttatgctgctgtcaaatccgcttgcctggattttttgagccatgaattccgcaatgtaggggcggaatagcttgtcgtcgctttgctcgtattctagcacgcggaacaccttcgtgacgcggtaaccctcgtcgagcgctgcgttgagctcaatcgatgtgcaggtgctgacccatccgcgttgttgatcagtgtgctgacagtggtagtcgttgtccacgcctccagttggatattctttggcacaggcgatgcacagaggaaagcacagtcggtcgtccactttgaccggtaacaccgcaacgtcaattttacggggcggcacaacccagactttgagcagcgccagcgggaaaggattgtccgctgcgcttgtccactgcacttgttggttcagcacgtgcactttcgggtgtccaacaggatagcgagtggtgaagcttaagatttaaaatttatttgtcaaatggagaaaaagaactgactttatgtaagggtataacgacgtgaagtcgtaataggagatcttctctccgggccccgccttgcgcagcaatttcagtggcccggtccgtcctcccgtaaatgcgtccctgatcaccagtggcccgtcatccacgtagttcgcgaaggatttcctcatggctttgctccgctctagcatggacgtgattttgcactcccaatacacgtccacacgattcactcgggcccggatgtattccatccgctttgcgtcgcgctcccgtacctgccccgctgtctttccgttgggcaacaacatgttatcgattggataacatttcttgcatccgtgccaagtacagccttaaaatattaattttttatggaataacaataataatcaataccgtgcacttcaattgcacgcccctctgcctcaatccacccgtccagcgagtaggggccgatccgtttctctcctccggcagagtgggcggtctgcacttccacaccgtactcctccgagtaccagtggaagaaccgtagggcgagaaggctttgattttgagcgttgtcgtaaccgcgctctgggacgatggccagatggtcgtcaggcaggtggttggtgcgaaagtgtcgcatgcacgcgccggcgatggtcatgcactcacgaagtacgtcgatgccatcatggttctctctgtcgtcgatcccgtccacgtactcctggcgacgcgaaatctcaaagaattcccgacggaatgcgacaagggcagccatcagaatctcgacatcattcgtgcaataactgaaacagaaaaatttaatttgtacattttaaaaaaaacccctttacctggctagcgcctcatcgagcataaaa

SEQ ID NO: 16858 - DNA, 4054 bp, Heterodera glycines
aaacgaaatgtaaaaagaattttgggattttaataaattttactcaaaaataaataattttcttggcaattatttcgaagctcctcgcgttccaaaatcgatttcctatattcggcaaatcgtttattcaaattcaaaagtttatttaaaaataaatttttaaatagagccccccgattaagcaaataattattatcgcaataataaaccgccattttaaggttgtgcctcccatttcatcgtcaacaacgtacaaacagaattggcctcgggatcgcccaaggggcacgattacataagagaaggttggttaattgttgttgatacccgaacaaatcaaaaaaaaaaagagagaattgggtaattaatgagttaattgattctatcgcccaaggcaatcccactcgtgatgtactccaagaaagcatagcgaccctggagaatgctcgccattgccgaattttcagctcaggacttgccgcaattgcagcagtgtcccatttgcttaattccggacgtaaaatttaaaagcattcccaatttttagcatcctttccttagagcatgtcatcgtgtcgggggattgtaatgggcggcacgaaaaattatttcgacaaaatttgtgtgccgcatcatggcttggagctgagttttgtggatttgacgcgattggaaaacttggagaatgaatttaagcccaacacaaaagtacaaaaccataaaaaaccatttgaattaatttaattaaatgggcagatggttttgtttgaaacaccctcaaatccgcttctaaaaatcgtcgacattgaagcggtgtgccgtatggttcgagcacgctcaaaagattgtgtcgtcgttgttgataatacggtaatgatacgagaggcattactatacgtgagggatactgtagccaattacagttcatgacaccgtactttcaacgcccgttggaacttggcgccgatgttacggttcaatcgctcaccaaatacatcaacggacacaccgatgtgctgatgggcaccgtagttaccaacaaggagcagcttgatcagcacatatacgcccagcaaatttgtagagtgattttgattgaaagatggctttcctagcgtatgtatttttgccagcccaaaaaaatcgacaaaattttgaaaaaaaatgataaaagggagtttttaaatatttttcagatgctggcgccgttccgtccgcctttgatgcctttttggtgcttcgtggcatcaaaacgctcccattgcgaatgcgccagcacatggaaaatgcgctggcaattggacgatggcttgagaaggacccgcgtgtggaaaaggtgaaaaattagaaaataaattaaaaagtatttaaaattacctaaaatatttaaaataatttgtcaattaaattgttgttaggtgctttatcccgagctcgagtcgcatccgcaacaccaaatccacaagaaacagagcagcggaatgtccggcatgctctccttttacattcgcacagattttgacggggcactgaaattcctggccaatttaaaggtgttgcttaaattctaagcattttttaatcataaatttttcatttaaatattttattaatttgttatttttaaatattttttatacatatttatattttttaggtgtttttggtcgcccgatcactcggcggtttcgaatcattggcctcactgccggcggccatgtcgcgtgattccgtgccagcgaaggttcgcgctcagaccggcatcagtgataatctgatcagactgtcaattggctgtgaggacaaagctgatctgatcaacgacttggatatggcaatgcgagtggcgacggaatagcaaattccttttttttggtttttcgaaatttaagaaatgttgattgatgatttacaccttttatgatgttactaataatgagatatattcacatttgccttgtcttttattccgattttttataaaatgtttttaccaaggataaagccaaacttaatgcttaaaagacttggggacatgacaatgcgaatggcgacggaatagaaaattcccttttttggttttcgaaatttaaaaatgctttgatgttaattatgccttttgtgttgtaaatgctgttacacaaaaaacaacaaaatgataaatttgttcataactttgtcaaaagatttttggtatcattaataattataagtgtttttatgagcctccaaaatttcgtttaatcttaaaaaagaccagctttttttgtacttctgcccatatttttcttttcgtcaaaaatcatgaaaaaataaaattttgtcgtttttgtagattcatggtcacatctttttatggcgagttggcttaatcaactaaagtgactttgattccctaaataacggaaaattattgaagagaattttttttaattttaaaaattatcaaaaattgtaaatttatatcaaaaataaaattcattaaaaccaatgttgttttcccgaattcgagcaaaaattcgaattcaatccccccccccccagcattaatggcaaacttcttttttaggccaaggacgtttagcagatcatttgctaatggagattgaaatgcacataattttttggtgaatccaaataattatgcgtttgtaaaaattaagaaaaaaattttcgcaaattcaaaattttagattcaaaaacgttatttttgaaaaattttgaaaaatgctaaaaactttgagatatgcaaatttattttaaagatttcttcagggaaaatatttaagacatatttcttttatgctttttcttgagtacaatctgaaaacagctgctgcaggttaaaatttttagtaaaaattttctcgagaaaattgaataaaatttaaattttcttaaaaattggtaaatttatgtcaaaactaagcaaaaaagcgaaaatttcgattttcaggttggtttttcgctaaaaattagtttttagtttattctatttttttcttataaataattttaaatactctatttagttttttgaagtccatatttttggccatatttcgagattttaaaaccaattttttgcagccctaatgatcagttttgcaagattttttctgaggcaaaagaaacgaaatagaggccaaaaggggtgaaatagcaaaagtaggggcaaaaatggcaaattcaaattttcatcaattttcaataatcttagctttttgaaacattttttaaaacaaattaaaaagggaagattggaaaattttaggcatttgtttacaggtttagtgccaaaaggctattttagaaaaaatttaaaaaataaccaaagaaaaacctggatatattgatgagcaatggaaagttgcttgaatattcacgaaaatgtgcttaattgttttatgttcatccaaatagtttctttaaatttaatatgctaacaaataaccacataagtattcttaaagaaattgaattatttctttcgttgttttctttttttaaatatcaacaatcaggacttcctttttaatgtaaatacatatttttcttggattctccttgctattaataataggaaaatcacttcttttttgtgtttgcgaacaaaagtcgggacttttattggtaaaacggacttttactggtcacataaaaggcctaaatatgtgttaaaaaatgcaaaaatatgtgctaaaatttggaaaaaccaagtgtatttacgcaaaaaaaaaatcgtatttaatatcagtctttatcaattttcgcccgacctccaatcaaaattttggcgatatcaatcaatttgtaaatcccggattaatttttccatcagttgaataagttccttccgggaactttgaaatccagtgacgatttaacacagcgtttgatttggctgctttaggcagttaaatatataaagaaattttctaaatgcttaagaaacgtaaagtagtcaattttagggtgcattttcagattttcttgtatttttcttacgatttatcgcaaaaatgccaaaatatgtgctaaaaaatccaaaata

SEQ ID NO: 16859 - DNA, 3329 bp, Heterodera glycines
cgcatttacaggccattaagtaccttgactggcgcgctatagtgaagggctccagatccaacatgccggaaatgggggtgaaaaacgaattcgtaaccacaagctggacggctggattcaatcacaaaataagtgtattgaagtgctcggatggtacgttaaataagggtgctgctataataataataacaataaatgttccaagctattggcacggttgcgagcggtgttttgaccctcaggataagctggtcgatggcaaaacatgtcgagagcttaatgaggccacccaagatcgactacaccagctccgagaatcggattgcacgggagagtgcatgacggttgaagagatttgggtatgttgtgatggttgatgacccaacaatatcaattctaataatgattcatttcaccgtgtgcaaaccaaaaaaaaagtgaattaaggagtgtgaaattaacgccttgctgtctgatgcagccttggaggtaggtgtggtacacatttgctgaggtgctctcatgtcgatcggtcggtcagtgggtcggtcgtttgatgttcacaaaacaattcaggtcggacaggaccgttgaagctgtttgccgaaccaaaagaggatgaaaagatatcggtatacgatattgtcagtctttatccgtgggtaggttgtcatccgaatcagcattatgatatgctttttctgaatgttctgttttaggtaaactacgataccgagtatccaatcggagtacctaaaattatatacccgtctgctgtacagatgttggttaattggtaatatttatcaaacacactgttcctggtagaaccaatcaaacgcacgcactaataaccaggagctcgcctgatcagctggagtacaaaggaatttaccgcgttcgtgtgattccgccacgagggctacgcatccctgtgctgcccatgaagttggatgaacgtctattgttcagctgctgtcatcgttgtgcgtctcagttccgtacgctgaacacgcgatgccagcacgtgtgcgcacattcggatgctcagcgagcatacaccggcaattacactcacattgagctggcaatggcccttcggtacggctaccgtgtggaccgtttctggagagcgtggcactatgagcagtggtctaccttaatgagcaattcttctcaaattggaaacaaaaactgtgcttttcaggagcgaccaaatcttcaaggaatacgtacgtctcttactcaagcttaaggttggttggttggttggttggttggctgcaggtttcttgttctttcgcgttttcacccgtttcccgaaccattatccaaacaagcacattgcacatacatatatgttacgcagattgaggctagcggcttcccagatgggattacaactgaggcacaaaggcaccaatttattgatgcatatgccaccgtgtatgccgtcactctggacgtggaccgtgtgcataagaatccagggcttcgcttcatcgctaaactaatgttgaacagtctttggtaagcaaaaaaaaaattatgcaaacagtcgcctcattctttttttggccgctatgatcgcatccatctcccatcaatcaatcaatcaatctgttttcaggggcaaatttagcatgagaaatgaactaggaacaaacaaggtcatcacaagaccgcaggaattctactcattggtgctcgaccataaagtcgaaatttctgccatcattccgctatccgacacagccattcgagtgatgtaccggcacaaaaaaagtttcgtggaggagcattcgtcaagcaacatagtgctcagcttatggacaacaagtaaattgtcaattcattcagcaaccaggattctgtataacaaacaaaaaaaaatgtttgtttgtttttttctactccaggtcgtgctcgattgaagctgtttgagtacatgatgcaagtgcagaatacggatggagccgagcttctttatacagtcagttatcgtaggcgaacatatgcatttgtcacagtggttggcataagagttaccttttcccgttgtgtctccaggataccgacagcgtgattgttttgcacaaacgtgatcgggtgccaatcctcacgggcgaatatcttggacaaatgtccgaagagtacgcgggatttgaaatacaaaccttcatatgcggaggtatgcgctatgccaattagtaccatcgaacggcgtggggatgtgttaactgtctgccacttaggtgcaaagcagtacgcctttcgtatgacaaatgtgcggagcggtgaagtgaaatatgttcaaaaaattcgcggcatcaccttcgatgtgcggaacagtcaatcgctacaatttgagtgcttccgcaacaaagtgctcagctacggaggagtagaaggaagacgtgccgatcgcggcggagatgatgatgatgatgatgaggacggtgatgtcgccgtgcagcaaagtgcagctgtgttcacatatgacaaaatacaaccgacaagggagagccgaattatcacacgcaagcaaagaaagcactatctgcccgtttgtcagaagggcataatcaacgaacagctggaagttttaccctttggctaccgataaggcagaatcagcagcagcagtagttcatatcgatcataagcaaattttggttctcaataataataaagtgttgttttctattggtgatcaaaagcacaggagtcgcccaatgtttttttaaaacacgcaacccgtgtacatccatccatccataatatgtgacaatgcgcatgcgtttctgctatcgccgttgttgtttgtggaccgtcatctgcttgatcgtcaacaccgccattcgttttctgcttcactattttctctcttaacgcctcaccatgcgttgttgttgttgttgttgttgctgtttgtggtctggcatcagctttatcactatcaccatcattctttttcttctgcgatattttttctcttaatgcctcaccatgcgtgcttattggttttgttgttgttgttgttgtttgttgactgtcatcaactttatcgtcagcaccaacctcattgatggtggtacccgtacgcggttttaatgactctcttgcaatcaatgcagatgcggtcggccctggaattgcactaccagcagcagtcgaagcaaagtgttgttgttgttgttgttgcttttgttcatcacgcttttttgcctcaaattcaagcgcagcaaatctcttacgcctgtactcaatcagtttttttgcttgctcaatcttcttctggaacgaggcatcgtcctttaatcctactg

SEQ ID NO: 16860 - DNA, 2747 bp, Heterodera glycines
tcttgccgatgctttcaaaattccattttaacatttattttcttatatttcacatttcgtttgctttttaaagaaattaattaacataaatttattttaaagtaaatggtttttctttttattttcgtcatttgatttgcttattcaccatattctgttgagtgtcagtccattcccatctctttttgacgaacagcaaaaaaaaatttgttgtgatttttatggaattttacacaaattgacaaaatattatccatttaataacagagaaatttttgagctttcgtaaaaataaattaataaaaaagattatttaaaataaaaatgagaatatatcattttatacacaatagaatattattatcatattaaaaaaacagacaaatgaactttttgattaccgttttcatcatttttaaagtgacaataaaattcacaaaaggccagccgaccacaaaaccgtaataaatattttattttttaattaatttcatttttaagacataattcggttgccattgagaaagtgaaggaccagcgatttgacgcattggcacaatgccatgtcattaatgggacggacgaagccacaaagaagccttgcggaattgaatttcgccttccacatggaggaggaaattgcgatgacgggttgaaataaaattagaaacatttgaaaataaaattaaaataatatttataacaaatagaaatgccatttaaaattgcttttttagtttttggatctgctaccagcctgttcttcaacgtggtcgcactttggatacaagcaccaattacaaagcgaaaagaacattcgcaattgatactgaaaaggtaaatagtatttaattaataatgtaattagttaattgcttgcttaaatgattgtttgtggtccaggaccattcaattacaaaagaatgtgctcaaagaatgccgaaggatagtggtaaaagtggcacaatgctttggcgtggcattaaactgcgcacagtgccagtgccatcggacaaaaacaaaggcaaacactcatcatcatcgactgataatgatgatgaagtcaccattttggagacaacatttaacgattcactgaaaatgtttgtttttaaaataaattcgaacgtggtcgcgactgcaccatggaggccagggttagcaaatcagtgccaaattgagaatgataattttgaattgcatcattttgatcacttcctaataattttatattctttttgttaattttgaatagggtcagcgcagaagggaggggggggggggaaatcatcggtactttcatccttttgatcatttggatgttcttccatttgactgattcgatctaataagttattttcatttgcttagtttatccaaccatcgaattccaacgggccaacttatttggaaattccatgcgttggttcggttttatgtcctccaaaacaaacaaataatgttttctcggccaaattcaccaacaccggacagcaaatgattatcatcaaagcactgacagatgccaacatcaaaagtgtgaaggtggaacttttgagtggcaaaaagggtaacgaaacattgggacacaaatttcaataaagccaagccaatttaattaggtaaatatgtctagatgatgccatcaaaacggaagtgagctttaaaattggaacggacatcgattttgaggtggaattgcctggggtaattttgaaaattattattgcaattactttaatcactttcatttagtcctcgaaattgattcgaagcaaaggcatgcgcttggcccgtggcagttacgtgttgaacttggagattgtgctgctcaagcgttgctacatgatcagactgaatggcactcagtttggcggacttagttgccaagcaggtgttaagcaatattttaaaatcgaagattctccaataatttgagcgaatttttaagacggtttaaattaagaaaaatgcaaaaatttaatattttatgactaattttatccatcttatgaagaattttcaatccaaacgagtctatcctccctttggttttaatacataattttgtaataagtgtcactttaaaagcacataaattttttttttctaataattaagaaaattcggaattataaacattttttacaaaatttatggaaaaagcttatcagggacaaatttttgagaaaaaaacaacctagtattcatatattatatttacttatttcgtgttttagcacatataaatcccagccctggtcagaatttttcattggaggcgatcaatcggataaaggtgaatgaatgagacctgaataattcagcactgaattaagcaaaatgttaaatttgggtgtttaaggtccaaggccaaatgttgctttttgctgatccgcttgtgaagcaaattgatgacaaaacatttgtgccaaatgaggtgcgactttaagcaatgccaacatgaataattcgcatattttcaggaaaattcaaaattttcatcgggaattattaacactgaaacagatgaatgtgttggagaaaatgtaagttaagacctcggggcaaaactgcttaattaattaattttgaattaaggcaatcaatccataatttgtaaatagatttttaaaatcaaaaattattgtaaactatgaaaaaaagctatttttgaatgttttgttaatccattttgcatagcaataatctttttttgaacagatggtatacacattgaaaatgaa

SEQ ID NO: 16861 - DNA, 2153 bp, Heterodera glycines
caaatgagcatttataatttctctttgtttccgccatggaatggaaccgaaattcccttttatttgccagagacccatcactgttgtggaggaagatgagagagcacaggtgacagactcggaatatgaagacggaaagggagtggaagaagaaggggaggaggaggacggagaagaaaaagtgaaggaggaagtggaagaggagggggaggaggaggacatggacgacccgagcggagagagggccattttacgagcaattttggagaaaaataaaccgaaacaaagcgaagaaggggaaatagtggacaaaaaggaggaagagcgggacgagacgaaggaagacaaaggcaaagagagggaagaggagggggaagaagacgaggaagacggcacatccagtgtggtgacggactttgaatttcaggcatattgaaaccgaaaaattcggaaatacgttgctcaattacagttcagcacaacggatgatgacgcggaaatggagagcattggttccgatttggagggaaatgggatcggaaaggaggaaacgcggcggaaaacgattgggggcaaaagggcgagggggaaacggggtggcacaaaaaatgccaacaaaaaacaaccgcaaaacagcggacggaccgggagagcggcagcgattttgggggcaacgaatgccgaaaaagtaggagaaagcatcgaatggcatggcaaattgagatgaataaaattgaatttagacaaaggacggcgggcgggagaaggaaggagtggtcagttttgagaggtccaagcacagtgttccgcgcaacatgtggtacaaaaagttggccaaacgtacaaaagccaaacaccaacaataagaaataattgatgatggcgattcaatgggagtgctgttgcgacttttaaattgtcattttgtactgttgtttttgttgtttgttcataaaatgccaagaaagagaagggttacctatcatttcgtcactgagacataattttttaaaaatattggctaatttcaattaaattatcttatgaaagtattaaatggtttaaaattctctaaaaattattcctttataagaataccaccggtggaagcccctttttcgaaaattttttgagattttaaaaagccaaaaaataagtttataagattttaaagatcgctctgatcatgaatttgactgttgacttaaatgataatgctctgagataacgatagggattttctgctgctgctttctgcataaattcagcaaaaatttgacgcaaattgttctcttggtcaacagagagatattgcgcttaagacttttccctttaatgcctttttctggcgcattttcataatcagcaacgaatattaccatcctgaaaactttaagcatcccttttaacaaatttattcataatgcatccgatccctggtcttttgtcgaagttgaatccaagtggtgattttatgaaataaaacgtaaacttaagtctgcaatataaaacaaggatttccaatatttatctaaaatttaaaaaaaaaaaattcctcagtgccgaaatgatcagtgacgaactgaacagtgacgaaacgatcgtccacctttttaacatttttacatttttttgtaataattaatagactaattgagtctatgaagagttttcgaatgctatcaagattgttggattcggtcaacaacttaaaaagttacattgactcaaagttgactcagacggagttgacaagttccggataaaaaaaatgaccgtcattttcttggcaatggctcaattaataaaaaaatgaccatcatttcttggcaatggtacaattaaattacttacctaatttatttgtctccgttgaaaaaaaaaaaaattacgagccgattttttatgctcaatactgaaatggccgacatttttatattttctttccccgccggccgcgaccaaatggccgccgcaacagcagctgctgatgctggaaaatgcccacatttgccatcatgtttctaattagttttttttttttttgcttattggcaagggacccaaaactgagcagaaatgtgagagaaaagtacggcatgcgtaactttttcatcacattctcgacttttctctcgccattttgacctgca

SEQ ID NO: 16862 - DNA, 1649 bp, Heterodera glycines
  unsure (1)..(1649): unsure at all n locations
ataaatttgaacttttttttggtattccaattgtttatggttagtttttaaataaagatattagatttttcatttttttatctaggaaaaaaaacgttcacccgncgcttcaaccccccccccncctccaaaanaattgaaaaaaaaattcatttaaatgaaaaactaattaaaaaatttacggtttaaaaaaaaaataatcagggcgaggagatgcttcctcaaaaattgactaaattccttaacaaaaaaaaattgttggtaaaattttttgtcccttttcagctggaacagtatgccgatttgtatgccagctcttgcttcaacttggtccattattcggtctgctatatcttccgcgctccaatggcactgatgccgcacgagtcgacggtggaccatggggccgcaatgccggacatagggtcacgccaaaacatgactgtggaccatggggccgcaatgccggacatagggtcacgccaaaacatgactgtggaccatggggccgcaatgccggacatagggtcacgccaaaacatgactgtggaccatggggccgcaatgccggacatagggtcacgccaaaacatggacggtcagttgttgttttggggttttgcctaaacgcccgtctccaggagcaatgaaaaaattttcaaaaaacaaatacaaatttgcatccgcgggatccttcatttgcggattcgctgcaagattagtatattaacgaataggtttttatttttatctttctcttaaatctaaaatgatggaaacttttcaaacaaattaatttgtaagcaaaaataaaagatttctttacagtcaaaaatatttaacacttttgcttatttgaataaatgtttctaatcagtccaaattcattttcaattatttttctcgaatatttctttttcatttgcttaattttctctttaattttaataaatttttgcacaatttcccttttatttttatcaatttcatttaaaaaatgatcaggtatttgtccactattttctgacatttgatcacattcgcttgcaatttttctttcatctctaaattttcatcaaatatttgatcaaattgtcatgccaatatttttgaatcaatttttttttttgcattttttgtcctcttttttcgtcagtttgtcattgtcccattcatacatgaaaaaaggggggggggtcgacccccccccccccccttcgcccgcaaagtgccccaaaatggggtaccccttcgcatcgacggggggccggtgtaaaagaggtgggggggggggggaggcaggaccagtgtaatacgggcacttggtaatgctcgataacagctatttggttgataaatgcttgaactgatgtgaacatttaatatattaaaacgtgaatgtgtgacattgagctgcttgacaaggaaactgcgtacgattcattagcaaacagctataatattactatgaccttgacttcatactgggataattgtgcttattcgagagctaatatatgcactatagatctaatctcaccagagcgaattgtatttgtacttcataaaagcaagcgccctaagggcgttaagagttgactcagaactactaagttgatcgcacggtcttggaacggctacgtgtgttt

SEQ ID NO: 16863 - DNA, 1521 bp, Heterodera glycines
cagtaatgggacattttttgctaccatataacgacctacaatataggttgaaactgaagagattattcttttttggtatttcgcaacttaatggagaattttaaagcaattcatgattcctatatcaataataatcgtaataaaattaaattagtgaccccagtatggtattcattcatttaaataattcattaacatttttttggtttctaataatgatccttttgataaattttgttataaaattttgactccacatattctaattatgggaaactgatttgcgaaaataagatagacaataatagacagaaaatcaatttataattaattaacacatgttaatttgcgggcacatatcaattaaggctaattagtgttcattaatgcgtatttaattggaacatttattcacaagtcttatcccccaaaatagctgttataattatatttttttattattattagtataataagtgccacttcacagatatattattgtatacagaaaaattgtctgtgaatggaaattgtattaattacacccttttaaagtgtcattttctctaatataaatttcctgttattatatactttttagagaattttaaaaaaaataatctagtatactgttttctgtaaacgacaatactgtacacgctaaatttgtacccacttaaatacccgatgcatattttaataattaacggcattttgtgcttttacataaaaacataaattttcagcgaaagtatctttaaaccgtttgtttatcaaaatacaataattttaattgacataatttacaaagtaaattgaataactaaatttaaaaaaaccaatttttactataaaattaaaggcttcaatttattaatttaaaaatatttaaaaggattctaaaaagctaaaaacaaaaaagaattttccatcttccgctcaatttgataaattttacttataacccataaataattttttgtcacatatttccgccataatttgtggcattttgcacgaaccggcgaaggccatttgcaatccgaacggatatattactcaaaatgctaattaatataattaaaaaattaattagagtgagttagaataataacaagatgttttttcaaaccctctgttaattaaataaattccctttgttaattatatttttaaaatatttaacattaaattaaatataaattcttttttagaaaggccaaaagtcaaaattacgttgcgtgactttttatgttttgtgactttaccgacaaaattataaaagcaggctctataataggcgccaaaaaaattgaaaaaagacatgaaaaagcacaaaaccctcaaatgggcatgaaaaaaggcatttaaaattttttttttattgaggattttcagggagaaaaacacgtataacttaatcaaaaaattaattttgctcatttaaatgattattaaatattttataatgtttttcgaataaggaaaattttttaccaaaatttttttaacaagaaaaaa

SEQ ID NO: 16864 - DNA, 1721 bp, Heterodera glycines
ttagccatcataaaatgtgcaatttgtccacttttttgtcaatatttttgctaccatctaccgtatacagcaccggtgatgacagagtattccaccataaccgtatgaatgttgtcagacgacaattgcttcaactaccacattttttgaatggttgcgctgtgggtggtggcggtggttcatcaggcaaaaaacaaaaacaatacaaccaacaattacagcaacagggccaaaatggcatatgggacagcaacgaggtagagcaataccgtaatgactaccaactgaacagcatacggtatgtcttacaaatttattctgtatttggtatggtttaacttacaaattatactgtatttgttatgtcgtaccaatttattctgtattttctggtcaattcatatgttacagtattttgaaagcgattaagaaacaaactttaaaaacacttactaatcgcaagtcttgaatccacctgggaatttccataaattttatgaatttaactgaaatttatgatggataattaaacgtttgagggcctttcaaatgttaacaaatttgtcaaaaaattgaaaattatatagccgtcctaagaatcggattattcaaaaaataataaaagaatggcccacatattttttgaatttcctaaaatttagtccctaaaaaatgaccagaaaacttagcccaattcgaaaaaataaattaaaaaattttctgcaggccctgctatttctctcccgttcaatgccttttggtcacaccaggccaacatcgggcattcgttaaccacccaaagttcaaccagcaacagaagcagcagcagcagcacaattttgagcaacaaattaaagtagcaggcgaaaaaggcactgcagtcaaggccatcaaaggaagcagcaaaatttggcatcgacaaagtccaaaggaaagtgccaaagatggagcgcaacccagacatgaacaatatgatgccggcgatgtacaagttgttcatcaagacgaagctgttcagcaccaacagcacctcaaccatcacaaccgtagacggcatagattattgaccagcggccaaacattgtgccaacacaggcatggcggcattggtggtgatgccaatgccaatacgacagatggtggacgaataaagcagtggaggaggaagtatggcgaacgcaaactaagacggcatccaatttttggcaatccattccgaattggactatgaccatagcctaattagcatcataaagatatttttgtataaaaatttatcattttttctttaaaataaatgatttacaatgttttagctattttatttattagctctttatggcgattttggttgtagtttggttttttaaatacgaaatattttctatgaattcaatgaaaaacaaaaaattttaatttaattaaaattaagcaaattaaaaaacagactggacaattgtcattcaattgcaatataacctttaaaattttcatgcttaagaaggtcaatgtttgttgattattcataattagaatacgaaaagcataatgtctttaaaaattttttgatgattaatttgattgctatgaaaattctcacaaatggaaattaaataaaacgactaaaattaattgttacaagagctaaactgtttaaataatttattttcaaaaaacatatttttggttttggttttaaaaatttaaaattatcgcttaaa

SEQ ID NO: 16865 - DNA, 1991 bp, Heterodera glycines
gggggcgggggccggcggtgcctataggcgccgccggaaaattttgaaaatttgattgtgatttgttaacagattttcaccaaaaaaagataaaatttttgcgaagtctggccgttttagtcagagggtcggtttagtctggcaagctgcttttgtgctacacggtttttattgtgatttttttttcgaaaaatctttaaatctaatattaaaacatatttaacaaagtatttccaaaaaaaaaataactttcgagaaatatcaacgataaaattggtggtgtcgggattaacaatggcattgacatggtaattgtgatcattttggtaggccgggtaatgtgttgatggcattgtaagcctgtaagagtcgaagaattctctcatcggcggcatgagcgcctttggaggagggacttcaccagcgacacatcgtgcttgcgattatgagtcaatttttttaataaagctaatgaattttactggtcaattcctgggaagtttggtaatttgagcccgattttttaaagattttaccaaaaattatggtttggataggaatctgtcacccacagattgtattgtggactagaaaacttaaacatgtagaaatttgtgaagaaaattgaagtcctgcgttttaaagtcacatacataaaatcaaaattaataaattgtcgcattgatggggtgttctttttacccctatttgttgctaaacagagatattttaagtttttacttctttatgattgacaaaaaatattttaagagttctgggcgaaaacggctagccagactaaaacgacccctctgactaaaacggccagactaaactgaccctgtccgaattgcatagttctttgcctccttattttggctccctatcatttcgtcactgagaaaattaaaaaattgtttggtagattgtcttttaaagtcatctcttctccaaaattgtttttctccaaatctgtcgtaaggccagccgaaaaattttttacaataatgttttttttttttgcaaaattttgtgataaaaattgcttgaaaatggagaacatttgttcaaaaggcagtgccgcgaagagacgatgtgcggggtagtgctaagactctctagtctcgctcgagaaaattctcgggtctttttggtctcgagcagcaaccaaatccaacgatcttgaatcattcgagagcccttcatatgctctattagcctgcaaaattctggtcataacttttttgaaccttaacaaaattttttgaaatttttaagctaatagagaacacatagggctatcgaatgatatgaacaatgttggatttggttgtaaaaaagttatagccaaaaacttgtactcgtacgaaaacgacccggacccgaccccttgtacaattatgctcttaatgtattatggcgaaaaaataaataaattttagaaataagcacccttggaagtggaattaactgagaagctaaattggtctcttttatttcagagctttttgctagcacgtttgtttttcagcgacgaaacgattagtgacgaaatgattggccacccttattttaactacttagggtgtaacataagtttccgcacaatttttttttgacaaattcaaaaattcataactccgtaatttctgcagttattttaataattctttttttattttgttcgtcagaaagtcttctttcatttcatgccattgtttcattttttatttgcttattcaatttttttagtattttttcccgaccatgcaaaaattgaaaattggcccactaaattttctcgaatttttatggtcaaaaaagtaacctgatataacaaaaaagaaggttttctgtacaaattagaccagtagaatccgaatatggccttaaatctgatctatcttttaaccaggagcttgtctgctccagctccatgcatgaagcgcgagaaggacaggtttgtgagaacccagagaccaaatctaaag

SEQ ID NO: 16866 - DNA, 1935 bp, Heterodera glycines
attaattaaattcagatttcgcgacgaaacatttaaaaatagcagcaggttctgaaccgtattggacaaaaatattcacatcacattaacagtagaaaaaagtgatacgaatctttcccatttgattcttaaaatacatataaattttgccgctttcggccattgcaaaatgccaaaacaaaaaaattctgaattctggcgaaatgctatgtgccatttttggaaggagccgtgccatatgtaaaaatgagcaaaattggggtgtgaagaaaatggcaaaacaaatttgttatctcaaatgctggctctctctactatgttttttttaacctaaggcgggaattttgaattttttttgtctaaaaatggaaatttcaatttttgtgccggaaatttcttcataacaaaacaattataaataataaatattatttatttttgttgagcgaacgaattcacccaccacaaccaccccaccagtttttgtgtgtcaacgcttaaaaggtaaaatgaatgagtcccatgggaaaatgccgaaaattttggtgccaaatgtcattttaaatgccaagaaaacccatttttgggtttgttattattgtataggggcagttagttgttcattatagaaaacacaagtcccaaagtacaaacaaatcggaatatttatcagtagggaggtgattttatgtgttgcaaaagttcaaaagtgccaaaaataggcattaaaacatgcgagtgacgcaaaatgccaaaatgttgttcaaagcaagcgctcaaaatttagttttgatggcgagaaaagtttaaaataaaataacattttgtggcaaaattaattttaaaaaatgaagatgatcggcagcagttttgccgccctaatcccgaggcctaacatatttctcgtcccgaaacccgactcgaatttttttttttggaggcttcccaacccgaatccctctgcccacggcaaccctggtcggcagcgagtaagactaggttgggaattgataaatgaaatgaaactctgattaagtgatggcttaaattctgtttacagtacccaaattttttcatttcttttttttgtaatttgggatcaaagtgtttggaaaacaaattcgctgctgctgaaggaaattaagtaaacacacaaaagtggcgataaaataaatgataaaataaaatttaatcaaattatataacaaaattcgctgatttggtggtggaggcgctgctcaaaattttgtgttgtttttgttatgattatgggttttcttcgatgctttttctgaccgtgtgattcatttttcacctcacgaacattgaaaatgagcaaaaatatgggggaaattgggaaagaataactcgtgaaaacagtgaagaaaaataggccataggtgaggaaaaagtaaggaaatgcaattagtaataattaaaaacaaaaataaacaatttaaaaataatggaattaaactttgatcaaattttttataaacaaaatgaatgatcaggaagcaaaaaagaaagaaatattataatatttataattaattaaatatttcagaaaaaaacataattgatgtttttaatgattatttcttgtcatgaaaatacgttggaataaatgaaataaaattgttaataattaaaaaataaatgtaaaatatgtataagtttaaaaaatcaggaatttattatataaattattagcaaaataaaaattttaaaatttaaactgtagcacctaaaatggaattagaattcgcaattaaacaattgtaaattccagtcagattaaaatattataatttttgtttttactataaaattcaaaagttgggaggaggggaagtatctttgataaaaaacagtacgtactttttctttttctattcactttcatcatacatatttcccgaagcaacaaaaaca

SEQ ID NO: 16867 - DNA, 576 bp, Heterodera glycines
gcactgaccttcaccgagacgcatgcagtgcaagcatgcgtcgggagacaaatcgtcctatcggagcagaacttcggcattccaaaagaacaatttgacatcatcatgagcaaccacacaagagtgagacgcaacgtacaacccaagcaacttgcttcgcagctttcagctgctcaacttgccacaacaatggcactctcgcagctctacttgaaggaatttcagcgcaatgtgcacgtcagcaatccaacgcttcaggcacgaaaactcctaaagcgcgaaaatctgcaagctcgatgaatcagcgaaacaacaatcgaagtgtttccctgcgttccaatctccctctccaacatcagctaccgaacaacaaaggactgctacaagttcattccggtcacaatacatttgccaaacgcaacaagagacgcattcctcgacccggagatgcgcgctcaccatttcgctaccatcaccttcaagtgcaacaaaaccccaacttgtgggttcgaatcgactcaagaaatggaaacgtccaacgactgtcacaaacagtcatccatgagctctacgaaa

SEQ ID NO: 16868 - DNA, 3158 bp, Heterodera glycines
  unsure (1)..(3158): unsure at all n locations
aatntaattagatatttttaagtgttaagtatgattaattagataagataattgttttgttaggttttttgtgaaattgattaggttttgttaaataattgttgatttttatgatggacactgtgtaaattgaaaatttaattttttaatttttttttgtataaactaattaactaatatgttccttctgttggtatttgcagtttccattggtctcgtcgaccttccaaccatttttccttggcttttttttcttcttgtctgtgttgtgcttgtcgatttaggaaccagaactaattaattatttttaaataattaaaatatatattcaaatatttgattcatttaaatattcatttccctaattacattgacttgatgcatctcaaggcccagttgcttggcccagtttcccatttgaactggatatggataacgtgtttcgctaaatctgcgctccaatctttccaattgatcagccgaaatgatttgtggttgtatcttaaaattatattttttagaatttgcattttattaaattataatttctaattatttttaaataaataatatttattgatattttaaactaataatttttaattttttgaattcgtattttattaaattaataattgcaactaattatcattatttttgctttggtaattggccaaacattgttctgctgtttggcttttgcttcaagttgcttttcctcactaccctgtacacgtcgaaaatggaaccatttctaaattaattttaagcaattaaattaaatttaaaaatttaactgtccctaattacattgatttgcttctccgttgggcccgtttccttggccatttcttttcgcataaaaatgtccgggtatcgtatcgtctcaaattcgcattccaatttgatcaattgttcaatcggaaatttttgtttttgtgcctaaaaattaaaattgatatatattaatatagtatatatttcaatgacatttttcatcactctttccatcaactttcggtgccattctttgcgttgttcttcaaaccattcctaatttaaaaaaattgtattaaaaattattnttcttanaattgaagacccatacatcgacttgcttatgcgttaggcccgtcttctcggcacatttttcaataacagcgaaactcgggaattttgtcttcgcaaattcgtcatccattttttccaattgatcggccgaaaagttttgtttcagtggctttagtaaattgaaaaacattttttagggagttattcaattaaatttttgaaaaattgaatcatttataccacagttttttgttcaatcgcctccgttttggtaacattttgtggtgattgctgtttttcgtgtcggacactgaattttatttttaatttttttttatagtaattttcgaaattttggtgagtcatcgttcattataatttttaattactaaggaattctttctctccattgattgtgccgccattcgaaccattccttaattagataattaattaattaatgattaggttttatttttttaaatttaattaattactgcaatttctcactttcacttgcgtttccgtaaggccaatttccttggctaaaatttcacgttcagaagcactaaaatatttgctcttctgaaatccgctttccaatttgtccaactgatcggccgaaaagttttgttgttgagccttgaaaataatatttttttttaaatcagaaattttattttgtatttaatttgatatccctaaaattaatttgtaaatggttttgtttacttcatcgccttccatcgcgtccatttgattaagacaatcggtggcagaaatggatggaatttaaaaaaggctctcggaaaatgcgtcagaaatacagaatttctaaaataacggttctgtagcattaagtattttattgtacatggtacaaaattgcaaaattacataaatttttatcggagagcggagagggcctatccggagaacggagttggggagcgcaaaatatcatttgaaaaaatttaggtccgctttgtgttctttttatagatttttgagagccggtgaatttttttattttctataaaaactaacattttttaacaaaattcagtgtaatttttagttaaaaacctgacaatgcttctttccaaaaaaataactttaaacccgaaaaaaaagttttctcaagtttttgggaagccaatccttaacagtgtaaaaattgctcgttcctcaaaggcgagtaaggttggggagcccggtatcggggggctcaagagcctaatttaaagtggagccgaaattcctaaggcaaaattgggcgtatttttgtggcacaaattctttctcttctccttctaatcctccactcattttcttccattattaaccccacaaaatgtgtgctgagtctcctcaattgggactttgctggaatgggtgttaatctcagcaaaaaatgtattggtttgacctaaaaaaagacattttctgaagggacgccattcaaacaaaaaatagatgccaaagaatttggaactggcaaatacaataacatatatatatatattatatatatgcatggacactgatgagagtaaattaatttgaaaattattttttgcgattttcgtttgttgttcaaaatgccaaaaaatttttgtttgttttcccgtctctccgtttttcgccattcattaaaacttgcgaatacatattctctggaaatttcattgatttgccagagggtgttcgtgaggaaattatatctaaaaaataaaaaaagttggactatattatttttgcgttcattttagccaaaaatgcacggggcccaaatgcctctgactcgattgaggtcaaaccaataattttgctgactaaccaacgcccattccaagcacaaacagagagagtgaggggtcagcagaacacattttataagggttaataatggacggaaaaatgagttggaagaggaggaggagagaaggaaattatgtcacgaattcggcagtaggctttaatttaaattggtaaaaaatccgaaaatatatattttttaatcgtctgggcttgtagaaactcaccaaatattcgatagtattttttcgataccatgagaaattgca

SEQ ID NO: 16869 - DNA, 1937 bp, Heterodera glycines
tgctaattgcagcaaatgatggtcgtgaaaagaattcaagctaattgcagtcaatctttgaactctttaataatcacttcattaaattcgctttacaaattatcaaacaagagcatttccattttgcacacatgcttacctaatcttgtccaattagtcaattgattgaaatttcgaaactccaaatttgcttccatttcacaaatttagtcgctaatattccccagcagacaaaaggtctgctgatcccccaatagtaaaagcagcaaatgactgatcagcagagcacacatcatccgtccaacgggatcaccgacgagagaagaaaaagcaccagccaccatcacacactgcggcgatttgatctttgattaggcaggcgacagacacggatcggtggtacaaatggaagttgtccccttcggcagctcccctccccctcaatttataagactagggatgggaatttaagtcacgaaacggggatgattgaggtgtttttttttgcctaaaagaatcttacaaatatggataattgtttcaattcctggggccttatgctcgtctcgcggtttagagctaaaccacggttaacggcgttaaccgtggttaaaaatccttaaccggtatgctcgtccttccctttttaaccgtggttaaggctaaaccacggttgagttaaccgtggtttactgcctccttaaccacggttaacgcaggttaaccgtggtttatttccaaccggtatgctcatctaaccgtggtttaatctttcttaaggaatcttaaccacaactcgagttgtggttaacgtaaatttatttaataatttaaatagtaaaataaataaataaattttttctatggtaattttacatgcagaaaaagaatctgacttttatttttgtctattatataaattattgacggattagtgttatttcatcaaaaaaatttgaacacgcccaaaccgctaaaatagctttttaaaaaaggtgacaaaattgctgctgtttgtagcatgttgcataacaacgtaattgtttgtaatgcactattaccaagaaatgttggctccattgcagttcacacggccataaaaaaataatttgacaattttaatgcagcaaactttttcttgaagcatccaaattaaacattcttggtatcattctatagccccaagagtcctctattaatttgcaaaattaaaaaaaaaattgctgtgtttaaaaaagttatggccaaaaatttttagaaaaccaattcttgatttaatagtttttcggggttttttaataaaatctatgctaatattgataatataaacaaaaaataattattataataatttaattatatttttttaatattaattatttttcaatttcaagataaattctcttaaccacggttgagttaaccatggtttacttaaccatggttaaagacgagcataccggttaaggtcggtcgttaaccacggttaacgaaaccgtggttaatgcgttaaccgtggtttactaaaccgcgagacgagcataaggcccctgcagttaatcaaattcattcccttctgtctattttcgatcttttgtcctttttttataaccctcattcacattttttcggcaattcctctccaatccacaacttttcactccccgagggtcggggaggagcccttgtcctttattttgtttcattaaatagaaaactaaaggacacttacatgttccaaaaaaaggcggagacctaaagtaagtaaataattgcttaaatttacggttttagtgtctcccccccctttttaaatttaattagcatttacccttcccactctctctgtttaaatcgttttgtcccctaattgaagtgtccaaattcaattttagaacgtacatttcaatctttccctgctgcaatcgcaatcgaat

SEQ ID NO: 16870 - DNA, 1235 bp, Heterodera glycines
gcaattagacggataaaatcttcttctaggttgaagatcagtgtcgatgttgaatcatctcaagcatttctggcgggattggtcgtgcaagtcacattataaaaaatcggatcgaagctgagaagtggaaaacacgccaacaaaaagctgtatggggccgtcagagtgaaacaaaagcaacagaacagaagagatccataatataaatatgaactcactcttgaaccgtcccataggtactctatacttaattatgtaagctctcagtcaggatggtcggacattctttgcaaagacggaaagttcgatgttattctataatatatacagaggatattgatagcgtacaaaataagtaacaaatcgagggaaacagtgaatttgcctcttaggagaaggtcgagccgtggcaatgaatgggaatgagagttagaatagccttggcctcgcgatcattatcctccccccccccccccaaccattcactcacattcattcccatctcgggtttcacacttcttcttcttcttcctcttcttaagttagctgtttctcatctcaattcgggcagtagtaggctaggctcggccggttggccaccacataacggcgcttggccaaaagagagaaaagaggcaaagggttaaccctccgggggggggggagggggagccggagggaggagttctcttccaccgccatcgaatgggaggggggaggaagacaggggaggaacactcgagaaggaggcaaaacggaggagaaggaggttatcgagcggaagaatagttgacgacgagtttaagttagttggaaatcaaatcagaaaaaagtcagaagccttagctcagttaatgcgcggccatttgtttttttttcatttgagaaacctcaaatttcgtcacttccgataaaaaaatttttttttttgcgctctcaaaactccgctgcacccgcagcaattatttcctcgccgcctgcgcggcggcgtccctggaggacggcggacgacttgagcagcacggcggcagcagcggcggcgtctcttcagcagtagagaggacggatggacgacgatgtctcccgcttcgcccagctcagagcctcagcccccacttttctgccggacgacgcactgccccccactccccccccccggggtccctcctcccccccccactccaaccatttgaaatttggcggcgtaaatgcgtctattgcccttgcctttatat

SEQ ID NO: 16871 - DNA, 1433 bp, Heterodera glycines
tccgtaggaataaaagccaaagcgtggctgcgtcccgtccaacaatttcctagtgcttagtgatggactagcgagtggtgtccgtaggaataaaagccaaggcgtggctgcgtcccgtccaacaatttcctagtgcttagtggtggactagcgagtggtgtccgtaggaataaaagccaaggcgtggctgcgtcccatccaacaatttcctagtgcttagtgatggactagcgagtggtgtccgtaggaataaaagccaaggcgtggctgcgtcccatccaacaatttcctaatgcttagtgatggactagcgagtggtgtccgtaggaataaaagccaaagcgtggctgcgtcccgtccaacaatttcctagtgcttagtgatggactagcgagtggtgtccgtaggaataaaagccaaggcgtggctgcgtcccgtccaacaatttcctagtgcttagtggtggactagcgagtggtgtccgtaggaataaaagccaaggcgtggctgcgtcccatccaacaatttcctagtgcttagtggtggactagcgagtggtgtccgtaggaataaaagccaaggcgtggctgcgtcccgtccaacaatttcctaatgcttagtgatggactagcgagtggtgtccgtaggaataaaagccaaggcgtggctgcgtcccatccacaatttcctagtgcttagtggtggactagcgagtggtgtccgtaggaataaaagccaaggcgtggctgcgtcccatccaacaatttcctaatgcttagtgatggactagcgagtgatgtccgtaggaataaaagccaaagcgtggctgcgtcccgtccaacaatttcctagtgcttagtggtggactagcgagtggtgtccgtaggaataaaagccaaggcgtggctgcgtcccatccaacaatttcctaatgcttagtgatggactagcgagtgatgtccgtaggaataaaagccaaggcgtggctgcgtcccatccaacaatttcctaatgcttagtgatggactagcgagtggtgtccgtaggaataaaggccaaagcgtggctgcgtcccatccaacaatttcctaatgcttagtgatggactagcgagtggtgtccgtaggaataaaagccaaagcgtggctgcgtcccgtccaacaatttcctaatgcttagtgatggactagcgagtgatgtccgtaggaataaaagccaaagcgtggctgcgtcccgtccaacaatttcctaatgcttagtgatggactagcgagtgatgtccgtaggaataaaagccaaagcgtggctgcgtcccgtccaacaatttcctagtgcttagtgatggactagcgagtggtgtccgtaggaataaaagccaaggcgtggctgcgtcccgtcaacaatttcctagtgcttagtgatggactagcgag

SEQ ID NO: 16872 - DNA, 2087 bp, Heterodera glycines
  unsure (1)..(2087): unsure at all n locations
tgaaaagcattcgcatggcattcgcccgaaattgttagccagcaaataatatttgtacaaaaaatgacagtcaggcccaaattcgaagagaatggcacacaggaaatgaaattcgcaatgccaattggattcggatgcaaattccacaaaaagcgctgccaaagaaaatcgtcggattcgaagatatttcaataatgtgaagcgaatcattttttgttgttttctgtttgtaaaacgattccgtcccatttattttcacagtttagctatgaatttggggttaaaaatactctgatcatgaatcgaggctcttattatgcatgaaccttcattttgtctatgtcatcaagtgtcataaaaaaaataaatcatagccaagcggaatcgaaccccagacccccgtgcaagtggatggtgatcctgtccgtgttcttcactgcgcacaactttgccatgatgttgtacgggaccaaggagaagccgttgtggccctacacgctgttcatgaagaagagtgacggagcataaagaagctctctcgacgacacatattgtttttgtgtgtattaggtgtaaacaaaaattcatgttttatggacggaaaatgttagtttggatgtttatgttccatggataaagaaagctgcgctactgtttgttgaattaaagcgctttgaatttttttcaattaggtatagactttctaaaattttaaatcttaaattaataaaaaaaaatttcaaatcgaatttacttcaatcatttcaagcaatcaataatttgggctacatgagtaatcatgggtaatagtgctgatggtagccccccttcaaaaaaaaaattttattttttttaaattgtaaatttggtgtttcaactttttgttcgaaatctggtccggggttcggaaaaaatgtaaatcacgggggttccccccttgactaaattgcattgagcaacaataggttcttgagtgaattcatgaatatttttattcttaaaaaatgcctgcctaagtaataatattttctgttttagtttttccactaatgcgctaggaaaaatataattatttttttcacttaattagccttgcatttgtgcttaaacattcatatatttttggctttcccatggggtattctacatcacatttttcattgtagtatttcttgtgactgagcagggaatcactataaatgcattatgattgactctttactataaagctaaataaagaaaagtttatttttagaactcgtacaagttgtcatctgaaaatcgattttaattatttcatttatcgcataaaggtcgctatataattgactaaattgcattgagcaacaataggttcttgagtgaattcatgaatatttttattcttaaaaaatgcctgcctaagtaataatattttctgttttagtttttccactaatgcgctaggaaaaatataattaattttttcacttaattagccttgcatttgtgcttaaacattcatatatttttggctttcccatggggtattctacatcacatttttcattgtagtatttcttgtgactgagcagggaatcactataaatgcattatgattgactctttactataaagctaaataaagaaaagtttatttttagaactcgtacaagttgtcatctgaaaatcgattttaattatttcatttatcgcataaaggtcgctatataattgactaaattgcattgagcaacaataggttcttgagtgaattcatgaatatttttattcttaaaaaatgcctgccctttgtgaggaggaactgtactcgttgctgatgcaacatgacaaaacggcgcaccagcaaatggcggacgacggcgcatcattgccatggcaaacccatcattatcatcatcattattattcgccatcgtcgctgtcgaagaaagcggtgccaaactttgcaaatttgcacttncaaacattccttgaactgatcgccacactttatgagcgtgaaacggaccaaattgttcgatgctcgcgtgaaattacggacccaaatttgcgtaatttttggcatttttcaattatatacattt

SEQ ID NO: 16873 - DNA, 1717 bp, Heterodera glycines
  unsure (1)..(1717): unsure at all n locations
ttttcaaaattatattcattttttttctgcttttttcagggaaggattgtacgactttgtgttccgnaatcgggcatctcgcannccttcgcttaaaaatgcctatctgtcaatgctcacttcgctgtgccaaagtgccgaatcggcagacgctttctnntaattttttcaaataatttttgatttgattttttgttaataaattgtttttcatttatttccttttgtgcgcatttatgtcagtgatttgaatcattttcaatatttttgatcatttttctttaaaattttctcattattttttttcaacgagaaggcaaagcaaaagctacacaaaatgtgctccaaaccgacgaatgttttcctcttcaaacgccttgtcagccccgtccaaatttgctgccgttcaataaaaggcggcggtttggtccatccggtgaccggcaaaaatccgccaacgcttgaggaattcgacccgtaaagacacaattttaattgctatgattgaaagcgatttgttttttcagtttgaaccccggcgagtggcagttgggggtgagttttctcacttaacaattttcgagtgggggaatacaaaaagcacacgtattttacaaaaacaaagcctagcctaaagcttaggccgaagcctctgggccaaacctaagaaatttttacgagttgtcttttaatgagttgccatggcatcattttgcaaaaaaaaaaaaatttttccaccatttcaaaactattctaaacgacaaagccataattagtgaggaataattcatgtttcttgatgtttgagcccttaaaagtctttaacagtgttgtatactgtactgtgtcattaccacaaattttttctaccgtgtttttattttatcattttttctttctacaggcctatggtaaaattttgcctcgtctcccggagggcacgcgttgtggcggtttggtgatgggcaaatacggcctgtacaatccgaaggtgcgcgcgctgcaggaggaatgctatgtgagactgagaccaattttggcattttttgccatttcaattatttaaacacgatggatccaatcaataatccgatcaaatccattcatttggcagccaaaaatgatggccggcgtgccgacggagcgcgtcaaccgaaaccaggagatcaccttccaaatgtgcaagtggatggtgatcctgtccgtgttcttcactgcgcacaactttgccatgatgttgtacgggaccaaggagaagccgttgtggccctacacgctgttcatgaagaagagtgacggagcataaagaagctctctcgacgacacatattgtttttgtgtgtattaggtgtaaacaaaattttcatgttttatggacggaaaatgttagtttggatgtttatgttccatggataaagaaagctgggctaactgtttgttgaattaaagcgctttgaatttttttcaattaggtatagactttctaaaatttcaaatcttaaattaataaaaaaaaatttcaaatcgaatttacttcaatcatttcaagcaatcaataatttgggctacatgattaatcatgggtaatagtgctgatggtagccccccttcaaaaaaaaaattttattttttttaaattgtaaatttggtgtttcaactttttgttcgaaatctggtccggggttcggaaaaaatgtaaatcacgggggttcccccc

SEQ ID NO: 16874 - DNA, 3626 bp, Heterodera glycines
  unsure (1)..(3626): unsure at all n locations
cttttaaaaaaactataattaattaatagggctgggaatttaagtcactaagaatcttcaataagtcgactaaaaaagtcataaaaaatagccaaaaagtcacaaaaaaataatttaaattcagcctattaaaagatttagaaatttctatttccaaaaatttccggcagttttggggccggaattctgtggtttccgaaaatttttaaggcttcggaattagggttagacgggtccgagtattgggcaaaaatcgggttcgggtattgcccggtccagaaaagccgagtcggacccaagtttagatattttaaaattaattttttatattttaaagaaatcgctttttaggtttcaaacaaatttttttcacttttcataaggaattttaaaaaaatttcactaaataaaaaaacaagtaggtaaaaaatgaaaataagttcgaaaaaattccgaaattctgaatttttttaaatatttaataaaaatttcattaaaaaaccctcaaaaatagcgaaatatgtacaaaaaaatttttgtgaaatgaacgcgcctttcctcttttcgtcaaatttagcatgttttttggtgttttttcttaaatgattcccttaaaatttaacaataaaacttatatggatgaatagaggatatttttttcgataagaaatatttttattaaattttttagtgctaaatttaaaaagtttattaaaattttgtgcgcttgattttcaaacttagggtcacaaaacaccctaggcctacacttgatttttccttcagaaaacatcaagtccttgattttacgccttacggacatttgcggacggacatttgcggacaatttcgtgaaaaataaaaaaaatatcgtaacaaaatttaaaaaattttctgaaaatatggaatggagactgcaaaaataaataaaactttgtttttgggttttaaggcttaatatttaatttcactggtcaaaaagtgcaatgctggtcttttaagtgattaaagtagagttggtcccaagatcggggaagtgtgaatgtcgcctgttgcactcaaattcgggtgagagtgctgtttttatctttagaaaaaacccaaatatttatgaaaatttattttccaacgagggtttttccaccgacattttttaaatttctctagccatacagacaaatcttgtagggtatttgctacctgccccctgaattttcgtttccttatttgttcgggttggagaagaacccaagataattcttgctctactgttcataagcaggaaagcatttcagggccccaaaaatttttagaaaaggaaatcggaaatctaatgcccaaaaatgtcgggaaaacaggattaaatccttgccctttgttgttcggtcggctggggcttcaacaaagcctgggtttgtccaagaaaaacttgtccaggccgcgctcattctgctgttggatcgatcgagcttcgcgttgttacagcacataaccatttaatcgattcaacgcaacataccgtaattaaaatgataagggtgaattatttggaatcattaggtgcgtgatcgcaaggaacaaatcaagcagagagccgcaaatcatgcagatgctcccagaaatattaattttttaaaatgacgctcgttgggccttgagcaagccattggaaataaaaaatttatttttgtgtattaattgatgtattgaaaaagttaaatattatgatgaagagaataaaatatcttattcttaaattgataaaatctaatagtaatatttattcaaaattacataaaataaatttaaatgaaatgtagggcaaagccgcaaatgtcgggccgcaaatgtccgattttggcttgggccgcaaaattcagcaaaaaattgggccgcaagtgtccgaaaatggcccttaagaaatgggccgcaaatgtccgaaccgcaaatgtccgggccgcaaatgtccgatttggctggggccgcaaatgtccgagccgcaaatgtccgggccgcaaatgtccgggacgcaaaagtggggtaacccttcaaaaaatcaaaaagattggaattgaaggaaaaatttataattttttaactaactttttaaaaaatcggagttttaaggttaaaatcggcgatgaattgtcagaaagtttcaaaatattttcgggagtgccccagggaagtgtcttagggccattactctttttaatttttataaatgatctgccgtcttttatttcaaataaagcatcatcagttggcatataaatgtatgctgacgatgttaaattatattatgcccatgaaaacgatgaccattcaaatcagttggataaagcgattgaggctttggaaaaatggtcaaaaataaatgggttagaaatttcaactgaaaaatgttttgttctttatttagggaaaaataacaagaaaaaagaatattttattaactcaaaaaagatttcagaatcggaaagtgtacgtgacttgggaattataattgactcgaaacttaatttttcagaacatattagcaaaattatacgaaacgcatatcttagaattttccaaattttgagagtgttgaaaagcagggaaataaaaactctaacagcagcctataaaacttttgtacgacctcaattagaatacgctaccgaagtttggaacccaaatttaaaaaaagacattgacaaaattgaacgggttcaaaaattttcacaagaaaagcacttagaaaatgtggttttgtgtacaaaaaatatggggaaagactaaaaatcactgatttacacaaattagaagaaagaagaaaaatcaatgatttaacaacagcttttaaaataatcaaagggttcaccagcctcgacgctgggaaaagtttctttttctcagaaaggtccaggaggcctttacttttacgggtaaagcgccacacggccaaaactcaaaataattttttcaatagaatagtaaaaaactggaataatcttccactggtagcggtgcaaattaataaggcaaaggaattcagggatttactaaaagcaatgagttctgagtaggattttccatgttgccatatttacactatatttttatcacctgtgaatttttaacatttgattgatttatttttattcattttttattacggtattcactttgtattttttatttgaccaactttatttgttgttttctttttggcaccatataagagcactcacgtgcctttggtttgctcgataaattaaattaaattaaaaaaaacaattttcaagaattttggggtttttgtcaattgccaacaatttttttggcatgtgaattttttaaaaactatttttcaactatttttggcttgtcaataaaaattttgttatacacaccgagtcaaaaaacgagacatgtgtcaataaagagagagtgcagagaaactttttttctctaacttttctctccttttggcatactatctaatattttcattattaggaaaaacaacatttacttcgctatgtttagcttcttttctatatngtnagatcagaggtcgcatcgaanattttccngaataagtaaatcagtagtaaaaaataanggtttttagggtcaaa

SEQ ID NO: 16875 - DNA, 1369 bp, Heterodera glycines
  unsure (1)..(1369): unsure at all n locations
gattcactggtcggaattcaaatagtaaaggattttttcatcaactgtaaactttccaagcgattccaaaagtttctgatgagtttttaacacttgtagcaattcttttttgaccaaaaagttccaaataaaagccaattctgaatttttgatttcctcgacccattcttccttagaaacactaaatggcaatttcggaatttcgggtgttaaaacggcagaaatgtgtgcgcaattttcgtttcccttttcttccaaattaaggggttttgagttaacggctcgtgaaagtgcgtcagcaacgtgattttcttttccaggcttgtaaattacttctaattggaatggagcacctaattccatgatccatctgtccacttttgaatttccgaccgaatttttgcttttgaacatttggggaagggccttatggtcggtaaatacgattgttggaagccatgcaataaaatgcttaaatttttgtacggcaaattttatgcctaaacattctaaaactgttggtccgtaatttgactcggtttgtttacagcgtcttgatgcgtaacaaattggtctcattttcccagattgatcccgttgacaaagcactgcacctagcccatctttgacgcatccgaaaaaatatgaaatttaaattttggatcgttctgtgccaaattaaagtccggatatttcagtacaacttcatcaacaattaaagattttaaagattcaaaactcttttttgcttcgtccgaccaaattaacaccgtagcatcttgttttttcaacatttttgttaatggtgccgcaatttttgcaaaattcatgatacattttcggtgccaattgaccattcccaaaaatctttgtaattctttgattgtttttggcatcggaaattctttgatgggtttgtatttttccgggtcttttgcgagtccttctcgtgtaagaatatgtcctaaatatggggtttggtctaaagcaaaaccacatttttctgccttgactttcattccgttttcattcagttttccgaaaacctttctgagatggaccatatgatcttcaaatgtttcagaggcaattaaaatgtcatccagataaacgaaaacaaattcgttaatatattcgaacaaaattttgttcatgagtctttgaaatgtggctggggcgttacttagaccaaaaggaaggactaaaaattcatacagaccaccaggtactgtaaacgccgttttttcgatgtcttcttccttaactcgaacctgccaataccccggcattaatccaaaatagtaaaatagtgtttgtttcccaaatacatcaaaatttnggtccatgtcggtattgggtacgaatcttt

SEQ ID NO: 16876 - DNA, 2052 bp, Heterodera glycines
  unsure (1)..(2052): unsure at all n locations
ctccgctagaacaattggcatctaacgaactgttgatgagcggcaaattcggcgacccgactccgctggtagcccaattcgctgagccggtgccatgtgtggcgaacaacacttatttggtgacggcacgattcatggtgaagtgcaaacaatggatgtaaagaatggcacatattcattggcacaaattcagacggaggagggcgtttcaaccttccagggaaaggaggggcaagcggtggtggcggtggaattgccatttgaccaaacagtgcgattcaaagtacggcaaaaggctggaattcgttcaaggtgttccaatttgcgctttctttcagttccaagcgtggcgcaacggcctttggaacgacgacggcggccgatcggaaggacaaattccggcacttcattttctaatccaatggcccgaagaacagaacgaagcgagcgaaaacagcaaaaattaatgggttttgttttttgaattcgaattttgttaacgaaatatttttaaacatcgaattatttatttggcattaaattatttatgttatgaattttatttaactcacttttctataaaccaattgatgaagttgttgtgttcgttaattatttgaattaacgccaaaagatgctcgtttatcgatcatccttttgacccttcgtgttgtccatttaaaccccccttttcccccattccgtgcattctccctcattcattaattgtttccatttaattgtgacccgctccctcccttcgctatttattatatttatttgtgtggaataaatcaatattattccattgactgttgaacggacacaacagttattggcgcagtcagcgaaaaaaaagacgagcgaaacaaaagtggagaggaaagaagcaacaaatcagcaattggaattgctaattccgagttggaatagcaattgccaaatcgtcagagaataaagctaattcccagttggaatagctgcgcacncaggtggtggcaattctcatttactggtgttaatccgagttggataacagccagaggtcaatcgccgaatttgggaaaaatttcgacattcaattgttaatccgagacggataacaattgcgaatcactgttaattcgagtcgaataacagtgaccatccatcatcaatttcattgttaatccgattcggataacaattggcaatcacagttaatcccagttggataactgttgaccatcatctttaatttgatcctagttgtacaaattaataaagcgcaacaatggcagcagttgtaaaggctggcaaaggaccaggtccttacacatcggaaacgtcatggacaatttgggaagaaagattcgaattcttcatcaaacttcgaggcatcaccgattttgagaccaaaaaattgctcttcttttcggagattgggccaatctacgaagagcttcgccaaatggcgttgccagacgacgtacgtgacatgccaattgtggagatcaaagcgctgatggaggaacgatttggcgagacgaagacgattgcggcaaaaaggtttgagctgttttcagccaaacaatcatcaggactgtccattcgtgattactcaatccaacttcggacttaatttccaaagctgaatggcataaggattcggtcgacatgtgtctgagcgctcttttcatcaacggccttaaaaaagattcaattcgggccgagttgataaagatgggagtgaacgaaatgaagttcaaagatgccgttgaaacggcagtgcttctcgagcagtccgaattggacgcagagcaaatcggtgggcataagaaagccgaagtggctaaagtcttcgctccaaagggaggaagaaagagcagcgcaccgacgcaacagcaacaaatgcaatgccaccgatgtgggaggaatggccatcgcaacaatgagtgcccgaacaaggactcaaaatgccgaaagtgtggaaatgttggacactgggctgtgatgtgcaagacaaagcagggctccaattggccaaggaggcaagggaagccagtaaaccag

SEQ ID NO: 16877 - DNA, 1373 bp, Heterodera glycines
attaattgtatacggtgggaaaatgtcggaacggcaacccctttctttcttttctattttttttggactttgctgtcaacaaatgattgcttttctcaattttcgcacacttttaggccaaacaattggcaatgtttttgtgttagctgtgtccccccccccccactcaccttgaagcagaacggcccttccccccgtcgctgtccattggagcagtgcgacaactacgagcagaactttgtgaagtggtgacagatggcgaagtgccgttgatgctgctgccatgccttttggttttggcgttgactttaacattccgtccctccgtctccctcccttcttttgcttcttcggtccgtcgctttcgtttgtcggacccattttgttcttccttttctacagccctttttatctgttcaaagcttcttcaatctgatttcattgtgcgcaaagaagcggcagttggcgaaaagtgttcacggaaaagcgaccgatttggagggattaagcggcgaaaaaagccaaaaggggaggaatttgaatggaacgcgcagactctgcgacggcttctgcaaattgggagggaaagtttttgagggcattggcaaacggaaaagcgtaaagagagggagggataaacgcactattttaaaatttaggggatgaaaatggcaaatgttgagggggggggggggggttaatcggagtggtgagaggcattccgttatgtatggatgtatgacagccggagctcaatattttaatataagcctaaaaaaagattattattaaaatgcaatgcaaatttaaaaaattaaataaaaactcaaataaaacctttgaaaaggacatattctaattaaaaggcatttagaaaaaaaccatcaaactctttacaaaatgttcggtccgagggatttgtttaagtccaattaaatatttatttattggagaaggaaaagaaagtcacaataatttgggggaacaaaatataaatgcaaaaatgaatgaagggaagacactctgagaggggaaagggagcatatttatgggcgaggaaacaacatgaaataaggggaatcgattggattggcattatgtcacggacattcaaatcatcggcggcaatgccccgaacacctccccccttaagcgcggttccgaggttacggtgagaagcgctgcggcggacggcgatttcgctgagggtaccgtcgttgctgtccatggtcaatttgacctccaaaattttcctgttcgccatgcgggtactccaatggcatttccactgggatttccctctgatcctcaacagcaatcgggcttgggatgtcgaaggtttcgaccatcaccgagagctgatcatcggagtc

SEQ ID NO: 16878 - DNA, 1523 bp, Heterodera glycines
ggagggcacctcgtttcccccccgccgtttcccccccgccgattcccccccgccgtttcccccccgccgtttcccccccgcatcgtttcccccccgaatcgtttcccccccgccgtttcccccccgaatcgtttcccccccccgagaaaatttttaaaaaaaaatttctaagttagcaattttttttttaaaattttctcgggggggaaacgtagggggggacccaattgtcgtatggaaaatggagttaagggggaggggggaagacagaataatcacgcaaagggcgagagggcacggcgaaggaaaatgccatccgaacggggccaaagggaaggagtgccaccgttgaagagtcacaaattgaagggcaatgattgaattggcattctgtgaactccactttcaggctaagaaagagttagttttaatgcaatttatgcaaatatacaaaaataatagaggagaaaaacgagtgcaaaaagaggaggaaaagaagagattgaattgagtgatatgcaaaagcgaagacattgaaaatggtgatcaaaataagaaaattaacaaagaaacaaaaataaaacaggcaattatttgttggagagagaaaccgaatctgatgataggaaaggtgcaaaaataaatgtaaaaatgcaaaatattattataattagtgaatgaatgacatcggaagagagctgaacgactagaaaaacgaatggcaatttgtggtgagaaaagaaaggatgaaatggcaaacgaatggaacaatcactccaatttgggaaggatgagtgatttaagagatgccaatgattagtaatgagttcaaaatcagatgttaaagcattggttaagcattccccgcctccaaaaaggcacatttttcttcgttctcgcccatcaaatgcccgagtcgacagaagcagccctgttgagaaaggcccgggtgacggagcccggccgttcgttctcctgcagcatcgggtcgtggttgaccccatagattttgatggcttttcggcccatccgttgaagcaactcttgcgaaacgcgatgagcctgaaaagggcgtgccattgagcctccaaacgaatgcatttgattggttacagtgcgaagcgaagtgtgccattctttgagcgaaatttcgtcctgaaaatgttttttttggaaagagtgccgccaatttgcgtcctcgggggcacctgattggtaaggatcactttgctctccttcagcccctccttcagtttcaccacaattgccgtctcgcccttcacctgttgcaactccgaggaaacctcctcaatttggtccataaataacagctgaaagggcaaatgtaaagcaaaagcactgctccgttccttccctccacacgaacctccggttttccgctcaatgactcggggtacagctccaaccgactcggatacagcttgccatacttggtctgccacgcggaagtgaacggaccgcccaactttttaatgtaaccgtggatgatcacgcggattgat

SEQ ID NO: 16879 - DNA, 1278 bp, Heterodera glycines
aaaataagttaaaacgaaaagagaaaaggcaaagggacggacgaaatggccgaccttttcgggcgaagtgagaaaactgaacagggaaattgggggagtgtgccaatatttggcaatgttttcacctcagccggattgaattggagctggacacaatcttaaaatgtgaagaaatggcatcgctcacagcaaaaaaacaaacaaaccgccggaatcatcgcgacactttcgccacacaattgcaagtcggacccactgcttcggttgtccgtgcccaaatgaactcggaggacggcactgagagcgaattgaaatgccatgaaaagagatggaagggtggcaaagagaggtcacctcatgcagtcgacctgagcaggagggaaggggcttctcctcccatcccttttttactttttcttctgtcatttgtccctccacgttgaacatgttcgccttcagcagcacttggtgcccttctcgaactcgaatctccaaatcgcacgtcaaattctttgtgtatttgacgggaaagccgggcgatgctttaaattgttcgaattctttcaaaattcattcattctttgccaattccgaccaaaatgccccgtcgtccgctgttcgttcgcttcgattgtcgtcgccgatggttttccctctttacagtctttggtgtcagacacttctgaactttagtaattaatcaccccgctgattggcaaatagaaaattgccaatttcactttttgtggccgccgggcgaatttcgtaccgcgcgtcaaagccattggcagtgccgaaattgtcggaatggaaaacgacgcgcatttcgtgggagccatgggcggacactgtgggcccggggaagacgtgccaacaatgtttggctgagaaaaagaagagaaagcggcaaatgcaattggaaaggaatgaaattgactttctttgtttaccctgcaatttcaaagtctctccgccgttcgcatcgcgaaaaacatcgaatatttccaaccaatcgttgcactcgtccatggaattctcctcgaaaagcgcaaattgcttaattgaagggaaaggcggcggtaattggggacgaatttggctaaactttgaaaaagagaagaatttgggcattggatgggccaacgatgtgataagtgcactcggcatcaagcggatactgaaacggaagagcagacggaatgggaggcaaaacggatgacgaacgttggaaggatagcggggactgttgaaagagccgaccgagtcgcggaagcgaaa

SEQ ID NO: 16880 - DNA, 1735 bp, Heterodera glycines
  unsure (1)..(1735): unsure at all n locations
aaatgccaaagggagagacgggaaaagccactgatcaacctgatctgcacatttggtgccacagtctacaaagaaataagtcttacttattacacaatttggactaatcattaactaattacnccgcaatatcgcgcggccaaattcgaagacagcaaatcctccgtgggcgaatccaattccgaataaatgtcaacatattcggactcacaactgaacataaatgagcacaaaagaaaagcaattaatggcattcaaaggaatgggtactgtcggggtacggtacttactgattggtggtgccctcgagttggaactgctcaatttgcagcttcactcgttcccgcggttgggcgacaaacgtgtatatacactgaaaaagaacagttacgcaaaataacacaaaatttattgggaataaaaattaaaaacccctgcaaatgtgctaattgttttacaaatttgggatgattattaattaatgccctgggacaatcattttcagtcctagcagcgctctgttggcgttgtcgtccgctggcgctcacttggatgttttcgggcagtgattggtaccgcacaattccgttcgcctcgtcccttttgcccgcttcttccgcttcctctgccgctgctgtggcagtgacaaagggttgccacgagctgctcggcactctttcgtagttgccatttggggcttcatcattttcggcattttcgtcgtcagatgaagcgaaaagggcggaagagtcggcatttgcctcccggggaaacactggcagagagaagtgaccactgcggggcgaatcgaacacgtgatcgcaatcggtaaaagctgcaattggcatttggacggagaaaagatatggtgcatgagagagagagagagagagaaagagagagagagaaaagagagagagacgagagagagaaaaagagagagagagaaagagagagagagagagagacgagagagagaaaaagagagagatgagagagagaaagagagagagacgagagagagagagaaaagagagagagagagacgagagaaagagagagacgagagaaagagagagagagacgagagaaagagagagaggagaagaattagagaaacgagggcagggggggggaggacacaaagtggagaaagtgtttgaataattagcacatttgcagtttcgttttttgaaaatgattgccggcgcgggaaagggaattactcttcatattgaagaacgccgcgaagccaaaagatgagaatgaccagcagaatgccggcgacgatcagagtgaacagcaaagcgaatctgaaccattggcgcttttccgccctctgtcccgaggcgttcgcccacattatttcgcagtccaacgaccggcagaaggcgcagtcctcgtcccccgcggctgcctccccgcccctccccggcaccgccgttgtgttcgtccgcgtcagcttcccccgctcgctgtcctgttgctgttcgcactggttcatgccaacaattgcgttcgcttcgctctcaaataatgccaatgccttcgtccactctttgagtgtgccgtgccattcattctttactcacttccatttctgcttttccctccattattttgtgctgttgtgccattccgccgtttgcgctgtccaccgaatgttcagtcagcggtgagaggaatttgctggcggaagagggcgattggtaatcaatcaaggcgcgtcttttga

SEQ ID NO: 16881 - DNA, 2258 bp, Heterodera glycines
gattaaagggaccatcttcgaaaagtctttggcagcgcgcaccgccatatcctagcagatttttattttaaacatttttaatcatatattattagttaatggttttaattattttttaacaacaacaaatagatataactgatagctttagatgggggcgaaattctctgatattttttaaaaaccctttgacaacagagcaattttcccgaaatgaaaatatttattataattttcatgatataaattgggaaaaatacttattaataaaattaaacgagaataaaattgcccttcatttcccgcaaaaaatttattttttcgattcttaattacatatgcattaaaaaatatttttcatttattcatattataatttttcggtattgggtgtgaggtttattgattaatggaaggagtcccaaaatacaagccttttaattgtgaattcatcagatgtatgaattcgaatataggatagatttgaaaagaatttatttattaatttaatcgtgcattttcatagtcctttatttcccgcactaataaattttcgaagatcaaaagagaaccgaggggtttattccgatcgtttttcttaagttttttcaattcataattctatgtgttttaaaaattgttgcaattcacaaatcgataatttccgttgatatcgattaattgggggggggcataaaaaaatcggctgaacactcgcgcagtggtgctaagcgtacccgagaataccattaggctgaggtttttagtgaccgaggtctctttacaatttaatcgtttttcgagatttatgaattactctttttctctaattctcttctctctcgtatggtgaatgcgcatctctctgcacagggggggggccaagatttttaccctaatactacttacatgtttttttcctggattcttcatagcctaattagtaagaaaaacactttcttttttgtgtttgcgaacaaaagttgggacttttatttacatatttttacatatttcgggatttttctacatattacatatgtacatatttttatacatattttggacttgttcgtacatatttcgcaatttttcgtacatattttcatttttaaacatattttgaggatttttgagaatttatagaaattttttgtgaataattttttttaaatgtatccctaaaaaatcgaataaaagatatatcaaaaattaattttttaaatactaaaatgtgattctaagcttattttggtcatttttatggcattttgtgcctattttactttttacgaagaatttttttccaaaaaataaccattaaattttttttttacatattttcgtacatatttgaggatttttgtacatatttcatacagattttaacattttttatacatattttatttacataattcgcaaatattcttacataaaattagcagccctaaaaataagttatatttccaaagacgtcctggaaattgggccctctcacttgaaaatttgaaagtatccttgaattcaacatgtccttgaaaatgagcactccaagaaataatacagaaattttaatttttgaccttttataccaaatttttattaacttattgcattactggtgcaacatttggtactaaattgcacaaaaattcccaaattttttccaggcgcgcctatcggcaccaccgggatctctctttctattttttaaaatttaattcaaaaagacacccagaaatcgttaaaaaataataaattttagaaaaacaattaacaatttctcccccccccattcccaaaaagtctcggaaaaagcgcccgcaagaagtgttgtgaaaagtaaaaatgttcaacttttgaaaatcaaaatgttaaacttcctgttgattcacgattttttaatatttttattactagcttagtgccggaacgatcctggcgcaccctttccttttttcgtcagtaacgattcttctgatcgggactcccgcggggtttttacatgattcccggtccaaatatccatatttagtactattatgtcgttttttttgtttttaatattaaagtgttacaacaaaattcaaaaacaaaatttataaaagaaaagttcaaaatgcgttttgatcggacccaattatcatttatttcatgcttcagagagtggtcagatcgaatttgaaattgggcccaaagttggccacaatttcgtcacccagagtgacacaacgtgacgaatgggaacagtgaag

SEQ ID NO: 16882 - DNA, 1481 bp, Heterodera glycines
  unsure (1)..(1481): unsure at all n locations
gtcggttccggtttccccatttatcccctttccctatttatacccctttccctccctcatttatccatccccccgccccaatccctcgcccaattcctccgcctcattcattcgttcgtttgtccatttgaattgggttaattttcccttcgctttgcgcttctccccctctttttccctcaccaataaaatccgtcgtcccttctcaacaaatcgctcaaatacatcataatattcttttgaagatcgtctcaaattgttttccgtgcgcaattttctcatttattataaattattgcaatttaatttattttaaatttaaaattatttgttgaggtgagattggtcaatttccattcttattttcatttgatatgtaacgtcccccgccccgtgggtattttaaattattatatgcctattatggcattagtcaattatgggcaattagcgtcttcacagggcaggaacatttaaataaaataatgtgaaaatgaatttaaattgaaaaaattaaataataatttatttattttaagaatatttaaaagaacatttctatagaaaaattatttaattgaattactaataacgagaaatgttacaaaacctcctccaatttttattttattaaaccgaacaagcgcaatcgcaaaattttttgatcattgcttgtaaaaagaaaaaatgctgacgaattgccactgacggattgtccttgatgtccactgacggattgtccagtccattactgacggattgtccttgatgccactgacggattgtccagtccattactgacggattgtccttgattgtccactgatggattgtccgcaccccgctcgtgcccctccattttctaacaaatttgccccgccgttacagtcgcttgcgtcggcattttttttttgcgtgcctcccgcaaaatttaatttgttcctaattgggccaaatgttccattaattatttgtgttttttcatgtttttcaaccgtttattcattctgtccaaacatgcgttctccgcccctccgtttgctgttctgtcacggattgggcgctgccaaaacggacgcccaattaatgggccaatgggcgcggcaaaggcaaatcgaattccaaatgttggatcatcattaacactaattagcaattttaattatatattattcttttagaatccaatacaaaaattacggcaacccgaacagtgtttgggcggtgaatcattgnggtaaaacaaaattatttaatcatttttatttaatttaatatttaatcattnttatttaatttaatatttaatcattnttatttaatttaacttaatttcatcacttttatgggtcgtattgtattttatcagcaattttatttattttttggnntgtaaattatttttcgtttttgctaattaatacaggtctgataaagccctttttgatcattcctttctttgatcttggggctgatcattt

SEQ ID NO: 16883 - DNA, 1011 bp, Heterodera glycines
taatttgtttgactttgacaaaagttatgggcagtttttggttgaaatttccatttgatggtttttatataacgacagcaccaatcagattggccacctttttcagtgcgcgacattggcgtcgaattggcacgcgaccaaaacgcggcgggggcagcgaatgcatcgcgcggcaccgtcgccgcctgcgcttcggctggcgcccaggcgctgcttcgcgcactttggcattcgccactattggcacagcatttggccggtgattttggcactaataatagctttaaaaaaccgaattttccaataattctcgaggcctgctgctgttgtcgcccggcgtttgcatgaaagtgccaaattacgtacagcgcgttttgcctgaccaatgggacgcgttgaggtgggcaaaacgaacggccaaaagtcaaaactaaattgtatttttgaatgaattcaattaaatttgtacctgttttaaaatggggtaagtgccatttgcgagcataatacgtcgaggtggtcgagagtcgatctcgacccggtaaaagtttcggcattttcatggtctcgaggctcggagtcaagtgattccgtttttgagcatcgttaatgggaccattttggcagaccagagcagttaggggttgttcaatcacaaataattggcaaaaattatgccacaatcgctgatcatttctgtccatgttgtcggctgatcagtactgaaccgtctcccctccctcctaagggccggccttcccgtggaccatccgagcgccgaccgaacagtccaacttcggataaacatggacagtctgaaggactacgaaagggtgcgccggggattggcatagatttttcgacccgccaaaatttggagattttccgcttttcttgagtgtgccggtcgcaaaagtcgcgactcgaaataaatctcgagtttttgggctcctctgtctcgtaccgggcctcaaagtcatgtgccaagagctcgagcttggactcagctct

SEQ ID NO: 16884 - DNA, 3005 bp, Heterodera glycines
  unsure (1)..(3005): unsure at all n locations
gcccgancacgtgagcaaagcaaacagcgcaccttactcgttttgaggtgccttgacggacgctcataaggcttttcgcagtcgaggcagtagtgttgaccaaacaatccatgcaatttctgcactccatcaaaatgctggttgttcaaatagagcacaatgggtgtgtcgtaatggtcgttgatgtatttgtacaatggcttgtattgtcccgatgagccaaagatgaacactgcaaaccgatgctgctgttgttgactgttgttccaatgatcgaccacacgcggcacacaaatctcagcatcataggtgttccgaccggtccgtacaccaatttgctgcatcagttgtaaaacatcccgccgcagacatccctgttgaccatgcaggctgtgcacatagcgatggaacttccaatgaggccaacccctagttttggccaccattgtcgcctgcaaggcgtagaagaggcaatgcccatccggattgcaaatcttaacaaaattgtcactaaaattatacttgcgttgtgatgttggaccttaatcaaacaagtttccgtcaccctatgatgcacaggtgctaggcttcgtcgagcaccgcccttcagcacccttcggccgggcagtccagaacggtcaactgtggtcaccaccacagtgaatggctcgccccacagtgtgacgttttgctgctgcttgctctgtgccactttggtgaactgattgaggatggtgttgacggtgttgtctgtgatttgtcgaacggggatgggaatgtccccgccggtgagcaacggactgctgatcatgcagccgagatgcgtgggttcaattccacgtccacgactctcctccatcgctgcgtcaaggcagtactggaagatgccggccaggagtccctcaggatttgctgctggcacatcctcaatgctgaatcgcgacttaattttgctgtattggaagcggggcacatgctcaacggtgctgtccaactttttcacatagtcctttgcagactttgatgatgatgaactgccgccgccgccctcttgaagcacctctccaagcaattcattgatgagaaagccgcgacgcggctttttgcttggggccgatagaatttggtcaatggaaaacaaagagggatgcttgggaggctgattttgcattatctaattttacagggaaaaataatgaattgaatggataaaatgaacaatcttgacacatatttttgaggcatggaaattgtcgttgtgaatgcaaattaatggataataataataataatttaaagattttttaaaccaactatgccctgaagagcagcgcactgccacccattaagcacaagacgacagggcacctaaacggctcgggtaattagtaaaggtcacgcgtacaatcccaagccctaaaagacacacaatgctgccagaataaacggagcccaataattgggcaaccgctctggttaacagcagaaaataaaaattttattataatttaattatttttacaaattttattattattaaagtgagtaaaaagacatgagcagatatgaatgaaatgtgatttggactgagtatttatgaagcctagggtcggggtgtccccatccgaataccaattaattttctcgaactctccttccttattgtcggcaaattcaaatttcctttgaagttatctccttcactattgtcggcaaattcaaatgtcttttgaagtcaatattaactattgaataattaatgagcccatgaggaccgacacaaaaatattttaattcactcttcattcattcattcaaatttcatgaccaatatgatgcccaagcgattaccagccgagcttctcttcgaaattatctactcactgcccataatgtgcttatttggcggggtaacacccaagccaggtgggaaaaaaaaaattcaaatttcaaatttttcgcaaaatttaaggccgtccaccatccggtatcgcagtggtcaattggattatcgagatatttcgggcgaagcgtcacccaaacttcacccaaattgtaataataatttaatttaattttgtatattttgttaatttgtaaactcagaaacggcttgctctcgactttgacatgatcagtgcaaaaggatggatgtcagacggacagctctacctgcatttcagtttcaacaacaatgagctgtgtgacccgggctttttcaatgagttcgcccgatatgtttgcttcggcaaatctgggcgcattttctgctcccgaattttggtcaactcgcacaattcgctcgtaaaatttttgaactgtttttgtttttcaatttatggtaaaaaaaaatgttaaggaaaatggtgcactttgcaatgtggtgctcaagcacatcacaaaaagtgcaaacccgttctcaatgaaaaagtgcacatccatcgatcttgtgcaccgcgacaattttccggcaattttgaaggcaacaccgagcgaaatggtagcatgcgggattgagccaactgagcctttgtcggccaatgatgatgatgatcaggcatacattttaaagaacccgcattttgatgatgaaattggctatcttgatgtttatgctcaatcatcgggcttttattttttctttttttcaactatttaatttatttatttaaaattttatggagtacaaccgtaacatataaatctgggtttgaacaagactcaagtcggttgagaaattgattaaatgtgtctccgagggacaaatggtaaataaaaacaatgcagtgggcggcacaagtggagacaagtggggactggtatgggtgtgaattcttcgttaatcccttggggaattggcacaaaaatgatgatgtgatgagggaggggggaggtgggtttgaacaaaactgtcatagtagaacactggcgtatccattcccttagcatanatggcgcaccaatgagagccnctccttggtgggtgggcgtcccctgttcacgac

SEQ ID NO: 16885 - DNA, 1927 bp, Heterodera glycines
  unsure (1)..(1927): unsure at all n locations
gaaaatgatgcaacgtgtctcatctatatctcggaaaaaatcattataactggtgtcaattcaatggataattnacacaatttatttcaatatctctcaagtgtgattcccaaattttttcgttgagattataattttttattcattgataataaattttcaaaaccatccagaataacccggtcgagttgggtcagggtcaatcaatgttctctttcttcgttcagccgtaggttgtattggtggatgtgatacatcctccacatatccaaatggtcgtgtttgcattcccggtcgaacacggcccttggcgtagaaaggtctgtagtctttgtgggcctcgcaggtgtatacgtcagaacggacatttcggtcaatttgcgggaaagttactcggatgcaacgatgggctccacctcctccgtacacgtagagatcatcgttgtcgatgacatcatcactaaaatttaaaattattagttgtgaaaaataaaaaaaactgacataggtccgtcaatgttatatgtagccagtgtcagatccttcattgcttcaaaattcagtaattgttgagtggcgtacgataatctgaagcttcgtatttttaggttggcccgctcatcagttccgtctcgtgctgtgtgccgaattccataattttttggaccaccagctacaaattccacaattcgacgatcaacatgctcacgcttcatttgtccaagtgcctcgccttccggaacacaccgcccacccatcttgttcacgtagtagattgagtcagtgtctaaaattatctaacattttttttttctattgtattcgcaaaccacaataaagaagctcagccccttccagtgcaatcactttttccatgtatgaatagagatgaagtctcgcgtacgatgtgacgtatattgcgactggaagacagtttgtgaggggtgcctttgcaaactcgggacgcttcctgacaacaactcggtccatatgctcggagacgtggacaaagtccagtttgtctaatgttggatcgtccaagagttgatggaattccgctggagtgcgcgtgtactttatctgcgtgaaacccacgcgctgtgccatttttcccctaaacatttttttttgttcaaatagaagtttaaaaaacgtataccacagagaatttgccaatgttttggcaatgaggcggagccctgggttgggtgtcattttcgttgagtctagttggatgccttccgtgcgcatgaaattatccacgaattctttacgttgttcatctgtctcacacccttccggccacccagtcgcttggactttgagaccaacgaatgtattgacatatttgctgaacaagtcgtcgtcccactcgtcatagttccaaaccttttttttatatattttttttcgttatttttaatgtacctcaaagagatcaacgacaatatagccgagttgaagtgccttgttcaattccatgtgcgtgtatgcgcacacccaagaacgcttttcgtcaccatgttgacatggacgttgctggcgtctgtccgcacaccaagcacagagtggaaaggtgaaacgtccatctttggtgcgatagcccagcaacgggacacgaattaggcgcggtgcgagcactcgtacaagtaaaagtccccggaacatgttatttgacgaacatgtccagggaagtggggccgtgggtggatgaagcaatacctcacgcgtgagaacacgtggattccccactgggaaaggattcaccttctaaattcaaatttaaattcaaatttattgagaaaaagcaccatgacgtagggatataggctaactatatcaatgcacaatatctcttcatcgtctgagcacacatgatgaagtttgaagggctccgtacgaccaccacggagtgcatcgtttcgtg

SEQ ID NO: 16886 - DNA, 2197 bp, Heterodera glycines
  unsure (1)..(2197): unsure at all n locations
aaattttttttggaaaaacagcgccacaaaaaaagcgacttaaaaacaaaaaatttaaaaaacaagttttggtcattttttgaataaaatctgttaacaaatccgaagacaattttcaaaattttttcggcggcgcctaccggcaccgcccgaccccccaactgtccccgaagttttaaaaaacgcaccgcaaaaaaaaggtggaaaaaatggacaaataataaagtttgtttctaaaataaatatatttcatgaaaatattttttaattttcatgaaaaaattttaaagatttttgtttggatttttcatgacttggactcggtttaaaaactaggactctgacccggctttctgtacccggcaataccctgacccggtatttgcccaaatacccaggcccgtacccctaatttaatatacgattttgaagttttttaaattaaaaataaggctacagaaaaaattgaaaaactctcgcctctcgtcctctcgcctctcgccaactctcgtgtttttggggactctcgcctctcgccaaactctcgctctcgtctttttggggactctcgcctctcgccaaactctcgctctcgtctttttggggactctcgcctctcgccaaactctcgctctcgtcttttctgagacaagtcacacccctgatgtgcacgacagtatgatatggtactttgggtataatttcctttaagcagcacaagcttaacttcggaacatttagtacatactctctgaatgagctgagaaataatatatattatttcaaggtcatgaaaatttcaagaatttttatatgggcacgagtgtatgatatggtactttgggtataatttcctctaagcagcactagcttaacttcggaacttttagtacatactctctgaatgagctgagaaataatatatattttttcaaggtcatgaaaaattcaagaaggggtgggacaactctcgcctctcgtctctcgcctctcgccaactctcgccatttttggtactctcgcctctcgtctctcgcctctcgttttttgggacgagaggcgagagttgaaaatacacccctaaagattgaacttttgagcagccagaaaaattttcaaatttacgcgaaaaaaaaatcttaaatctctttctttccttccttaatgttttctctatttttggatagctccaattcaaatatggtctgctggctaaaccttctgcctttcattatttttctcttgggttcaattccccaacggtacagaatttttttaataatttctttaaattattttcaattgaaattttaattaataaaaaatatttcaatttaaaaattattattttttctttttttaaacagcctaaaactgcaaatttaaccaaaactttgatcattttttgacaagttctgttaatatattacactcaaaattttagaatttttccggcggcgcctatcggcggtgcagattcggcaccgccggaccccgcacccaatgttccaaaaaatttttttttggaaaaacagcgccacaaaaaaagcgacttaaaaacaaaaaatttaaaaaacaagttttggtcattttttgaataaaatctgttaacaaatccgaagacaattttcaaaattttttcggcggcgcctaccggcaccgcccgaccccaactgtccccgaagttttaaaaaacgcaccgcaaaaaaaaggtggaaaaaatggacaaataataaagtttgtttctaaaataaatatatttcatgaaaatattttttaattttcatgaaaaaattttaaagatttttgtttggatttttcatgacttggactcggtttaaaaactaggactctgacccggctttctgtacccggcaataccctgacccggtatttgcccaaatacccaggcccgtacccctaatttaatatacgattttgaagttttttaaattaaaaataaggctacagaaaaaattgaaaaactctcgcctctcgtcctctcgcctctcgccaactctcgtgtttttggggactctcgcctctcgccaaactctcgctctcgtctttttggggactctcgcctctcgccaaactctcgctctcgtcttttctgagacaagtcacacccctgatatttatatacataatcatatgnagnttggcggttttaagaaacgcccacctggcggtttta

SEQ ID NO: 16887 - DNA, 1337 bp, Heterodera glycines
acaaaaagcgtaatcgatcctttctccatttcattttctttccattttcaaattcactctcgacaggacggacaatctcaagagtctctccgtcaaagatattatggtccaccaaatagtatcacttagtcatccctgttcaaagaatagcaccggtttctaaaggacgatgagtccccgcattgtgaatcagtaaattcccgacccatcttttgtttgtaccactctcgagacacgaaagtgtaagcgatccctcacatctttccccattaactcactctcgactgcaaaattcccgagagagtctcgacaaagagactgatcctcccgatttcattgggctgcttacaccggggcttttctattttagctccattaaatccttttttgctttgctaacttataaatttttttcttgttttgatcactgtcaatacatctttcgagaatcactctccgccaattttcgagagtctgatcaataatcaatgtattaattgccttaaaccattaattttttatttttcgctataataaaattcctttctgcctatgcttcatcctccattaatctgtttgctccgttttgccctttttttctcttcgctttcaccgatcgatgctttctcttcccttccgttctttcgttcgttcgttccctctccaaaaagcacaagcggatgattgtattatgtaagcgatccccgtccaccggtcggtctcgaggcatctccgttttgtcttgagaaattaacagttgggggacggatcccccccccccccccccaaatgccaccgctgtctctagaggatgactctctcgcgactcactctcgactgaatgaatcgagaatttccaagggatgtatttccggaattaatcgccaagtgattaacaaaaaataatcgactattgtaaaagagcacataaatccacatttccctttcatcttgctgagttcttctccaaaattagacatcggaaaattggaaaaaaaatgtcttaagataaaaaaataatataatatatatattttttggcacttttctcaggaaattgattgctacaaaaaactagtcattttaataggccacacattttgatcataattttgaaatttttttttcgaatattcatctctcgaaaaaggccaaaggtttgccctggcatttgtaaattatgaatttttcggtaatggtgagggtcaactgggccttgggccaggttttggggtataactccgtccataattgaccgacaaaaattttcaggcaaaatttaacatagggcactcgaatgatatcaaattcatttattcggacatcattcatttggt

SEQ ID NO: 16888 - DNA, 3269 bp, Heterodera glycines
  unsure (1)..(3269): unsure at all n locations
gtgtgcatttaagcgactcgctgtgcttgcccactgcatatcaaatagctggtaatttttatttctccggcctaatccagaaaaaatcactatctctttttttggaatattttacgtctcaaagggtgtgcatttaagcgactcgctgtgcttgcccactgcatttcaaatagctggtaatttttatttctccggcctaatccagaaaaaatcactatctctttttttggaatattttacgtgtcaaagggtgtgcatttaagcgactcgctgtgcttgcccactgcatttcaaatagctggtaatttttatttgtccggcctaatccagaaaaaatcactatctctttttttttggaatattttacgtgtcaaagggtgtgcatttaagcgactcgctgtgcttgcccactgcatttcaaatagctggtaatttttatttctccggcctaatccagaaaaaatcactatctctttttttggaatattttacgtgtcaaagggtgtgcatttaagcgactcgctgtgcttgcccactgcatttcaaatagctggtaatttttatttctccggcctaatccagaaaaaatcactatctctttttttggaatattttacgtgtcaaagggtgtgcatttaagcgactcgctgtgcttgcccactgcatttcaaatagctggtaatttttatttctccggcctaatccagaaaaaatcactatctcttttttttttggaatattttacgtgtcaaagggagtgcatttatccccccccccccccccaaatgccaccgctgtctctagaggatgactctctcgcgactcactctcgactgaatgaatcgagaatttccaagggatgtatttccggaattaatcgccaagtgattaacaaaaaataatcgactattgtaaaagagcacataaatccacatttccctttcatcttgctgagttcttctccaaaattagacatcggaaaattggaaaaaaaatgtcttaagataaaaaaataatataatatatatattttttggcacttttctcaggaaattgattgctacaaaaaactagtcattttaataagccacacattttgatcataattttgaaattttttttccaatattcaactctcgaaaaaggccaaaggtttgccctggcatttgtaaattatgaatttttcggtaatggtgagggtcaactgggccttgggccaggttttttggtataactaactccgtccataattgaccgacaaaaaattttcaggcaaaatttaaacatagggcactcgaatgatatcaaattcatttaattcggacatcaatcatttggttggggctcagtcgttgccggtccgtgtggcaattcaaaccctttttcaaaaatgctttactaaaaatccaaaaaacatggttaaataaagaaatagtcgcttactgattttattttacccataattatttatcttattttgcgagttttcaaataagcttttttgtttgttagaatattgttgtattgttgtcctgaaaaaaaagattttattataatattttggctgaccaattcaaagtcccaaaatttgtgaaaacaatggtggaaaaatgacactaaagtttaattaatattgtttttttgttaattgatttttgagataaaaactttgcataatttattcccaccacaatgtttttttaaatttaactgacgatttttacagcaaaattagtacgattggactctcctctctattaaaatattaataacattcattaatttaattggattaggcaaaggccaactgatcattcatttgttaatcgcgtgaccacgtgcatttaaaatgataataataaaaaaataattacttttccatttgaaccacccaaaaacattccttatcactggtataattcaccaaattcgtccttcaaaatcaaaattttacattgtatcgtcatatcatgtcatcttcgttgaattggtatatccccccatatatcaaccagaacttttttttattttcatatacatatatttccagggtccggatttatacattttttatttttcacaaaatttgaaaatggatttttctattcatttcgtagttgtaagaatgacttgaatattgcaggaaaataccttgatatgaggactttctatatgtaaaatttaaaaaatttgttaatatacaaattaaaaaatatatttataaaacttgataaatcaaattcagacactgccttgaagagttttatctaacgaaacgaacagaaaaatcgcatttcaaatttggtataaaataaaacgaatccggaccctgttaatttacatttttatttttcctggcgcaatttaattaaaaattagtttattttttcttttaataaaatccattaactcctgctaaaagcaaatgcaaataaatatccgagttttgatccatcaattactttaatagtaataatctcttttgactggttctatttttcagttgcgtctccccccccccttattttatttttccattgtttcgctttatttcgtcactcttttgtccattttattgcatttatctttaaaaatatgaatattttatttcattttcaattcaatttaattttttaattaattaattaatttccttttaaaattgttaagcaaatgttattgaggctgttgtgactgttttttgttaacaaaagtgcaatttactacacactttagccacatttatttcttgttatgatggccatggaagctcagcaacaattagcaattaatggtgccattttgggaatgccgaaaaatgaagcgagttttaaaaataatattgtaaattaaattcaaattgaaatattgtcaaaccaaccaaactttttagcataaaaagtaatttttttaggcaataaatttaggtattaaatagtttttgctttaaaaattcaattcaaaatttcccgacagcgcctaatgcaattttttggtccttacttaaaaaagggtgacctttttctccctttcctgtcgttttaatcgattgtgcctaattaccttaattaactataatcaccaaaaataagtgttgcaattgcaatatanattgaacaagcattgttcactttcagattgngcatcatcatttgtcacttgaaaatgggttcggccatcacacgacaaatggcgaccaaaaacgtgctgatctgtgcattttgttgtacaatttggaccactccccaaatttcccaaaaatgattttt

SEQ ID NO: 16889 - DNA, 3157 bp, Heterodera glycines
ttgcatttttgttacaaattttccaaaaaatgtcgaaatagcgaaaaatagtgacaaaacgccaaaaaagtgaattttcactattttaagtgacgaaacgccaaaatagtgatttctagtgacgaaaaatgacgtccaaaggaaaaaattttaatgcagaaatgcgttttttgagctcctttcttcaaatcaatcgagcaaaaaaaaaagttttttcactagaaatcgcggccctatttatgtttatgttgtaattaattcattaattgtgagtaatcgttgataaaattgctgatgataaaatggagttgatttaactgtgccaacacaataaatgccatggcacaacaattttagccaaaattttgaaaaaatcaagtacttgacgaaaaaacatagacaaatgcaatgattttcaaaattcgagctcgtattctttatcagtacccgggaccgggaccttttcgggttgaaaacccgggaccttttcgggttgaaaacccgggaccttttcgggttgaaaacccgggaccgggaccttttcgggttgaaaacccgggaccttttcgggttgaaaacccgggaccttttcgggttgaaaacccgggaccgggactttttcgggttgaaaacccgggaccttttcgggttgaaaacccgggaccttttcgggtttgaaaacccgggaccgggaccttttcgggttgaaaacccgggaaaaaaccaggactagtcccggtcaaaaccgggaccttggtactcagttgtactcagttgtccgctaccaggtcccggtcccgtggcactctatttttgaccatagaaaaagtgattttgtaagaaattttttaaatttattttttcgggcggaacaccaattccgaaggattaccaacaaaaagatacaaaaacattcatcaatcccttttaatggctataaaaatgtttgttttttcgattgcctcgcatttgaaaaaagtaaattttctaacgcaataattctgcaattattcttccctttgtgacgacatcattcggaactcggccaaattgtgctaattgcgaaaaaatgaacagacggtaagcaatttgaaaagtcacacaaattcatcatttatttagctaaactgttttcccacttcagttggatttgcaacgacgtgtggatggatattttgccctgttttgaccgtcctcaactcggcctcaaattggcacttctttcgccacgtttcaatgcgttggtggacaaacatttcgatggcaaaagcgaattgacaatttggagaccaatcaaaattcatcgcaaggacaacggacctgaaccgaacctatctgtgcggatggatgacaaatttgtggaatttccattgcccgaccgtccgttgcccagcaaaatccgttttaattaccttcggattgagtacttaaaaaacagttttatggcaataaaagcattcattccatttttaggtacatcgatcactccgtcatcgcttttcttcgttccaatcatcaaattttcgacaaaagaggcaccaatttatatttgtcgattccatcatcacacaccacggatggccagcggatttgggacatttttgttcgtgaaatttggcccattttttcgacaaacattcgctgtttgggctttaccaatggtgatcatttggacaatttgcgtcgtctcatttcaccgacaattctcgctgatctcaaccaattgaattcaatctattcatttggtctgtcgcccgctgcgtttggtgatggttttgatgggccaatttctgctggccaagcattgtccaaatggttgcactctccgagaaaagatggccaacccaagcgattgcgttgcgcagttttctacagacaaacggacttcgattggattaacaatttcaaggaggtgtggtccgggggggggggacaaaacgtaaaaagttataaattaaaaatttttgaaaaattccgaattttatcaaaaatttcggaaatcggaattcagtgccatccctggtgtggtcataatttcgacaaatcactgattgttgttttccaatcaaattgtttagcattttcttcgtgccaatgccatttcttccgtcacttacgaaattcatttttatgtgcaagtgtcgtcaatgcaaatggtgccatttgaattgcttaacgaatggacaaaggaaaagctgacattggccaaagcaaatgaaaatgaattggacaaccgatggataatgaaacgatgcaaaattattggggagacagcggcggtcaattgggaagacggaaattgggacaacaattgtaacaatgtgttcttttggctttttgctgacactaattgcattgggtgagcaattaaaaaaaaggatttgatttttatccaaatttgagatttgcgcttaatttaggccattgtctccgccaccggaagaagttgaagaagacgaagcgggacaaagcatcacaaatggaccgtcttctgctgacaaatgagtgacggacaaaccaacaaaaacagtgattggccgcagaagaaatgaattaattaagaatgaccgaccgatcataattcatcagtgatcaaaatgtattttatgaacaaaaacctcaatttcggtaaataaatcggatgtataaaaacggccgtatgtacttgtcacaataagccagcaacttaataagtccgattttggcaaagatgaaaattgggacaacaattgtaacaatgtgcccatttggctttttgctggcactgattgcattgggtgagaaattaaaaaaaggcatttaattttgtttaaataaaaaaaatgtacgaaaacttaacaacttagatttgcacaaaataatgaacaacaaaaaaaaacaacttgttttttgtgcgtttcattgcactgggagctcaggaaaaaaatagggcaaaaacctaaaaatataagccctattttcaatacgattgtttgaaatttgccgaaatttcctgagaaattcaatgattttttaaaaaaatcattgaatgggatttgcggaacaggctatatgctccggctataaattttacaaagagtttaacaacccacgcataacacaaaaattttggcgctagttacaagaaggacctttttgacaatgtaatcactttttt

SEQ ID NO: 16890 - DNA, 1652 bp, Heterodera glycines
ccggccccccaacagaaccacttttcatcttattgttgtagtataacattcgttgaatttgcagtttaggaaactcaataaatgccaaaaacaatgacgaagacggattatggcataaatcgaggttgacaaatgagcacaaggaacgatttgggacccaaagaagcctgatttaacttatgtgttgtcgctatatccgaatgtcttgaaccaaactagagccgagcgggacagggaatttttccaaaaacctggacttaccgggaccagcaaagccggggccgggaccaagttagggattccaaatatcgacttaaagtatgaggttaaaaaatataattattcaaaccgggaattcccgactcggtctagctcagctctagacttaacaatgaatgcataagtaaataagctttccgtgttatttggttaacatgatcataagtaattttgctatcgatatttattcctaaatccctaattgtatccacagaattattgtttttccatcaaatttgaatccaaataaagtacaagttttttgatttaaacttttattttgtcatttatttgccctttcaaataatttatacaatgttttattcataatttcgttttcggctcttgctttatagcattggattttgcggtaagctcacgctgatttttggatggacggtgatttctaaggctgaaccttcacgggctttcagccgccgacaaaaagaaattttatctgaaaagttcagtaaaataggacaaaaaactacagtgaagtaagatattcttggttaataaggacagaccagaccattatttccaaccaactttggctgtttgagaccaaaaattttcccgaggcttgagaccacagtagtataaagccaaaaatcttgcgggtgcttgaaagtccgtgactattgggaaagcagcgaaaattttataaattggaaaaaatgaaacagaatttcgtataatttcaatgaaaaattctattttttgaattaaaatattttaggcaaaaatagaacaaatataaatgacattccattacaatttcaaatttttaaataaaattgataaaaaattataagttgtgcgaatttattatataaaacttaaaaatttactcaattccaccttgaaagaacgtcagaaaaaataatcagtagacccgtatcagaattgtacggataagggatatgggcttgacatcgaaacggggtagggatttacgggctaaaaatcagtaaaacccttaactcgcaaaaccagtatcggccgaaaaaaatacggataacggtcactaaatttatattaaaaaattatttattataaatttaaagatttagataaagaaagatgttttattctgcttctgtattccttaatagatcctatccatttatttttatcaaatgcaattccattggtgatttataaattgggtaattaataaaaacctatttttattaaggcgaaaattaaatgctaattgcacattgagaagccgatcagaaaattgaaatagtgaatactcaacgaaaaaatttgaggcacaccttggcattaagctttcgaatgataccaacaatgttggatttggattacaaaaaaaaaagttatagaaagttataatggaaaaacacgct

SEQ ID NO: 16891 - DNA, 2312 bp, Heterodera glycines
tttcgcttttcgctttttatttttcaatttaggcccatccctggtgccgacggcaccgccggacctcaagaaatccttattctcttaaaaagtgaccaaagttgcaaattttaacatttttggaccaaaatccgtaataaaatgcactcaaattttcgaaattttttacaggcgttgcctatcggcatcgcaggagaaatagatatcttattattattaataatttgtctgtttgcacaatgaaaacagaaagaagcatcctagaattaaaaaatatgtcaataatagaaaataaaatatatgcatattatcaattaattataaaaatagaggtaaatagaaaatttacattgaataagtaaacctttttaattaaattaaaaaataaaatttatcataagttttgttgttatatttaaaattaaataattaagataaaaataaatataatgattatatttcgttttataacataataaataaattacagactataaaccacaccaaaaatttaaaatgtttttaaaattaaatatctattcgggttttgattacatatcaaattattaccgtattggatgagctgaacaattaatgaccaagcaaagaaagacggtcaatagagaaatggagttcattggataattaattaattattagaatttaatattaatactatttaatttatttactattaaaaatgattttatttattttatgaataaaatttttagttcccaaatgatcaaatgaaatgaatgaaagtggtgaggtacaccactttttcattggacattttggcgtaaaatgtgaaagaatgcataattaactatttattatagaattaataattttacaaatttgtgagtaaaaaatgataaaattgaataaagccgagctgatggaggtaattgagcactgttgtctgatggaccccgaactctgctgcaagttggcgctaactagaacacggatgctgctgaacgtgctgctccaagtcatccgaatcgagagcaggtggacgtccggagcggggttcatcttcgagctgctcattgccttcacgaaattttgtgaaccatcgcttaactgtagaaagagagagtgcatcattgccctcactttcacaaatatttcgaagagcttgggttggggtataattttttcggaattcgtaaagtaacagttgtcttagccgaattttgtccgttttttgaaaatcgttcgattttgcaaaagtaatggctatacaacaaatgcaaatggccagaagatggccaaccgtccgctgattcatcccaattgcctgcctccctttttcaatctctttagaattaaatatcattttttgcataatttgttttttcagagggtcagaactttttcatcaacccaatagaaaaggcaaatgaagacggttatggagaaacgctcaaataaatgatgataatcagggatggaattatatatgctaaaaaacgacaaatatgtgcatgtatatgtgccaaaaaccccccaaataagtgataaaaagttaaaaaagccatgccaaaaactgaaaaaaaattgtttaataaatacgtgatatcatttctatccatttcgctagtaaaatgctaatcaaaacatttaaatatttacatatttactacgaatttttattctgtctgtgtgctgggaaggtttgttatttaaaaagatatattatttgaaattgaataacattttgacccataaatacctaaaaattttcataaaatatcttttttgaaaattcttgtgcaagttaaatgaattaatttcttaaaattgctaaatttgtgtcaaggtaaactccacacgaaaattttgactttttttgttgtttatttagttaatttagcagtgcaggcaaaattttattgcaaaaaataaaaataaaaaggaaaacaaattttaattcattaatttttcgatttttaaatttattttttgcttattaatctcctccataatatcatgcgctttattctgaggtttgaaattcacatgtttgtcgtttccgacttctcgaaacgaactgaatggggattgctaatgcgcatattgcgaaatattttgaaaataaaataagggtcaattgctagtgaaataatcggaatgaaaaaagggataaccacattgcgaaataattggggaaattgcgaattaagcacctcatcattcattttaatgacaggttttcaaaactttgcgtaccatattgtgaaaatattttccattttagaaagaaaaagcggaaatataaaataaaaaattccaatgaaatgaaa

SEQ ID NO: 16892 - DNA, 2505 bp, Heterodera glycines
ttctttgatgcgattgtaggtactgttacgattgattcgattttcgactgcgttgagcatcactttgaaaaggacgtatggcaaacgagggttgtccatcaccacgaagaggtcatcaatgagacgagctgtttggtcacggaaatatggttcaggcatggcgtacccggacaaaatgttgttgcacgccttcaattggaattacggtaaacaaaatgaaaggattgtcacaatcacccaaatacctgaatgagatcttcaaatcgtgtgttcatccttatttgattccgtgactgcaactccttttctcgtgtactgtcccactcctccatcggaccggtgaaattcacgggtttggacacggcaatgtcttcctggtcctccaatctcgcaattaaagtcccagggaaaaggacttgtcccggttgcgcaacctgaacaatttggccgctttcgtaacatgctaacccaaatgtacctgaactagacgaccacccgcctttctgatttccaaatttatgaccattttcatcgactccatttctccaaaaacctctccaattgtgacatattgtccgtccttcttcaaatactgcaaaaatcttccagcatttttcgatcgtaacatcgaagggtcattttctttctcgaatatggttaaagttttgccaattatcactttgaagcgttcagactgaaaacaaatatgaattgtttggccatttgctcattgtcagttttgagtacctcttcctccaaatggcaagtgtacgcctggtcttcatgggtaacaagcaaagttccattaccaagctcacggacaacagtgcacacgatgctttcattcaaccggacgagaaaattgatgggcccaaagcgattgaccatcactgagtatttggtgttgttgtgcaccaattcgaattcccacgtctccacaagtccggactttggcaggatttggcccttctcgagcgcactttggaatttggaaaatacttcggtaatccgagcgtggccaacttaaatttctctttagtccaaattcatcaaccacggttggatttgttactcagagtcgccccaattgccacactaatgtgcggtgggtattccacggatgcttggacgcgtgaggcaattcgggcgtcgagccacccggtgtgaaagttgttgcattcgaattccttgtcgtggagaaggccaacgaggtaattcacttgggaggtaaaagtggcacgcaattccaattctttgagtgcacacaaaagggcagaaatcgcttcgtatctgaaaatgcgcaattaatccaatttcctactatgtcatttgatgccttgccttgtcattcctttcgcaaaaagatgcccgaactgtgaatcggcaaactcatgaactttccccgtactggagacggaaaagtaaccccaaacattctgattcgactggaaattgagcacttcaacggcgccactcgcaggacggaagccttctgctgggtcctcgctggtaattcgtgccgcaattacgctgatatttgtgtccgttcggcactgttcttcgggcaacggagaagtgcttaatttttgaaaatcagatcgacttgagaatcgagctgttgattctgaactgacccgtatcgatccatgccaaagaaaagacgaatctcagtgattctgtgcagggggatgcccatggcgatttggagttggacggcggggatattaatgttggcgaccatttcagtgcacggatgttccacttggagtcgcgggttaagctccagaaaatagtacttctgctcagatggcaaatacatgtactgaaagggcaattgcagcattgtcttccgtgaaattcgcccacttcgacagtcccggcactgacgtagcccactttctttgccaaattcacagcgtccatttgcatttgccgttggatttcctgcggtacgatccctgcaggcgcctcctcgatgattttttgacagcgtcgttggatggaacagtcgcgcgtgaaaattgggatgacttggccgtattggtccgcaatcagttggacttcaatgtgtcgagcgttaaccatacacctagataaaacaaaacaaatcagaacaactctgagctgtagacaacttcatgatgaaaattggactgccgggcacttcggcttggactcttcgaaaattcaatcggaagtcttcatcgctcaagcatttccgaatgcctttccctcctcccccttcggatgctttgatcatcaccggatatgtgatgtttttgtcgtccatcgactgcagtccttccttgactgacgtgacgcacgcttttaaataaaggtccttcggaatttccaattcggccgtcgaattgtcggcattttgctcaggtgcaaccaaaccactgcccgaccattcgatggttggaatttgcacagtctgaacccaatacaatagatcatagcaaattcatcggcaagggcgacttggggggggggggggggggg

SEQ ID NO: 16893 - DNA, 932 bp, Heterodera glycines
  unsure (1)..(932): unsure at all n locations
gccaatgttgcgctgctaaagttcgtcgggaaggcgcgggttttcgctggcgtgtccccagcctgcccaaacccgcgtccacgtttgttccgtgtagcgtgttcaacgatttcgtcgacgtttgcgtaattatnggagtggcanccggcgggagaaaagacgaggtaatcggccatcttcagatactctgtgacggacaatgaaaaatgacttggaaagataaaatcaacctaatttgcttcacctgcttttgattggatttcctgctcagtcgtcagacagatgaactttattattcgatcatcgcgaaaaagttgcatcaaaagtttgcgcctaaaatttccaaattttaataaaaaaagaaaaaacgatttttacatggaaagaatgcatttgaccgcggcaattccatttgttgcgacaagaaccttaaaaaatattttataaaaattaattttggtgatttttcacctttttgatgtgtctcgcctttgctgagtcctcacaaaaatcgttgacaaatgattcaatgtccggaaagactctgttcttctggtcaatctatcggttaatctgtgtaaaaaaggagcagaaacaaaggaccgacttggttgctgctcaactgagttgatggaccgtcgaacttgctgactcgaaaagtctgcatcgtgggcgtgttggatggccccggcatgtcctgcctggagtcggattcagccggggaaaagagctttctgaaaaccaaaagttaaataattggtatgaatgttaaatcaacttttcaaaacaaaagaaattataagatccgatttatctggaaccctagtctttcgaagaaacgacaaaactgcaccattgcctggctgtgaccgggaagtgttatttttgaagcaagtttcttttttttaataaaatatactgtattttaataa

SEQ ID NO: 16894 - DNA, 1112 bp, Heterodera glycines
tatgttaaatctgtcaggtaaaccacacaagtaccgcccaccctaggatggatttctatatacatatttttccatatttcgcgatacatgtctatattttggcatttaaatccatgttcgcaatttttggtccatatttatggccatatttcgtgattttatatccatagtgattttatatccatatttttttggcatccctgataataatgtcattcggttgaccattccctccctcacttacacaatgcgttgtttccctcccgcgatgccttctgcattttatcggtgaattccttcaattccggggcgtatttttgatgaagggccatcattctgcgcatgttcacgggaattggaaagcaaagcaatcgcaaagtgacagttgcttaaatgaacgcctagttatttaaataaaaaaaattcccctggttttccgactcactggcaataattgtgccccaccagggaatgtccaatgtcaaatgtgcgtattccataacccaacgcatccaactcgacggcttccaccatgtccacaatcccaattcatccagcacactctgtccgttgctcagcatttcttcaagcgacggcttatagataggaaccggaacttctggcaccaattcggctaatcgggcgggcaaatcgcgcaagaaaatgtctcgagttgacagacatcgaacatcggcgagcgaaggagacggagaacagccgccacacacagcaaattttaacagagaccggttgccaattctcaaatatttagtggtcgaatacatttacctagctatttgaaaaaagctttaagattcaagactcttgcctcctccgacgaaaaacacgtttaatttatttgttttggcataatgttgttgttttttaactaagtaaaaaaaaatttcgcttttttgttttttggcttattttttttaactaaatttaaatagttaattagatatatgagcttatagcttatatcattcagagaatggaccagagaaataatacagatgctgaggttcaaaaaatttcattaaacattcaacagctgagtcaaaagggtaggttaaatttaattgtgtcattatttcattttttcgacctgc

SEQ ID NO: 16895 - DNA, 1840 bp, Heterodera glycines
cgaaaggccgccgcgcgagagaagacacagatcaaaaccgtgacggtggaggacgaacagttgcacgggcgtatgggcgcctacgaccccattcagatgagacagttgcagcaaaagcaccgcatgaatttggacgaaattcgcgaacgccaagaagtcgaggggaccgatatttcttcccatttgactcaaaatggctttccttaaggctctttctgctttggagcaggacatcggtgacattaatcagattttcaaagacttggcccatttggtgcacgaccaaggcgaaatggtggacagcattgaggttgttgtttaagctgtaggacaaagggagggcaatgggaagagcaacactttttaaatagtgccgaaatgcatttagaaaaggaaagggcaaatttaaaaaatgaataattattcaggcgaacattgagcacgccagcatccacgttcagcaagcaaacacaagcgtggcccaagcggtgcattaccaagcgaaggcacggcagaagaagctgatgatttatgtgagtgaaactgcgcaattgaaaaaaactatgccaatcaattaatttgctaattgccttccaccggtgatattttcagatttaatttatttactttcaggctttttgcatctttgtgctgctcgtcctgtttcttgtgctttacttgtggctaaagcactgagaaaggcatttccagtcggtgaaacatttcttgcgattgccaatgtttcaggcacatttttggaagcggtcatatcaaacttaacacagaaaagctacagacagaaatgaaaggggtttgccaatattttccgattgaaaaatagtcaaaaagaaaatgcattgttacgagaaaaaaaacttgaccaaaaaattaaccgaaactcgtcactttgctttcttggacctttaattataaaccatttgtaatttgacagtttttataatgtttatttcgcccattatctcttcaatcattgactgtgatggtttccttttgctctgtttgaatctgatgatgatttaaagttttattctcattttatatcaattataatataattcattaaactttttttatcttcgcaaaagttaattttttttacataaattaacctaaattatttgttgtttttttctattttttgtgattgttatcgaaatcccggggtgtgaattattgctaccggtcggttaagtgaaatgagtgcgtgccaatgacgggcaatgccatcccccccccccccccctataaaacgtcgttttccatgtgtccgttttcatttggctctccctttttcgtctctcctccactctctccctctgtctttttgcttctcatcgcttcctctgaattatttttgtgatgactttgcttttacttctgtccgtcccttaccattcagtgccctttctttcccctcctctttctcccttcctcctccttctcttcctcctctccccattttcttttttttcttcccctccctttctcccttttttattttatttttcctcctccgtttcgcccttttccaggtaaatgtccaagtgctggagaactttctgctcgcgttggaattgggctactccaagcacaacaatccctaccacaacacggcaaaattttgctttgctttccctccgttagtccatcaatgaaacgaaagcgcaaattgaattttgcctcgcccatttcggtctaattggtttaattggtcaagaaaaatgcgaaaaccgggccaaatagtgaatggaatgaattggccaatccatcagacaatttaatgagtgcagcaaaaacacggaacgattcggtcgaccat

SEQ ID NO: 16896 - DNA, 1386 bp, Heterodera glycines
aaaatatgcaaataaaagtcgcggtttttgttcgcaaacacaaaaaagaaagtgtttttcctactatttagagcatggagaagccaggaaaaaaatatgcattttcatatttttggcatccctgtttattaaaatggcatcgtgggtcgtgaacatccatcatttgcggatgttcgaatttgcattttgcaattggacttttctcttttgttaaaattgccttcagaacggacaaacggaagcagcagttggccatacgaaaaacaattgtccgtttcttgccaatttggccccttgccaaatgtgtggggcgagtggaagcaacaaccacacggcgatgtaaaaaacaaactcaaaatgcccccttatggcgacgaaaaagaaaaaatccctttgcaattttaggtactgtccaaataaacaagaagttcaccttgaacttaacgaaaaagtcatggcgtccattgtggcaatgcacattgacgacacgccgaccaatggacatggcggcaaagagtatcattgtcattttaacgcacagaacaacagccgatcgctgattcagcgtgcttcgcatgtatgttttaagtggccatatgggtcgattttagtttgtctttttcataaaattttccccttttggggtgagagctattttaccgcctccttcataggtctctttgagagcccttttttatctctgactttatgaattcattatgttggtttttacagattcaaatgactccgaccaaacgcaacaattcgttgggcacttcgaccatctctccgaagagttcgacttccatccgttggttttatctgcttaaattgcatttgcattttccctttaagtctgaaaccatttaccaccattttcaaaattcaatttttccatttatttagcgttgacgcctctcagcgaaaacagtccggatactttctgtgcgtttatggaccccgaaattctgctaaattcgcccactgccttctcaatgtctttctgtcgcattgtccgaattgcctcgacgccttcgacgctgccgtcggcttcgtctgctgcgacgggtgcttcgactaacgcgagacgctctctgtcttttggagggtactgaacgcggaagtgccgggtgaaggacgcaattggcacgaaaaaacccatcaaattatggaaaattaaagacgaaaatggccagggtattttagcgatgcattttggccttcacatcctttttgagcattttttgcttataattttggtgtcaaagtcttaaccaaaaaaaaaacaatttttgactgatattggcattttcattttttcaaacctatttttgcaattgcctggtccgaaattctggacacctgccaaacaaaaatttgggattt

SEQ ID NO: 16897 - DNA, 2325 bp, Heterodera glycines
  unsure (1)..(2325): unsure at all n locations
ttttcgacatttggtcgcagaagtcgaaacatcggaaaanatggtganncaaaagaagagcanaaggagaagaaaagttggacagacgaagagcatttcttcactattaattatgggtattaattagcccaaagtcatcagccacgaaatacccgacaataattcgcgataaaagccaaaaagggaatatgaaagcgctgctgccgttcggccttttatgcacaaatgtaattaattagtaattgatcaaagctaattaaattagggagaaatgaatgcttttcctgggatttctcgattatttcggcgattgccttaggctaacaatttgctgttcattaatatctctgaatcaatcactttagttatattggaggtgctcatttgtcagctcttgaacaatcagagaaatgagattacctatcagatttattactttaaaatatttattattttaaaattatttattaaataaaaattattttcccaccgcatttataaataaataaatcatcacaaatatttataatttattggacattattctggtcccagaatacaaaactagccgaaattaaaaacaaaatgtacaaaaattcattgaaaaatgaaataaaaattaaaattctgtcgctaattgtgccatttccttggggaaacccgcaacttctgtgtatcctttcaacgtggaaagcctccgccaaaatgtctccttttgtgccacgtccattggccctgtttctgtcacggtgttcggccgtttgatgtgcaccaatcggacgggctgacgacggtccgtgccgagtggggaccaatccctttcgccgttgagcatatttggcacactaattgagagacgagatcaattattaaaaatgcgattataaatggctaacaattagaaaagaatggaatttgaaaaaagccgggtggaattgtgaaacacagcagctggacgtattttatggcatctcaaatgccaaaaaggtgtaatgagcatgttggcttacccattcttcacaaaactgccgtaggcatgtaccatctctgcgcgtactcttctgtcatcctcgtccaattcgaaattgcccagcaatggcacgcccaaagtgaacgcgtattcggctgcaaatttcggatgcaattatcaggcggcattcgccctccttcaccagtgtgtgccacggcgcggaacggcaacagtttggcatggcctttgttcaaatggtcaaattggtgcagaaagacgggccatccgagggcggacttcagccgagcttcggccaaaattggcataatgaaaaggacgtcggaaaggaactgaaaagggggtcagagaaacttgaaacgaattatcattaattgcccttaattaatccgttgctaatttccccccttttgccaatgtttcttttggctattctgataattttcggccttcccttcggacctaccaaagtgtactgcttcaaccaatgcattgtgtcgttcgtcggcgtttcgtcggcatagaatttgatcagtttttccacaattgcccttttgcgcttctcaccctctctgccattggcatttcgtccaatttgttcagaatggatgattttttggataaatttgacgagttgttcgtgcccaaatgtgttcagatttgtcacggttaatgcagaaattgaaggtcagcagagaggtagagactatgagtggcttaaaaagggtgggcgaattggataaacaaaatgccaatgccaaatttgtacactctcttcccccatctgagtgaaacatcatgagaaacgaaagagtagccaaaacttctaagaaagagcgcctcatgcggcgaatagcccattatcggtatcactacattgctcgtgcttatgtcctattaccttctcaacggtaggcaacaaattcgtcgtccaaccaaaacttgtatgcaaaatcagtcctatttcgtgccatatcttggtataaatttcataatcttgtttgaaattttgcaggctaatagagaaaaagcttagctatcgcatggtacatataaaatttgattgattttaagcaatgttatacaatgttttgtcgaaaaaattgcaaaaatggcggattttacgaaacgacctagcacgttgcatgataccaaagtaatttgtcataccgaactccgttccgaaattttcgagaaaaaagtgaattttttacgaattttatttttactttttttaatgagaaagattaatatatttaccccttgtacttttccacctccacacatattaccctgccattaccaaaagcagttttgttgcttttttaaaactaata

SEQ ID NO: 16898 - DNA, 1525 bp, Heterodera glycines
tggtttattttgtttatgtatccaccgattccacggccttcgtctgactctttgtccaactgccgccgtttgctcttctttttcaattcttttcgtttgcgaatcttatttttaaaaagatattaaaatatcagcatcaaaattaatttatgccttttgctgtttggtcgtgtctccttgctgttcttttgcttcatctccgtttttcgctgtttcttgttccccattttgctcctgctcgttgtccccgtcaaagatgtcgttgcattccgatgcgattatatatggccaacggcccgcattaaattcgtggatcacacgacagcgtgagttggccggcatttgagcatttaaaacgcaagagacaattttaaaggcttggaaaaacagatggagtctggaaaacaaaaaggaaacaaactattaaatcaaaatgttaaaagttgcgctgacttatagcatcggttcacaccggacacgaaaatgaccgtcttcccaaccagcaatttcaactttatcagtgccaacaaaatggtgaaacgttcctcatcatttagacattggatttgaaactgttgaagttggtctatgccggggagatcactttcctgaaaaataaaggaatggcaatttaagaaaatgaaaaatataaaataattctttcaccttaagtttcaatgacagtatttgaccgacaacaaaggtgcgcttcagttcggtcatgtcttcgttgagtgtcgccgatgtcatcacagtttgaaagtggggcggcaacgcacttttaagacgactgaatataatgagaattataattattaaattaatcccagtaaaaactaacccaatttcatcgcggtaaccgtatgaaaagagcaaatctgcctcatccagcacaacgtgggcaacgtttatcagcaattttggcacttttttaacagcagccaaaagccgaccaggcgttgacaccaaaacgtccaacgactaaaaaaatcgaaaattaaatagcattataaaaattgctgaaatttgctacaacttcattctccaacatttcatcatttgcttctgcatattgtgccaaattaagcgaatggatgaacaccaacgattcactcagtcgttcgagcaaagcaaaaatttgagaggccaattctttagtcggagcaatgaccagcgaaaaaggcccattgctcttgcgaataatggaattctgaaattttatttgaagctacagtttgttttacactaattataaaatcggttcttgtccgttatgctttcccataatcattttatgtgtccaatagtattttttataaaagacaataacaaattatttcattttttacatagaaaagttagggatatgtctaaacgatcagaatgaatttgcaaatctgttggcaacatttcaggcgtagtcccattcaggtgttattattaaaccgttaaattaatatatcactaaatttttatcatatataataagccattttgctaccagattttgactaaaaaatgacca

SEQ ID NO: 16899 - DNA, 2493 bp, Heterodera glycines
  unsure (1)..(2493): unsure at all n locations
cattaatgtttcaaagtcggataaagattttacgaaatgttaaaaaaatatattttacgtcattaagaaattacggaacttatgcctttcccngccacactaacctggctaagttggatacttttttggatgagcggaagcagaaatgccgctgtcttcccactccccgttcgtgcccgcgccaaaatgtttttcccatccaaagctaacggaatcatggacgactggactggtgttggacgtccccaacccatctcggaaatagccttataaaccaataattgcgtttttgaatgactaacagtaagacttaccagtagcaaacgatcatcaaagtcgaaatccttgaaatcggcgaatgtctttgactgcttgccatttcgatcatctgatttcgtggcatcatttttggacgaattgttattcttacccataattagcacttaaagtcttgataattaagcagaaaaataatgaagttcatatatttactcaaaggttcataagccaatatttggttttgactaaaaaagaccatatatttttataagcgaaaataaaataaaacaatggaagagaacaaataaaccagaagatcaaatctcacacatcaaaaagcaaaatgataacagaacagtcaaacgagcgcagaaaaaacaatttaacgcaaagtgagcacatcggatgtcgcacggttgactcgatccatcagaatagctaaaagagtaacataagtaagcaaggaccctgaaaattggtcgggatccgtagaatctcagacggtctcgactttgattgaaatttaaaaaataaaagggaaaataaatgttacctgactgtttgtccacccagaccaaagtgtccaactgcgaacgtaaaatttggtgaatttgatcaagcattgaacgatgatgctcgtgctctttcaagtcgtcaccgctcaaactgtcacctgacaaacgctgaaggtccgtaatctaaaagcacaaatggaccttcatttaaaaataaagcttcaacctgttcacaaagatcacccaactcatcatccaactgcttcatttgcgcatttacagtcatttgaagttggagactaacaaaaataagcaaggcattaaatcattaaaatgcagttttgccctctcccaaattcgacacctgacccaccacccacatattttggcgttgcaaatccgccggagttgcatttgccatgtcacggatcaccaccgacggttgtcctgacaattgctgttggtccaacggagacaatcccatcgttttctccatttgcgtaatcagtgcatccaattcagtctgctgttgagataaaatgtccaactcgcacacaaaacgttcacgttcttgttccaactcgtcaatgttttgacccaatgaaaaaaccttcaaagtctctctgaattaaaccggtaaaaatgacaaccttatcctgagcacggcgtagaacgatgtcaaatgcatttaaatcatccagttcagccataaaatgcttttcttgtcgctcgaaatccactcgtaatttcagcagagtttgttgaagatctttgaaattcatccttggagcagcagcggcagaaaatgtggcagtggaagaaggcaaactaaaagaccattcattgggagagagaaaaatgttagtaaaaaggcagactaatagtaaagataaaattcaactgcaaaatgtatacccaaaaaggggagcagaggttgtggtagctgatggcgccacaaacaacgaggccgtagcggtagtggtggtcattggcggtggtccaaacaacgaggccgtagcggtagtggtggtcattggcggtggcccaaacaacgaggccgtagcggtagtggtggtcattggcggtggcccaaacaacgaggccgtagcggtagtggtggtcattggcggtggcccaaacaacgaggccgtagtggtagtggtggtcattggcggtggcccaaacaacgaggccgtagcggtagtggtggtcattggcggtggcccaaacaacgaggccgtagtggtagtggtggtcattggcggtggcccaaacaacgaggccgtagcggtagtggtggtcattggcggtggcccaaacaacgaggccgtagcggtagtggtggtcattggcggtggcccaaacaacgaggccatagcggtagtggtggtcattggcggtggcccaaacaacgaggccgtagtggtagtggtggtcattggcggtggcccaaacaacgaggccgtaatggtagtggtggtcattggcggtggcccaaacaacgaggccgtagcggtagtggtggtcattggcggtggcccaaacaacgaggccatagcggtagtggtggtcattggcggtggcccaaacaacgaggccgtagcggtagtggtggtcattggcggtggcccaaacaacgacgtcgaaacggcagtggaagaaggcaaactaaaggaccattcattggagagagaaaaat

SEQ ID NO: 16900 - DNA, 2224 bp, Heterodera glycines
ccttttaaaatctttattttatttcaacgacgaaacccaccacgccttgttttcgtccatattaaacgttgtaagaccctgtccccttcgaaattggacacttcattatccatttttaattttgagtttaggacctcaaacggatttttccattagttgtattatgaaatcgccgaaggaatttttcataaacttttcttgaagttttcttaaaattttttctatttgtagaaatttttcagtattttccgagggaggggaacggcgggggggggggagaggggaagaactgctcccattgtttaataaggccatcaaatacatctttgaacggcgctatttgaatagacttggaaatgccaacaaattgtgtgaggacggagagcacgcggaacgactcggggctggactgaatctgtggaacagagaaagaaggaaatgggcggaaatatgaaatgcaaaaatggaattagaagaaatgaattatttcatcgaatttgccaaaaaattaattttaatttcccgtttggaagtgaataaaatcatttaaacatttgttatactaaaagagcaaaaagttgctactagagaccggaaatttcaaatttgtggatcccgctgcgggattggaactcaaaatactttgcgggacgggaccccgcgggattggggactgggatcccgcaaaatcccccgtcccgcgccggtctctagttgctaccaaaccccgtaataaggagtggtaaaaagacagccgccaaagaagcgccgtgaaagtcgattgtcacaaaactcggcatttgaccggccgttgtccaactcccagcaggtggaaaagttcagagaatacagctgcgagttggaaacgctgaaacggcctttgcgataccaactgaaaattgggggagagagtttaaaaagtggagcaaaatcagaaaaatcgtggcggttcacttcatttccaaccgttgtttttgcggcatgtcaaaaaagcaaaaattcattaaaaatgaaagcacggtaattttttttcagaaatgggaattccgtgctatccctgtacaaatgcctttgttacctttttgttaaaatgtttggttttttatggtaactcaaaatttctccagcagaaaattttgacacaaaaatcagctttcttgggactaattaatgcataaaattttttgtgaaaagataaaaagataaaaataagtcattatgaaagagaacatatcaatctacaaaataaaaaatagaaaaagtgaatctctcaacgttgagaattttttaatttcaaaaaaaatcgggtatcaaaacttatgttccaccctaagtagttcctttttaatttcacgtaaaaatagaattttcaagataaattggtgaaaaaataaaaaaactatttgtaggcactcaaaaaataaagtatgtaaaaatacaaatcgattcaaagataaagcttagtgctctcatcaatgcccaccattgtctctaatgaccatgttcaccgctttagtgtaagtgcagtggtcaccggctagaacagacatcggcgcttctcctccaccgttccgcggccccttacaccgcattatcctccgcttcgtatgaatcatcgtcacaactagagaccggaaatttcaaatttgctgatcccgctgcgggattggtactgaaaaattttgcgggacgggatcccgcatgtataaatcccgcaaatcccgcatttaaaatttgcgggatcccgcgcgggattgcgggattttggaaatttcgaaaaattttcaattaaatttccaaaaaacaaaaaatacctgtcattttaaaatgaagttttaggggctggcgggatgcattaaaaggggttaatgggctgatctatatttttaagggtcagagggttggagagagatcggcggacaattgttaatgaatccatccataaatctaactattttatttttaactcaatttttgcggcgcgctttttcaaaaacttttcgggaacagagggtccggcggtgccgataggcgccgccgggaaaattttttgaaaattttgtcaatttcttaatgattttgtccaaacacttttggactcaatttctaccgagttaataagtaaaagccggtccggcggtgccgataggcgccgccgggaaattttttgaaaattctagatgaaaattgagagaaaatggcttttatttgaattgaatttgtt

SEQ ID NO: 16901 - DNA, 1624 bp, Heterodera glycines
  unsure (1)..(1624): unsure at all n locations
ttaggtaccctttggttgcatttggggcaatttttggtaggttttacacattttagcaagggaatatttaatattaattttgtaatgaatgatatcatttaacaaagaatttgtgggatgaattataaaataaaaaaaaacagaaaattatgtatttcaattaatgcctcgagaaaggcatttgaaatttcacgaaatttttggaataaggaaattttccatctaagttcattaatttctatgttaaatttttcatctaaagaaatctttcttttttcaggaaatgcatccgttttaggtcatttcaattaatttggatttgagcaatatctcttgaaaaaatgagtggcttttctaagactttgattattctaagatccgaaacttacaattagagaaaccactcgaccaaaatcgacaccgccgggaaaattttttgaaaattttgtcaatttcttaatgattttgtccaaacacttttggactcaatttctaccgagttaataagtaaaagccggtccggcggtgccgataggcgccgccgggaaattttttgaaaattctagatgaaaattgagagaaaaatggctttaatttgattgaatttgtttaaaatgtattcaaaaatatttggcattttgtccttaagaatttcaataaatagtcaaatttgcggatcccgctgcgggatttgaactcaaaattttgcgggacgggatcccgcaggtataaatcccgcaaaatcccgcaatcccgcatttcccaaaaaatgcgggattgcggattgggatcccgcaaaatcccgcgccggtctctagtcacaactgccttcctaaagcacagcgaaaaaacaattaaaaactgagaagtgcagcctttgataaaattttaaggcattttctaataagcttttagactcaaaatcaagaaacttgtcattttcaaaacttttttccggcggcatcgaaattgatcaacttaaaattttagttaaaaaattatgaatttttggaaattaaagaaaataaaataaaatttgcatttgattggttctctctgtggtgcaatggtctttgaaaaattttaatggaaaactatggtgtatgtgtgtggtggagggggaaaacgtataaccttcgtggagttacgcgctaccccccccccccccgcgagttttttattgaaaaatttttcattcctggggagaagaattcccgattttccccggccaagggcctgcgcccttttcatcccaatggttgcactgcatttaccccacccactgaaaataaaaaaagaaaataaaaatgatttttggtaggaaatatgaaatttaattgaaatttttgttgaaaacttggataagattttaattgtaaaaaatgtcttgcggtgtccatgaaaagatgcggtcacaaaaaagacaaaacccccgaaaaaaaattgaatttaatgaattatttaactcttaacaggtaattcgaaattaaatttaattctgagtgagcgaaggttaaacacagagtaaagcgtgaaagaagacaaatgtcgggagatattaatggaaagatcattgatcaataatgcaaatgaatttgcaaaaaatgngaacattgtcaaaaag

SEQ ID NO: 16902 - DNA, 2316 bp, Heterodera glycines
  unsure (1)..(2316): unsure at all n locations
tcatttgaatgctttaatcaaagtcaaagaatgagtttgctgagaaaatcagtaaaaaaaaaaagattttctagcctgtaaaatattaagaaaatgcaaaaaatttcgnattttataatttcaattatactttttttttttgttagatntggtctcaatgaagaaagttacaactcaaaaactcgggctgagccaaaacgactcggaccccttcattttcacccggtaatatntaatattgattgatccgtttgtttttgcataaatacccatcctttcctccttgcttcgttcattctattaaaaaattttttttctttcaccatatgttgcgttgaccctctcgcttctatgacccaattccaatcaatattttatgttcgccttgtccatttcattaattgagtaaatttattatttactgcgtatttttccgtaccaggtgttttcgacagtgattgatttcgacagtgattggtttcgacagtactttttaattaatttctacatgatttattgtatatttgaattaatattaattaatatacactttgcaaatacaaaatttataattgaagtaagtaataaaaataagacttgtatgatttttttgctaaaaatttatcgctttcactttttctatacaaatatctcttgctggaatgagtcaaaaatacaacaaatttcttagataagattctcaaatcgtgtgggaaaatctgctaactaatgccgggtttgagtgccaaaattcaaatctgcaggctcttaagcaagaattcgaaaatctcgaacccctctgcaagtataagagccatgttcttataattttaattgtcaaaatttaacgagacgtatgccctatagaacaatttttttttaaataagctttactgtcgaaatcaatcactgtcgaaaccaacactgtcgagatcaccattgtcgaaaactaacagcacctatttttaatgacgcatagtgacttcagaatcgaaaatttcaatgcagaaatgcttttttgagctcctttcttcaaaacaaaagcaaaaatatttttttatgaatttttaaatgtatgcatatttttagcgcccttttttggcaatattaataattggtgtcccgacgaaaatatgttaaaaatttgtcgggtattttttctaggcttaaaaatgagctgatcacgaatctgatctcagattttgaaaatcattgatttttatctaatatttcccggcgctgctcacctgccacacattgtgccaaacccatgggacattttaaataaaattttaaaataaaataaaataaaaatatttaaattttcaagaattaatcaaatttaaaagtaaaagtaagttaagtttttttaacaggtttaacttaattctgtaagaaaattcagaaagtatccaagcaaatcgttttaagacaaataaaaaaaggattttaattaacggataattgatttaattcaataaatggtcatgtaaaaaaggtggttcaaaattttaccgtttctatctaaaaatttaaaaaaaagcattggggagcggtggtgccaatgtaatcaaaaattcattgccatgccgaacactgtgagagagggcaaatgcaaacaatcgtcttagcctctgggggggggatatcgattacaattttatccgggaatggattgatgaatttggaaggattacaaaatggaagcgcaatagggccaatatatatttttataagaaaaaatattgtaatttttaaaatatacaagagaaattcggtaaaattttatttaatttcaaattctgttaattcgataatttaatgtttcaaaaatttattttatataatattcaaaaggttttggaattaattaaaaaaccctgtgagatttttcgtctttcactacgcttttaaatatgcgaaaaccaccgacagcggacacacatttatttatctgctgtcttttcactaaaaaccccaaaagccagaagcaggccagataaagcatgaaattaattagaagcagtagtaagtggcccgggaccgtagcagcatgacactaattagatgtgacagctggcggggaggggtgtcaattagtcactaattgactgaccggggtactaattggtcagcggtcaagagggcactaattggtcagccgtagggtgtggggtagcaattaattaattaattggggaaacccaaacctattggacgttttcaaatttacatgtaatttttttggtaaaggaatattttgattgattttaaatgtgacagctttttgattgattgtaaatgtgaaagatgggg

SEQ ID NO: 16903 - DNA, 1143 bp, Heterodera glycines
gcgacggcgtcgcgttcgtattgctcccaattttacataaatgttcacaataaaaagcataataatttttgttttaaataattctttttcttttttagctcaaaagcttcccagctcgttcacaattttttattgatggcggacaaaaatttgtcagcaattgatggtaatgttttctttacattttcaatggtctataatttttttgttttctcagaagggtgtctgcgcattgacaccaattcgccaaatggagaagtgtccgcaccaccgctaccaacgatgatggcccgctgtttgcccggggccaatgcggaggacacatttgtcgtcgacgtcgaaagtatgaaacttcaaatttattattagaaaaaaagaaaaaaatttttgcagatacatcacactcaattaatctggtgaattattcggacaccagcagcaacgagacaacttttacctggtaagaatgggggggggagggaaaattttcattgaaaattataaaagctgttttgcatttcagcacaactgatcgtccaaaaagaaaagcggctgaaaaagccatgatgcttttgataaaaccgtaatggttttatcactcctttaattcggcttaatgtttttcctttcatttttgaagtcgatgtttccaccagccttatccccaaccgtccgctcttccctattgtgccattgcctaattgttaggggagactattcacccctatccagcccttccatctttctgccactgtgggttgggttttatacaaatattcttcaactgttccatattaaataaaatacgtcatggttttggtaagtaaaaattccgaaattataatcaaaaaaacttgaatagagaaccctgaccaaaaagtttctatggacaggttacactcttaatttgggttatcaagaaagtgtataagtcataatcgaaatgaaaaatttatcaacaaaaaagctgcaagcaacattaaaaaatctacttctctaatcatcaaactcgctttattctcgatcatagtaatggaagattgcacctcgaacattgagtaaatcatttactgacatccctatttctttctaaaaattttattaaacagaaaatcatttttaatttaattaatatgattatgc

SEQ ID NO: 16904 - DNA, 604 bp, Heterodera glycines
caatcacgaacaaccatcaagcattcccccatcttattttcccccttccaatttgctctgtcatttgtgcatccttccgcccattcttccattcgccaaccggaaccccaatataaatcaaagggtgaagattcaatcaatatagcttctcctgtccccagcaacatttttttcaacatctcatgctggacaaatttggcgaccaatccgcgcttcatcacctattatttatttttacacaattcctcaatggtccaacctcaaaggattttgttctccacaccaataaatcgaatcctttaacattgttattgcggccgagttttttaatgatgattggctcattcttaaactttaactatggaatgccacaaattattcaaacttcagcaagaatttttttggggggcggggggggggaaacgacgtgggggggaaacgacccgggggggaaacggcgggggggggggggggaaacgacctgctccggaaatgttctgatttcgggctattgtcctaattttattcttatttcttaaaattctcagaaaatttgtaattttatggcgtaatgtcacttagattttcaaaattttccacggcg

SEQ ID NO: 16905 - DNA, 873 bp, Heterodera glycines
ccccccccccctgcctacgcccttgattcagaccatgtatttttgggcccagttagacccggacctgccgcggggtcgggtatcgggattgtaaaaattgattaaaaatatttaaaaagaaagttttaaaaataaaactaactcattacgattttttaaagtcggaaaagtttttttacatcaacttgatcagttctttccttcatgggaaaaaatggcttgtagaaaattttagaaaaaatttctaggagtgaaaatttttaagaaagtatacaaaattctcgtttctgaatacggtaatttattgttattttaatttcaataaatttaattcgaaaaattatttttgagaaaaaatttgctccaatattttttaaatgtgattttgttttttttaattcattcattttttttataactttgacagttcgttttctctgcggtcgcttatctcattctcagcgctgcccgtgaacaaattttcaatgcgaattgagaaaaaatacgaaaccaaaaacagaaaaaatatttttggtttttggaataaaagggaaagaacaaacaaaccgcgaaatgactaacaaataactcttgatcattaattgtacgctataaatttataatatttttgttggctccggtttgctgcaatttccaattacgaacaaaaatcggaagacaatgacaaatttggcatttttttcggaatttatcgttacgacgaaattatgccgtttgactaattcgttttgccgttttatccgtcgtttgtcgttcataattttgattggccccggtcgggtcactcccgacgaaggattggagtcgtttaagagtgtcccgtcgtttggtcaattgccttgcagttttagg

SEQ ID NO: 16906 - DNA, 811 bp, Heterodera glycines
taatatcgtgacctgcaattgatgcgtcttggaaggtcggcggagagcggccaatgtcgttgacggtgaacagaaattctttggcgtagagtcgctgcatcagcatcttcgccttgtccccaatgcacacaattttgtagtcgacgtcggccggtttgttggccataatgttttttgcggtctaaagcaaataatttaaatggaaaaacaaccaaaaaggtctcttaaaagtagtttttttacttaaaaaaccaaaggggcccttttgtttgacaatttcttatatcccaaacccgaaaatttgaaaattcaaattttgttcagttagattagggattcggaactagtcaaaattgatgtcactgatcagcgacccgaaaaaaccgacaacaatttttaagacaaagtgtaatcaaaaaaaattccaaaccaaaagtgtctcccttaattaaaatcaaacacttttaaacaagcacacgataaggtgtgcttaaaggaaagtaagttttttgttgttcgatttcgggtccggtttgaaattagacagaatagtgccaattttgtgttagcgaacctgaaaactaaatacaactaaaggtttagccatcccgaatattacaatgacaaattccaaggggaatggacccatcacacactttccccatgtttttcggcttaaccttggcaaccgaagtgtgcaccgatccgcacagtccacggtcgctgctcatcagaatgagaagccgttttcggcccgccgattcgacaacactttcggcaactttcaccggctccgtttggtcccccgcgg

SEQ ID NO: 16907 - DNA, 1218 bp, Heterodera glycines
gaatttttcaaaaaaaaaaaataataaattttaaaaaaatatttaataggttaaatttttaaattttttaccatgtaaaaggtaatttcaaaactgttttttagtttattttattttttttaaaaagatcaaaatattttaagtaattttacattattttggatttttttttttgggaaagttacaccttttttttgcggcgcgctttatccaaagagaatttgagaaactgtggggaaggaagggtccggcggtgccgatatgcgccgccgggaatgtaatttttaatgtaaattgttaacaaattttgtccaaaaaatggaaaatttagcgattttgagcaaattttcaagaaaattaagttttttttgagtccggcggtgccgataggtgccgtcggaaaaaaaattgaaaatttctatgcaatttattaacataaattgtacaaaaattgctaattttttgaaaaaaaaactcagaaaaattccgaaaaattccgacttttcatcaaaaatttcggaagtcggaattccgaggccccaaaaattttcggaagtcggaagtcggaattccgaccccaaaaatgtcggaagtcggaactcggaagtcggaattccgtgccatccctgcagtgcatgaaaaaaagtaatttttagccatcgttaaagttaatatccatcctatatactaaagttgagtgtccttatgtaacctggcgttttgttattgtggcgtgctgttttgttttgcgttaaaaaatgatttgaaaatgaaaatgtttttgttttgttttgcgttaaaaaagcatttgaaaaatgaaaatgtttggttttgatttttcaatttgttttgcaataaacattcttaaaattgtacctatttatttgctttttatgtatgttcatagtttattaagttatttgttatataaatttttttttgtaaacgaaaaaatttatcagtatattgtttgagtttgatttagtggttgttgtttgtttgtttgtttattttgtttttgtgttctttacgtgaaataattatgtttatgcttaatgttatttgaacttttaatgaaatagaaatgcatatctttggtttgttctgtgactttagtgtgagacactaatgtgtgtcatgcttttgaaaaacattagtggtttgttctgtgactttagtgtgagacactaatgtgtgtcatcctttgaaaaacattag

SEQ ID NO: 16908 - DNA, 1348 bp, Heterodera glycines
agtaattaggaaaatcttattccttggcgtgtgaggagtttgacagtgatttgatttttttaaatttgaggcaggcgggtaatacctctgcatgtccctcctattttctgaaaaaaatggctcttatatgtagggtggggatttttaggggcgaaaaattccaatttagggacctaaataggggcaaaaaattcgcgaaataggggcgaaaataggggggaaaaagtttcaaatgtaaaggtgaaatttattaaattgccgttttctctatgtaataagttaaaattaaggcaaacaattttattcactgatagcagttagaaatgaagtacattccgaaattttcggggtttaagggtcgattcttaggggtgtatttttccaaaattttttgggtcgattcttaggggtgtatttttccaaaaatttttgggtcgattcttaggggtgtatctttccaaaattttttgggtcgatttttaggggtgtatttttcttttttattgcattcttgttaataaatttcctaaaaatcgcgaaataagggcgagaataggggcgaaacgccaaaatagggacaaaaacttattttaggggcgaacactcaaaatagggatttttaggggcgaacatccaaaatagggattcctagggtcggataggggcgttaaaacgaacatttcgaatcccgaacccgaattcgaacaaaaactcaaaaatccaatttccgacaaaattcacatttattgcccaaatcaatttaaatgcacgaaatttgtaatgaatgagattaaaaacaatagatttatggatttcgttcacaggggtacataacacttacttgagaccaaaagttaaaaaatacatcattataatccccaaagtgctttcgccacagaaagtaaagttcaacacaatcaaatacagcaaagtcccaaaatatgcaaattttttaaaattggcgtaataatcttgtgatagacaagcagatggtagtgtgtatgaatgttttctttgtgatgtgaagtttttgggtttttatcgttttggcgccgccgttttggcgccagcccaagttttcggactataacttttttatttgttaaccaaatccaataatcttggtatcattcgaaagcttaacatgtttagaagatatttctaaactattacttcacgattagacaattaccaaaaaagttataacatgaaattgcaaaaaagtcgaaaattttgaggttttttcctaataacttttttagaagctaagatttttgtttgttttttgtaaggctaatagagcttgtgaatggctttcgaatgataccaagattgttagatttagtca

SEQ ID NO: 16909 - DNA, 924 bp, Heterodera glycines
agaaatccacgagattgtcaaaaataccattcttcattgtgagttgtcgatagtacctttttatgcatcatagagaatttcttacgagttttttttgtgaaaatttaaatttttcaaaaaaatatttttttttcgtgagtggcgggaatttcaatttctttttttttataaaataaaattccttcagactctgaaattcgtggcaaatgcaatgagttgaacgatgcactcaagcagttagacctcacggctacaccacacaaaattcgcacaactcccagcaaacggcgttcattcatcgacatgcacggtggccatggaaaaaaatcggaatttcgaggccttgaaatggcagggaatcggacgaaaaatgttcgaacccggaatttcgaggcctcgaaatggcagggaatcgggcggaaaaatgttcgaatccggaatttgagacctggaaatggcagcaaatcggaattctgagggcaaaaatgattggtaaacggaataaactgagttccaatgcctgaaaatgataggaaaaaatgttcgaaaactggaatttggagacttgaaattgtaggaaatcaggattctgagggctaaagaattagaactcggaatttcatttgttcgaattcaaaattccgaggcctaaaaagaggaaatcggtattctgagggctaaaaatgataggaaaatggaatttcattggcttaaaatttagaattccgaacttcgatttgtaaattgattgtttctttttcataaaattctctttgttttattatgtcaattaaattttgatttttaaaaatataattaatttaaatttatgtttatattttgcatacaattaaattcatatatatatatatatatatatatatatatatatatatatatataatttatttattatatatatat

SEQ ID NO: 16910 - DNA, 484 bp, Heterodera glycines
cgccgggaaaaatttgtaattattaatgcgatttgttaacagattttgcccaaaaaatgcgatttttagcaaatttttaaagattaaggatttttaaggtccgctttaattatttttcttactttttaaagaaatgtcaaaaacttataaagtagaattcttcgaatggaaaaaattaaaccagaaaattgaaaaaaaaaaacatttataaacagtatgccaaaaagattttcgaaggaaaaagaacaaattttgattaaatcctaacccggtaaagcccggtcaaaaatgccgggttccgggccgggttgcattttcaaaaacgaccgggttccgggcccggcctctcaaaacccggtcaacacggatttttccaaaaatcgccgggccgggttgccgggcccgggaaaacccggtaccgggcccggcacggctcggtctctaaatcatttagactttctgaggttttttttctttttgaagg

SEQ ID NO: 16911 - DNA, 1912 bp, Heterodera glycines
tccgtgcacaacaaaatttcgtttgtagttaaattttaattttccaacaaataatttcattccaatttcaaaaaaattcaataatcatacacatcaaatcttttaatcactgttgtacctcttctatttactgttgtacctcttttaatcactgttgtacctcttctaatcgctgttgtacctcttctaatcacttttgtacctcttttatcacttttgcacctcttctatcactgttgtacctcttctaatcacagttgtacctcttctcatcactgttctacctcttctgatcagatttgtaccccttctaataatgttgtacctcttctaatcacagttgtacctcttctcatcactgttctacctcttctgatcactgttgtacctcttctaatcactgttgtaccacttctaatacacttgtacctcttctaatcacttttgtacctcttttatcacttttgcgcctcttctatcactgttgtacctcttctaatcacagttgtacctcttctcatcactgttctacctcttctgatcagatttgtaccccttctaataatcttgtacctcttctaatcagatttgtacctcttcctaaaaaacgggcgcgaagcgcccgtctgaggccgcgaagcggccgaaaaggcccaactaaatttaaaaacgggtgcgaagcgcccgtctgagctcaacaaatttaaaaaacgggcgcgaagcgcccgtcagagcaaaacaacatttgaaaaacgggcgcgaagcgcccgtctgaggccgcgaagcggccttaatagcccaacaaatttagaaacgggcgcgaagcgcccgtataagcccaacaaaatttaaaaaacgggcgcgaagcgctcgttcgagcccgcgaagcggcctaaaagtcccagataattttttaaaaattccaaatctccacaaccagagctaaaaaaaccgtagttgtacctcttctgatcacaattgtaccttcccacccgtggtagcaacatttttgcgtagacctgacatggatctgcggatcagcactccaaaaaatctgctgcagtatttggtcaaccaatacaacaggcagcaagcacggcaaaaccccaatgcccaacagaaaactgttgatgacattggcagtgttgttcggctttccgaacacaacgtaaattctctccaatattggaagaaaatgtatgaagattgcaacaccgtttttgcacggtgccatgacgcgaagaaagcgcgtctcttcattactttcacgaacaacagggaatggcctgagttcaaagagaatttacacaaaaacggtcaagtatttactgaccgttttgacatgtggatgcgtgtctggagcagcaaaatcgctgagttccgagaagaactttatgacaaaaagttcttcggaacaatccttggttacggtgaatcaatggagttccaaggccgaggaggcccacatgcccacattgtggcgcaaacagacctggacgcagttccatatgtcattcaggaatacatatgggcgcacattccatctttgcctgataaagatgacgacacgcccattgcaaaaatgcatcgcgaaatccgcgaaacaatgcatatgcaactgcacagatgcagtgacagttggtgtggtcctagcgacccaatttacgggcggtgcaagaaggggttcccagccccttactcaaaatgtacgattttgcgcccggacaggcccgcgatgtatttccggccttcaccaactgatggtggtgcccaattagaggtaaacggcctaatatacgacaactcacatgtcgtgccgtataatccttatattctgctacgttaccgagtacaccataatgtactgtttgcatatggtaacaaagcaaatattaaatacgcactcaagtac

SEQ ID NO: 16912 - DNA, 1368 bp, Heterodera glycines
  unsure (1)..(1368): unsure at all n locations
aacaacgaaaaagaattgagtctcgcgagtttaactcagcagaacaagctgagccgtaagttttttcattttcaaattttatgaatttcccgaggttggctattttttcattttccgatcgggtagcccttgtatttgtttcctcgattggtcggaataaattgcgtttggccaaaactgttcctgctaaatttgatcaactaaggaaaaagttatcttaaagttttgtctcagactcatttggccctctccgtcctcccgtctgacattcgagaaaaagctgagtaacttcaaacactaattgattttcaaatcctctgcagggtcggacttttttatttttgtccggctaatgatcgaccattacggctttacgtccgaccaataatttcttttcttagatttgatcgaattgtgtgaagaaataaagaaaaggaaaaatttaaatgcggaaatattttcaaaaaattggaacaaaaagatggaattggaaaaagaaagggaagaaaaacaatgggccgaaagtgtgaaaaaacaaaatgaaattgcggggccatacaaaatgatacagaaaatgcattttgaagagcttaagaaaagcataggaaagccgaaaaaggacgaggaattgcagggaatgatcacaactttggtgcagggtttgccacaataatttaatttaaataaaatttttaagaaattaaaacttaagatttacgggcaaacaaaaacaattgtagagaaaatcttttgagccttttactgattgaagacagaaacgaatttttaaaagaaataattaacgaaacgaaagaagaaattgatcaaacagaattagagaagaatttggaagaattattaaatggagaaaagaaaaagaagaaaagtaaaaagagtaaaaagaaaaaaatcggaaaagaaaaaagcgaaaaatcaatggaaaacacaaaagacacagacagagaaagagaagaagaaaaacggggcagagagcaagaggaagaaaaaagtgaaaatggaaaaagagaaaactgtgacaaaaacgaaaataaaaacagtactaaaacgacggatggagaaaaggcaaaagaaacggaccaaacgacgaaaatggcaataaatgagcaaatgttggcggaagaactgaacaaaattggcacatttaaaagtggggaaatatttaaaattaaaattttaaataaaaggcaaataattaatttaagaattgtgtgatgagttaacattgaatgagctgttcaaaacatttatttgctcaccttccgtggagagacttcttataattgancaagcagcaatcatttgttaaaaagagcagagaatggaagcgattgaacagctcgaaaaagt

SEQ ID NO: 16913 - DNA, 2332 bp, Heterodera glycines
  unsure (1)..(2332): unsure at all n locations
atagtaattttaatggttgcacgtggccgggaccgagccggtccttccaggtcgtcccggtttatgagcagcacaggtcccagtcccgataggaaatcggaaggctggaaataagcagtggcaagaatgtatttgtgagtgaaatctcgtaaaggaaattagttagaaaagaaaaattttaacgaaaaataatatttttcacattattttttgtttttttttcttggaattcccggttggtcccagtcccggtcccgattgaaaatccaagggtcacgatcatagcaaaattctcgtttccgtgtaattctaataattttatttaattaattatttgttcatttctcagttaaaaattttcttgggccaatttatcgttcgaaatttgcctccatcggcagagcattcggaagaacactttgaccaacaaacaaatgccattataaattctgtccgttgtgccgtggatggatgggtctgtcaaattaagtttaattaatttaaattttgcgccttttcaatttccgtctgccaagcgtggcgcccggcttctgctcaccgggtcgcatttgctgggcacccaaacttttgactcggacatcgatttgatttgcgttgtgccgggaaaaagcgtaagacaatcggactttttcgggaaagcggagacggaatgtaaagcgaacaaatgcagcgaggagaagcaaaagcaaaagtcactgttctgcattctttgtgaggtgaaaaaagaaaacgaaattcgaatttgagtaccgaatttttgcggagaatgtcagaaattcaaaaaattgactcaaaaattggaagtagcgtaaatttggtttgagttcttgccaaatgcataaaatgctttttgaaaataataattttattaagaaagatattttaagtaaaatatttcacataaataataataattaaatttaatatttctttcatgataatttttgtaacttcgtctctccacattattgagcatatatacatactagaaagattcttaatgccaaatgatcaattacaaaaaagaatttagaatgaaaatgtgagtggcatagtgaagatcaattacggcacagtgccaatgctcaaattgaaatttggtggctttgacgtggacatttctttcgtttcgataccggacaggaaaaatttgccaaatgttttgagcgaagaaacaatggaaaaatatttgaacaaattttattcggaagaaagtgctaaatttgacaagcaaatccgaattttgtcgagtaattttttgtgtaaatattcataaaatataaaaattaacgtttaagttattaatggaacccgggttttgaagcgtttgtttattttatttttgctaatgggtgcgctaataagcataaaaatatttctaatttgtttggggcttcgaagacccaatttttacatgcttaactttgtagagttcgaaagttttgctctaagtgagtctccccgttttttgcatatttttatcaaaatattttttctatcaaaaaattcacttttagttacataattaaaaaataatcattttaaggttattgttcaaatttatacataaaaaatttgttaatggaaggccacaaaactgaaaatcataatgaaaatgataatgaagaagaaaaatccgcaaaagtgctcaaaaatttacgtttaatggtaacgacattaaaattatgggccaaaagtaagggggaaaatgcatttccagtattatttgtactttttaggcaacttaatctattcaaataaatttggctttttgaatggggtcagtctgacgataatggccacgaaaatcattttgctttacccaaatgcgccaattttgtttttgctcgagaaattctatctaatttatgcgaaaaggtaaaataatttattattaattataaaaacaaaaacttagagaaacaaaagtgccaattaaactaaaattggtggcaaatgaatcagacaaaaaacattttgacgagaaaaaaattgccatggaagaagtgatgcgaatttacacgccatcatttccagaacaaaacacagcgaaaaatgtcactcactcgacggaaaaaattatccgtaaaaatatggacgaaggtggccaattaataaataatcattaaaaataaataattaaatattactttttggtgttaagcattgaatcggattaagaaaatgancaaagaaagcattgactggtcaattctgatggtaaattcagaacagttcactcaaaggtgaaaaccgatcaaatttattttaaatggtttttacttctcatattttcagttttcctttttta

SEQ ID NO: 16914 - DNA, 1539 bp, Heterodera glycines
tgaatttaaatagcaaagaaataaaaacggtaaattaattgaccttcaaagggccttccgcgagaattgtccttaaagttggccgccatgtctctttacggcgctgcgaaaatgtttctcgagacgggggagcacccggccgtcctcaaagaggcggtgcagagcccgggtttgtgcctccgggcaattagcagatgattaatcacaattagtcaccggaaaacgggctgggggggggaggagccttttctgttgggtcgattaatccttcaagtttttctcggtcctttccattggtctctctccacaggtggttcgaccattttcggcatccacgaattggagaagggcggcatgcgcggtttgctgatcaacgcggtggaggcggcctctgagcgctcccggcgaacgggcgaagcggcgctgccgcccggcagaacgtccgtaatttatcgaagcgaaatttaatgtcggaaatgcaatcagtcggcagagttcagtttatataatgccaaattctctcagagaacgaaacccttttaaaaaatttttctaccccctttttataccacctcctctttctttttttttttctttttcgcatttaatttaattgactgtcatgtacagtaaacaactttgatcagaagcgatcgaatcatcatttttcggtgggttcaaaccccaaaaacgaagcaaaaaataaataaatattcggtggaccgatcgatcgatgcctttcagctgtgacgatgaacaaagtgacgaggaaagctcacaatcggacggcactttctcttccgatgatgacgaatctgagggtgacgcgcgaaggaagtgacggcggaaagtgccggaggggcggcggaagaacggccgactcggcacgccagcgcaattttcattatgaaaaacaaacaaaagacagctaattagtgaagggcaaaccaaatggccaaggagacacttcaaatggtagcacgaattgaccaatttacaaataaaaaaagaaatggccaaaggagcggggaaccgttgcgcatttggacaaaagggtgcctaagggagaggaaggagcatcgatggcacaatttcttaatacttcctttttattttccctctttttgtcggcaaagcttctcttcctttgcttctgttgattttctcaattgtttaatttgccgtaatttcgtcgaacgtttctttcctctgcgaaatcaccgactgaacatataaaatcaaaacaaaaccttcgtttggcccattccctcgccaattttgtgacggatagcccccagggggggggggggggggggggagtgccggcggggaaaataacgcggaactaaatttcatgcattttcgtttcaatccgagtagaattttttttctcaatagtgtccttttattaattttttttgtggtggacggcgcttacattttttctcatcctcgtcgaatattcctctctctgttcccgtcccgtccctcgttccttacccctcccccctatttcgcctaatctcccatattccctta

SEQ ID NO: 16915 - DNA, 3072 bp, Heterodera glycines
caaaaatggaaagagagaagccgaagcgaacaaaaagcatcgtcaaagccctcgccccccccccccccccaattggcgcgcctttcattttgccatttaaaaatgaattgatgaatttactcattttgaacttttcccgttatggtgaaataattaattttccttttcacttttgtctttctccacaactaatcttttgggccttacagataattaagcaattattttataaggacaaacaattgaatttaattatttcgtttaaatacgtgcagtaaagcaaaatacttactgaattgtcaaatttgcctttttcaattaatgccagtgccaatttgtcttgtctgtggcgctgagaatgctaaacaacattacggaagttggtgctgcaacggatgcaaaggcatggcaatttggattttggactttcaattaaaattattctaatatgggtttattttgagggtttttttggcgttccatttcatcgaaacgccgttatatatgcctaaatcgaaactctgacattaagtgcaagttggaagatggtattgaccataccgttcactttgtggggtttaattccctttgcctttttcgggtcgtcgcaattgctgcagggcgtgccgcctgaagcgatgtttggaaattggcatggacccgaaatgtaagtcagtgggaagtccaaaagcaactaaccagcaccgaatggtttaagtgatccgcgactgctggggaaagtcgcccacgccgcaagggccgacgctcaaagatcggtgccgatcccttggggcgctcgattggaaaaatggaagagaaatggaccgaattggcactcccaacccagactgtgttgaacagcaggcaatttagcgactaaccaattaaacattgttaattaatttgcagccttccgttatgctcccgtctcaatgcaaaaagcaaagtgacgcaccccggccaaacacttcgaatttgtcatcctgcaatttgcaactgctcagcgattacctggagtgggtgcacaacattcccgagctcaacatgctcaacgaagatgaccgggtgaaggaggacgagaagaaatgaagaactgtcagatgttccctcacatttaatcccaaattttcttcagaattttttggttttgtgccgtgcgcgtccgtccgcttggcttctgttggcccatcatcggatgcataacaccgaaaacagaccgaacattgaattggacaaattggagcttttgttgcacaatgaaatcgtcggtccgctgcgcgaattggaaattcattcagtcgaattcgaaatattgcgaaatgtctgctttttcagcactggtaatttcaaattttacaacccgatcattggcaattttcggatttggagagagaattttaaaggttccattaccaagtgatcagaatcatttctgagcagttgggatgagagtacggtgatcagttatcactttccaccaattacttccaactgtcgggtcgtttcactttggccccagcaaaaaataatagttttcacatgaaatttaaaaagaataagaagaaatttagatggagagctgttttattttctaagtgaaaaagttatcatattttcggaaaaaaattgttaaaatttaataaaagtgcgaaatatttgctaaaaactggacgaaaacgttagaaagttgttcaaaaacagaattttttttctccaaaaatgcttaaactgagcttcaaaatattcacttaaatgcaaaattaaaaactttaatttaaaattaaaagataaaaaaattttccagtgccccaactgagtgaggccgggcggcggttggtcacttcagtacaaaatgcccaactgagaacactcagtgaattttcgctcagtcggattaatctcattgaaaaagccaacgaaagtccgcttctgctcagttccgtgttcaggctgaataggatgatgaacactttgttgacaattgaggtgaaaaagccggggatttgacaattggcactcactttttcattttcagaaagtcgccaatttcaaagggtaaattacacgagtgattaacatttttgatcataattatagctaattaattacccttgcatttgattgattgaataaaaccgcatgataattaatgaatcgacaaattaaataatttattttatttttaacaaaattttgtcaatatgtgaacaatgagcactgtctttttgattggcatcagtgctaattgtgcaaatgttctaaaataatgcgtcggcaatggtatttctgacacttattcgatgaaccattcggaaatttcctgaatttatttattttgttttattatggaatcttgcatttctcacaaaaaatgatatagcattggtttccggcaatttttcgttgattcagacgacataaattacgttcagaagagcgaatggaagcaaaacaaattcaatgccattgccattcataagaggaagtgcaacggtgtgtcaaaaacccgccaaaaatattctaagcagcatcaaatgaaaaggaaaggcaaatcaccgaattaaaaagtgccaaggaatgaatccgcaatatttccggaatttaaagagcaaaattggctcctgaccaataccaattagtgcagtgtccattatgcggtcgctctgttggaacagttcgggtgtaacattgtaagcacttccgctggcaatcgctcccatgcaaagatcgcccgaagcgatcaatggaaggcccgaaaagatgggaatgaacggaaaagggacgaaaagcgcatttagcctcttttggggttgaaaagcgaattgtggccaaaattaagcgcacaaattgtaaaaatggatcagcaaatactgcccaaagtgggaaaaatgagcaatttacgacgagaaaatccgttgaagcaaatcaaaaggcaaagtgaagtcaaagcctaaagcggtataaatatgtcatttaaatgtcaatttgaaaatgcaaatcgtcttgcggaaatgccatccaaaaagaggcgcgttgggagtcgcttgaagaaatcccgacattttcaaatgc

SEQ ID NO: 16916 - DNA, 4628 bp, Heterodera glycines
  unsure (1)..(4628): unsure at all n locations
atttgaatttttatgttgggtggtcggtcccccgtcaccacagagcagttacatacatatcatctcaaatccccatcacttcacttcaattctttgatattttgatcaaacaaaacggggagggacaggggggccttaatgttcccattctctacaaattattacaattattatccagcaaaagtgaacataattaagtgcaatttggaatcaataaaaataaattgcataatttattttttaaaattttatttattttttaattcttcaaatttaatggagtaataaattcctcaaaatgagcaaaacctgcataaattggacattttctttaaatttaaattaaatatttaatttaccttttcaaaaaattattaatttaacaaaaatgattttttttttgtgtgaaaaaatgaaaaccaaattttttaaaatatatttggaattaatttaatcatttaatttttcaaacattattttgtgtacccattttgtttcaattttgtaaattttcttatcccatttttattggcctgtaaaacaaatccctggaaagccttgaaaaaatgagagaaaaaatttcccataaaatttgttgtggccaaatgtgggcgccttcgcctttttcgttctgtttggccaactgtacaaactcaacacacacacaaaccaccaaattgcacttcctgcagctccattttttcttcttcagacgcacatattttatttatttttttctccattccaaagggtccgtccaaatattattattttatgtgcaaaaattgcaaaaaaaaaattctataaaaattgggcattttttgttggggtctcaaaaatttaggaaattttaaattaaatttgctaaatatttttaaaaaaaatttacctgctccaccaaattttgtattaagggtttatggctccccttttttttttttaattttttgatatgttgagtttttggttttattttccttaaaattttcaattaatgatggagctaggctggcctaaaatttccaatttttccccactagactttttattttacatttttttaaaatttttaaagaaatttgtaaaaaaaaaaatctccatggctcatcaccaccaccctctgctggtgatccaaacagtccaatcaaatcccaatgagaacactgcccgaatttgtctgtcccccaacgacaatggccaaattgggtcggccacctgttccgaactgttccctgacgatgatcggacaacgggggccgaaagtgtggagccatttgagcccctgggcgattttccggtttacgaaaatttgcccgagactcaaacggacggcgagcaaattttgactgaaaaatctgttcgatatttggcttttgaaccaccaaaagcacaccaccaacagcaacaacaatcggtagcacttgcttctcgtcaattagcgatgctcaaagactgaaaatcccggggactgaaaaggacggaattgaaaattttaaaaatttagccaagtctcgcgaaaatgagctagagagaaagagagaatgttaaatttaattttttaataaatttttaaacgtaacataatttttttaagttagatatattttaaattcctaggattattttttttcgaattatttagccattgtttttaaaaataaatcaaatttatactttatttaaaagaagaattgtaattttattaactttaaaataataattttctttagtattttttcattatttcaaaaaacattaattaaatttttttaacaaaaaaatatttttttaatttttgaataaacaatattattatatttattattatttttatcacttttccaaaaataataattaatatctaaaaactactgtattttaatttttttttttttttaataattacaaaaataaaattaatttattaatatttaaaaataacaccttctctataataattttatttaaaaaaataataaaaaaacataaatttaattaattaattttttattctttatgtagcataagaccgtgccaaaagagcgcctacaacagcaagtccaagttgaagacaaagctgttcaagcagaacaaccacaacatcaccaacaacaacaaccgccgctagggcgacgccgcgactttttgttggtgccgcgcgattacggcgcggatttgcacgagtggtcatcaacgcgcagcgaccacgacgcgacagtcgcaatgccgcaaccgcaaatggagcagcaacaacgacagcatttggcaccatcggcagttgcggatggcacgttgtcgtccggcacttcgttggtgcgcaaatcaaatttttgtttattggacaaaatattaaattaatttgcttttgtgtatttccgccaattgggcgccaaattcaaatttgaaatgtttagccatcaccgccaaaatccatcctgcgccagccccaacagcgccaccagcagcaccagcaccaatacacgtttgaacggcatggcaatgagccgggccattattgggaggaccggggcgaaattggcataaccgtcgacgatgaggacgatgccgaagagcagcgggcactctacgaggccatggtaagaaaattctgtaggtcatattgttaccgtatatcggcaaacaaaatcccaaaaaaccattcgggtttgtgtagcattatgtaagccacactgttatcgtataatggcacgaaaaattcccgaaaaaattttttttaatttgtgtaaacatttcaattgtttggcattttgtctgcaaatttagcagcgcaatttggcacttcatcgtcagccctcgccccaccctgaattatatccatcggtgccgtttaacggcccattctttcgcctccacgaggtgagcccggacgggcgcgccacacgtccgctcaacgtcaacgcagtcccatctggcgccgcggtaaacgatgtgacacatttattggaaagggtcaaagtgcaatttgtaaatcgattaggaattgattaattgcctaattaggtgatagcccataatttggtcagcagttaaatgaaatctgattttcgcctgattgatcagttaaaagaaacaacaaaggatggagccgctgtntaattaattactaattaggcatctcacttgataagcacagtttgatcaattaaaagaaatctgatcactagtctgatcagtttattgattggcctgattagctaaataaaagactggtgattgatcacggaattatgacagtctaaggcaattcgatcttatcaaattctgaccaattcattggctaaagctgacctgtcctaatagaaaatggatttttgtatcaatggactaactcctttctgattgaaaattatgatcacttaggaaattccaaatcactgaccaggtcaataaaacttcggccggtcatcctccaacgtacgcgccccaatatcaaacgcgtccaccaatgtcacctcgccgagctgccgcttcaggccgaacttccaacggcggcggcggcggcattgtaaaccatgcaaatgcaatggcaccggctccccctccaccaccccctccgccgcccaccggatgggcgccaccgcgtcatcttcaagaacatgtaattaattgcaattagagagtccaatgtccattagtggtgatgcccaagagtctcgagagttccattaactcaaaaatggaaatttgtcggtttctaagtcttgggaaatttgtaaaaaatgtatttcctctaattgagctttaatggcagcagggggggggggtactataatagaggaaatacggtttttacaaaattttaaaaaatatccaataaaaaattatcgcccaaagatattttttcaaattgaacgaattttctaagcttcgaaaaaatcgatcgtttaaaaaaagtcagttctatcgatttcaaatcatagtcaacttgactgatggtatctatctgtatgtgagtgatgatctgatccgtttcatcctccgcaacaaattgttccgaattttgataatttttatgcttttcaaaaattgaatttctccccatttaagcggcatgccgacgacgacggcaaagcccagcaacaacagcagcagaggggggacgaggatggcggtctcgttgttgtgtggcctccatttccagcaactgatcaggaggaccagcatgacattgatcaagcagctgatcagcaacaacaaaatcgcccgcctaaggcagaggcgccgacgccgaaaaatgtgcggcgcgactttccggaagagtacgcgcgccaggaacgtatgcaagcggaagcggagcggcaacgggcggaacggaacgcgcggctgcgcgaaaaacaggtggcacattggctgggcgaaatgtatggactagctgatcaggaaaatggttatatattgattgatcagcgcccaatatttttcgttgatagaagaaagagaattgtctgtctgattaaattcaaagcagacttcaattgtgatcagtctcagtgagaattagatcagtccaggacagacctattgagggatcacactccaaggaatttgatctaagcagtccttgaaagtatttattgaaaagaatgantttaaccganttaaattca

SEQ ID NO: 16917 - DNA, 950 bp, Heterodera glycines
taccatttgaaagctcttgacgagctgaatccaaaaatcagaaatgaagtcgaaccgatcccatctgagcacctggactactaagtcccagttaaatctcgccccacctactggccgccgtagtcgagtgtgcggcggttttttagcgcaatactcgatattcaaggctaaacgattttcgtgcattatataaaaacttttttattttttttagtactgaagtgtccattttcatcaggactcagttgtcccagtgcttagatggcatcggttcgaatttatacctagttttttagacttagctgatcaagagctttcgaatgataccaaatttgtccgaatttgaccgttttaaagggtcaggggcccccatattcactcaatttttcgaattttgaaccggttttttggtttttccgcaactcgagacatatttttccatgcttagctcctcgagacgaatcgattggtatatcatttgacccttttttcacggggcgttcactatagtttatccaaaatttaaaaaaaaaacagaaagtgccaacaaaatgttattaaatccaccaaaattaacacaaaaattttttttaatgccattcaaatatataaaatttaatatttgcatggcaaaagtgagtttatggtcgtttcattcttctgccatctccaagcagaccacgaaattgttcgctaataatggccaacaagtcgacatggaccttacttaattcgtgattaaaacaaattggtgaatggatgaaggcatttattctaaatgtgtgatggcatttcatgtcaaaatgtgtcgtgtccttctcttctcttcctctccttttttctgtgctccctttttcgtttattcttccgtttctttccgttttttcttttcattcggaccccaaagttcgttctttttctctcccaattcatcagctgacattttggcg

SEQ ID NO: 16918 - DNA, 941 bp, Heterodera glycines
ttttcaccgtattttcgctaaagaagccatttttccgttgtccgtcccaaattgtcggcggcaacggatacttttcgcgcactttgtacttttccaatgggctaagtgagcttaaaaattcattttaaatttccaattttcaaattttatttgaaaatttctaatttttcttctccaattttcaccttttccccagcgtttgttcggcctccaaaaaatgaacgtcccaccaaattttctgcagttttggatgcgtttgtcgtgcgaatttgtgggttcccaaaaaggcgtacagatgattgaaattgcccttaattaaggcaaattaggggaactgggcgtccatttaatttaatcttagattataattcgttttatatttttaacacttgcacaaatgtacaccaatctcattgactatgtcttcttcaccgaatggcactaacccaaaagtctggggtttcctcggcccaggtccagcaggccatttttcgacaacctgtatttttgtccaggaaatccaggtccaacctaatatggaatccaggccatgttcaggctttttccaaaattctgagctctaattggggcgtatacagtaactttaatacttttttcggtaccgtatgcacccgattgtcttattaccgtatgtacgctgatcagagcgtgtgccgtgagcacagcttcgtgtattggaacattggacattgacagagagattttgttttgaaaattggaaaaatgttggccaacattgtccgatccctcatgctgttcatgcaactgaaagtaaaagaataataacgataactgatcaatgaacatttgaaattggccgattccttttcaccgtgggacatttgcgaactatttttgtaaaaaataaactgtttttgaggagtcacccccaactcatccatacccaactcatccataga

SEQ ID NO: 16919 - DNA, 1234 bp, Heterodera glycines
tgctcatcgtctgactgttccccaatttttccaccgcttttttttaactttttgctatggatggtatgggcctaccgatttaaatttaaataaaatttagatttttccgctggggagcggggaactttgctgttcgaaaacacaaatttgcaacttcttttagtctattttctgtggagcgatgccttccgtgaccaattccccgtgctttttgtctcttccgccgttttgtcaattctccaaaatggttccgacctgatgatccccggtattcgattgtttttttttgtggaatctaaagacaaatttcccctaattttatgcgttttgctcgaccctccgttcgccgacttcgaagcgaatgcgccgattgccattggaattatcggcggaaaaggcgacgaggtgggaaaatttccatttttttatgcaaaacaaggaaagtagttcgtccaattcagtacacgcaaaaaaagtaaaattctaaaaattcctaccggagttctgtttgtattcggatttgcccaacaattctttagttgcgttttggccctgtggcggttggacaatcgctgttttcagcggcggaaattcgtgcaaaacgacagataaatgagcggggaaaaggtttgagttgagcaaaattaaaaactcactaaaattaatattttcagcgattaaaattcttcacgtccatggcgattcactttggtttgttttttgcaggaaatatcctccttttttatgtttcacttatgcgaaaaattatttttttttgaaaaaggcataattttccatttttaaagggaattcggctctcgaaaaccaatccccaaaatggtcaccaaaattgacacgacagaaacttctgggcaaagtattagcaatcggcaaacgcacaatcagtacgaggtattaaattcgtgtaaaatctcaaatcttttgtatttttggttttaaacggtttaaggatgtccagcaacaacaacagtcatgttcatcgtcgccaacaaatttgacatcgcaaaatgaagatgaaactgtacttcgggagaatggagcaaatggtggcacaaaaatagcggagggggacgcgggacaggcggaaatggacgaattggtcggttttggttgttcatttttcaccgcattttcaaaaaatttacaatttcattacaaacattctgtttcgagcggggagggctatccccctcaaccttgctatgtgtggcat

SEQ ID NO: 16920 - DNA, 2073 bp, Heterodera glycines
  unsure (1)..(2073): unsure at all n locations
cgcttctcactcacaagcagcctttttagtgcgtttttcctaccaaattttctcccccccccccttacaattagttaatttttcaaataatctctcttattttaaccaggtgaatcacagccatcccctggtccaatctgcgcctgaacctgaacaaagaaaggatgctgcacaagcaggggttcgtcctcaattgaaattgtcggaatttccattttaaattcttttcatttagtcgtcggccgatgcccaccttccgtttctgaccatccgggagaatatgttctctttgacggaaagagttatgcccattttccgaccttacggttggttttacttttaaatagctgataatgaggggggggggggattttaaagtcttaaaatttagtttctttctttttgaaaggctttagcaagggcgacattgtggacctgaacaaaatccgggccgttctgcttgactatgcacagcaaaaggttggagaacctggaaaaaacgtcaaacatcttatttattgcttatttttttcccttagaatttatgccgtggcgatggcaaacaaattgaacttgacgactctctgcaaacagttgtgcaacactttgtgtacgagaagttcgatgtcaacaaattggtacagaaagtagcatctacaatgacccaggcgctgctgatccataccaaagaaggcaaaaaaattgtgcaccgtggcaccaaaatgtcccatattgaactgaaggtgggcgagggccaatgctgggaaaattgtcaaaaattacaatgacttctggttcaagctataaataagcactgtttcacttttggcagattgagagacgggctggcaacaaagtggtcactttggtctccaatttggcttcttttggcattgacgcgagcgcgttggacagcgaaatccgcggcaccggcacatcgattctcgcaacggcacccgcctgtgaaggaccccaactgttggtccaaggcaacgaggtgtattcgagaatagtgttgtgcttcgataagccatctttcccccttttcagattaaccgaattggtcgtcttctgaccgaatttgggttgcctaaaaaattcgtcaagggccttgaacaaggcataaaggagtcaaagaagaaaaaaaagtgatgaaaattaaaaaaaaagatttgttgacccaacacatttcatttttgtgccttttttttattatttttaaaaccatttgtcaatgtttggtcttcacttttgggtctcaatacggctttggtcatttaaatccaacttttcatttatatcacttcagatcacctgaaggagtggtcaggtcttattggtgtatttgacttttttgatcagaattgaaagattataactagggataagaatttaagtattacttttaagtaatttttcaacggtaggggtcagtttcggttttatgaaaccaatgaatttaaaatagtctttttttgtgtaatttgtggcgctgatcacaaatatgacctttgtttttcaaaattcagaaccccaaactcgaacgaaaattcggaattcataaattacaatgaagacatatttttaggggttttcgaggtggctgaaaatggatatggcatccgttttgccctagaaaatacccgaactcgaacaaaaaaatcgattttttctcaacaaacactcggatgtaatgacaactcgtaagaaatgtaactcgtataattgcttgaggttaagtttcgaatttttgttcgggttaaggatatgtaattcattgaaacggatgtcatataaagcctaaagaaacaaattttcatgatttattatcacaaaaatttgcaaaggtcccaccccctttggttttttaataaattcaagataggttggttaacagagaaaaaagttaggctctacttcagtttatgcgtccaatcgttttttatgcgtccaatcgacttttatgcgtccaatcacgttttatgcgtccaatcattttttatgtatcaaattatgtttatttgccanaaataatggttttatgctttcatgagtcaaaaagtttgccacact

SEQ ID NO: 16921 - DNA, 1689 bp, Heterodera glycines
acattgaagaaaaatcagtccatataataatataaatttcaatttggtattcccggcaaattttttggccttatcttcagatggcctttggatgcgcagcccgaccggtgccaagtgatcaggctaacattgtaatagctcaaatgggccatgtacgagcccagtgggtccgtctgttgttgtccaaatggaagcggtgacttcaaagcgggctcaagcgctccgctgcactgaataccgtcagcactttcacacacttcataggcactgcccgtggtcatgtcgttgttgtaccaaacctaaccatgatttcaagacaaatttatagggctttaaattaataatcatcattagggagaccaaaaatatgcaccaaaaattgtaaaatatgcgcataaaaagtgaaaaatatgcatataaattttcccaagttgagggtaaattttccaaaaaattcatcaattctttaatgtaaagctacatataaatcttaaatttaactaaatatatggaaaattatttagaaggaaaaataatttttaaaaggttacagttttattattatcgagaaaatataaaaatttgaagtttttaaaaaagttttcaggttttagaggtcaaaatgcccgctttaataaagggggtaaaagatttttataccgtatctttcctgaaatatctcatgaaggattagaattatatagaaatacggtaactatcactcacttcgtaacgatggtggaacagcgagtgttcatcattcagcaataatttagacggaagccttggaatgatgtcctccgaatgtaccactcgatatttgtggggtaactgtcgaaaggatttcggaaaattttttttttttcaaatttcaaaaaatgcctcagcaaaatttcattttttgaataattttatattcctggtataaattgtaccaacgaatcaaagtgacgcgcaaattcgaggttgccagtccttggctgaccaaagctgatgaagcgtatttgctcggctgttgtcatcccacttttggccacccacgcggcggccaatgccgccaaagaaccgcctaatgaatggccaaagatctgttggtcgatcaacggattttgtataaaaaaaattgggagacacttttcgtttttggaattttgtaaaatccgggcccacatttcagagaatgggttacttttctgttctggggcctcattttcaaggcaacggcgcgaacgccaatggaaaggataaaataaattaagaaatggacaatatttaaaatattgtggctttcatacatccacattaacccggcacgccacagacggaaaagtacctgagatggacacagggacgcccccccaggggggggggggggctactcgtggaacatactccataacggaactgagtaactttgtttttgaatgttttgtcggcagccatgtgtaagccgggaccaccaagaggccctgaaattgaacaatcactttgggtaggaacaaaaagaacacaccaacaggccgaccagtccgcgggtggttgtaggtggacgtcttgttgttgtgatcgataaagaatggcacaccttgctctgtgatacgcatttcccagccttccggcagcggagcatccgttaacctaaagacagtaatccatgtaatcataaatatatttgcgctaatcactctg

SEQ ID NO: 16922 - DNA, 1060 bp, Heterodera glycines
  unsure (1)..(1060): unsure at all n locations
aattcgatcaaattcaatcacaatcaaatcaatattttttattttaaatcaatgctgtggttttactntaatcaactcgcattggacttcatatcgtcggatgatcaatgcatcagcagcattattttccaggcaaatttgtgccttaatgaacacaattacagtatacccccaccccatctgccatatcgtaggcattttttttgtctcaatttatacccaaactgggattgtggaattagatcccggatatttttaattgatgggaattctgaaaattttctagagccctgaaacagaaacaatatctgcgcaggatttttgcaggaaccctggatactgtaactgtatttttgggggaaaactgcaggaacacgactcttttttccgctgttttttccttttcatcaccatttcaaattctgtttcagttccggcatttttcaaaattccgggctctaaaattttctatgctctccagcagtttcgtcgctgatgctgtgtcaattttttttaaatctaattcaaaaaaacgctcacttggtgcaagttttccgcatttgcggccgcaatgaatggcaatgccctgctgcgtgcaaattcgtccaaaaatccgaatttgctaggtggactaatgggacagttgtacgggtgccggatgcgctcctgtgagtttaacacacattatggtaattagtacggcatttttgggtgatgattcatgacggtctatttttccataattttgatattgctattttaaatcaaaaatcgacaccgtttgaagaagttttgtccccctttatttttcgtgggttaccaactgtaagagtgccaaaaaatattcaaatattcgttttttttaaatcactcttatccacctgctgggtacatttgctgccagaagctgtcagtgaccagccactctcacagactcggcccaacacacaccatatgaatagaaaacagtgaaatttgcgattgcgtattgtaattttggtgaatgagctccaaagggttcccgaagagggattatggaaaatgtgccactaatagtaca

SEQ ID NO: 16923 - DNA, 1420 bp, Heterodera glycines
agttagacggaaatgagtattttttttatcaaatggatctttatgctaattttcagcgcccaaacggggattttgttatgcctcgggccaaaattttcaaaaatttattcatcacaccgccttgaatttttatcattgctaattctcgaagcatttccactcacttttcttcgtcaacacaaatccaccgcacaattgctgcttgcaaattgcgtttaacatctgtgaacaaaaaaaaagagaagcatttgtcaatctagaacataaaagtttatactcgcccgccggtgggattcgaacccaagacctttccattccgtgcaattctctaacccactgagccacgggcgctcccttttagacattctcccatatcctttatctcactttctcccacacatcgcttcctatggcatcacaacaaaatggaaaaaattttcattccaagatgccaaataattttaaaaaattcgaatgccaaatttgaaaaaagaaaaatccgacaaaatactgaccattgtcagctttaaaccgcacagacggaaaccgcccgctccctccaacgcattgggggcggaagagagcagcaaaaggacgaacaaaaaggggagaaagcggaagcgcggactgccggactgtgaagcaatgcgtctgttgaagctgaaccagcaaggtgggagtttattgagagcgggaattgtgaagccgagatagaggagattaagaatttgtctatattacggtttgaaacaaagaattgtcccaagatccgagaccaataatttcacccgggagtcaaaaccgagaattgaacatgagatgaagaccgagaattgttccaaattactggatcaagaattggcgaatgatagcgagagcaagaattggcccaaaatctcgagatcaggacttgaaccgagtctgcgagagagagagaaagagagcgagagagatagagagagaaatagagagagagatagatagatagagagaaatagagagggggggggagagagagagagcgagagagagaaattgagccatagagagtcgagaccgagatgcaaaacccgagaatttttcgactaacgaactaacaaataagaccaaaaatctcgaattggactaaaaattacctgctgccgccgatggttgctgattgttgcgccgctattgtgccggtggtcctctgctgttgcccaacactgttcaatgccattgccatgtgttccagttcaatctaacaaaatgagtacggctggcggcggcacaaatcagcaaaaaatggaataaggagggctaaaagaattttttgtgtgtgtgacttttagtacagaaaattacaggttggctgtggcacaccaattaaaaaatgccaaaacgaaatgccaagattttctttcataaagtgcccttttca

SEQ ID NO: 16924 - DNA, 1664 bp, Heterodera glycines
ataaagtgccattttcacgcatacactcttacaaaacattatctgctttatttccacacccacgcaccaattcccacccccagcactcattaagctcacaatttaatggtgccacaatgccgacaaaaaaaaaattggtccaaaaaaaggccacggaaacgcactaccgtaatccttggtcctccgcccgcccgtccgggtctgtcacgcactccaccagtcacaatggcattttgcctgccggggtggcacacggaatgaatgcgtccccattgccccgccggggacacgaacaacacacctgttgctggcgcgttattaaaattgtgaaagtgtgtgaaatccgccgccgctcccatgggcggaaggggcgaaaaaatgagggtttgtttaactaagggtaaatgcatgtgtgtgcgtgcccccgggggataaaatgccgtccttcccccactgaactttttcccaggggcaataattaatttcatagaggaacaccaatgattatcataatgatgatgatgacgataattggtaatttgatggcgtaaaatatgaaagggattaagagggcaaaggaatgaatgggatggatgaaatcggatttataatgataattagccttaattaatgcaataaaaatttggataaacaccattggtcagcagttctaataggcattttgaaaaatggaagtatttaaatttatttgatagagtcataatttgaatttgctgtcgttgtcgtcgtcgacattttaaattataatgcacttttaaaacataaaaaatgaaaaaaaatacttcatttgaaaattgcctatttttttttgtcaccaatggacgccaccaaagacggcactttcgcttttaattgaattgatgccgtgggaaaataaacattttactcggctacttaaaagtaattagggaaaatgtgaacgggggggggggatttgtgtggcttttaaaaaggggagtattaagcaaaatgccaaaataaagctgatggcgatgaagatcatggtggtggcatttttgtgtttggaacgaaaataaacaaattgaaattggcatcggccacatgacaaaatgggaaaacagttgcagcagaataagccatcagcagaaaatgtcagtttactatttttggaagaaaaacatagaaaaatttttgaaattccattttcggtgagaaaatttttttctaaaattttgaacaattaaatgatggttggaattgacaaaaaaaaatacgtcaaagaggtaggcttcgtttatggaggaaaattgagaaaattttcaacaaaaattttgatgagaaaattttgtttaatgaagaaatttttttgatgaaaatgttaaagtttaaatttaaattaactttaaacagtataaaaaatgactacatatttttcaaaatgttgaaaatatgcaaccggaaaaattaggaatattaatttgcaatttttttttttgagattttcacccaaaaaatgccaattgatgccgattggcatcacaggaaaaaaaaattgaaatataatttattcattttgtaacatgtaatgtaaacatacttctttaagcgaacataattaaattgaaagcaagtgcaaaggtactgtaatatatggtaagggggctgtgttgttagcctttccg

SEQ ID NO: 16925 - DNA, 2800 bp, Heterodera glycines
  unsure (1)..(2800): unsure at all n locations
aaatttttttagttttcccccccaacgtaaaagaaaaaatttggggactccaattttattccaagacgccaaccccttcccccgatggggttggtgggggggggaggggcgtcaaaaattttgtattttgggggcacacaaattccgttgcccgttagctcggatcgggcaacctctctttcncaaggacgggtataccagttaacaagggacattagggggaaagttccattaaattcaagaacatttaaaaattttgtcatatgcaatgaaaatgattaaattttacccaaatggtttatatttttcgccggaatgaagttttgattaattttgatgaccatattttacttttcacaacacttcttgcgggcgcttttcgaagacttgcaaaacttgaaacataaactttcggcaaggccataaattttcaatctttaatcaataggaatttttgtgtaagtaggcatgacttaaattatgccatttctctgaaaaaattcaaatgattatgacaattacaaactgaataaaatttgttccttgtataataaataattggcataatttacaattttaaatgcatcggaatttaaataaaatagtataaatagcagttatataatcaagaacggattttcgcaaaacatgtagataaaatagcaaaaaaaaattccataaaaaatgagaattaaggacaaaactctcactcatgtacaaaagaataaaaaattattttaaagattattttggacaaaaaattttacaaaatcatgcattgaattattttaaaatattttacataattattcttatatatcaaatttttcttctttgaaaaacttatttcggatgcaaaggggaatcagagaacccgattatataaattttatcaatgaattgcttttaaaattacatttaaataataaataattaattttacatttagccaaggtattttatcgtaaatctaaataaaataaaaattaatagaatagataagtgtgaaatactgaatcagataaaatgacgcaaaaacaaacaacggctgtgtcaacatcaccgacaaatcggcggagaatcaacgagcactgagagccgtgcccgtctggtgaaactgccgcagtgaatgtaatgtaaaaaagagacattaaaaatattacaaaaaattagtttattaaaacttaaaaatttgttttttaaattattacttgttgcgtattaaatgttaatatcttctaaaaataagttgtttttttaaattgaatttgaaaaaaaaaactaaaataaaaatctgtatcatgtaatataaaaaatttgaattaaatattttagataacaaaaagataatggaaaatgaaaacaaagcgctaaattttattttataagaattacattgatatcattaaaaattaacatgtaaaatataaaagtagataaataagagaaaaataattcctttatcgccagaattttaaaaatgtaataaaataatttcatagaaaacagcagctggaggtggttggaaaagcagaaatgttcttggcagagtcttaactgtaattagtaaacgatgcatttgacaaaagaataattaaatacttattgaataaaacaaataaatggtgaattaataatatcaaggaaggaggccctccatacattaacacaaatccgagatttaacaaaaggtatctatttaaaaataacaatataaatgcgacttgcgcaattcataaatgcacaattaaaaaaatatataaacatattataaaaaatcattcattcaaattttttactcacaacgtaaattttgtttatcagataatatttaaaacataactaaaaaggaaacattaaaagataaattcagaaaacaaataatttatacaaatcataaaatttctaatagattaatctatctggcaagtaagaaaattatataactaacgtcctttcggaacaaggagttaaagtgataaagtaaataaattaacaaaacaaaatatcaaaaatggaacattttacacccgaataactcaaaatgtatttgatttgctattatgcggtcgaaaattataaagaataaatttttcttgcattttatgcataaaacaccggattttttccaacttttagcacatattttggtatttttaaaaatatttaattaattttttcaacgcaattttgattgagtattgaaacaaaaaagttgtgaataagtttaataataattaataaaatttcttgtaaatgacacaataaataataaaaaaagtaacttattttatacataattatagaaaaggaataaataaaaattatgatagaccctaaccttatcctgcattatgctttcttctcctttcaacacagtgatgaatctgataattatgttatttattttctaacttaattaattttctgaccgggaaagaggaggatgtaaattctgaaatgccagtcttgtgcaagatggtatccttcttgagcattattagtacttgtcaaatttgcaaggactgctgcatggtggttccattcaattattggaaacagtggttctccattgttcacaataacataagtcctttaaataacaaaatagaacgaaataattatttcttttgcctattaatcaacttccgaaaataatcaaaaattggttgcgaaattggatttggtacttgtcttagtgcattagagccatcattaacatgatgaactggcaacaatgcttaggagcaagtgatctcacatttattctcatttccatatcagctctagagtccccggt

SEQ ID NO: 16926 - DNA, 3387 bp, Heterodera glycines
gtagaattgtagattatattcattataatggtattttttgtaatcaatttaaataatcattttatttaaatgtttttaccattttttttaattcattcgttaaaatttctttgtattattaatctgaataattgtgattaatttttttaatatataagatacaatataatttttttaaatatcatcgcttggacaaattttgatttaagtttttatgttaaagggtaatatcaacaaaatgtactttattcaattttctaaaaaaaaattgtttttatttattattagcatgaatttttgttatttttttaaatcggttcgttcattggtctgttattagaaataatacatgtaaatgggtttttattattttcattttttagtttccgttttaaatttcatttttccaaaattaaaattctgtaaggaactcaattatttttatatctttttataatttcctttatatgttattaatttttgtagtataaataaatatttttcaataattttgaaaactcttctatccaaaagggaaattaaacccaaggacaaacactgaaaaacaggaggttttaccactttgcaacatatatctgtgtagttccataacagcaataaataaataattttttgtttttactccaaaatttctcctttcccgccaatttcatatttacgtctcaataaaattcccaatataaaatgccaatcacggatcaaaatcttggaaaaattgaaaaaatctgtgacccgtgatcacggcacccccaaacccccatgatttcaatgacctgtgatcacggccagccctgggccatgatattttctatgtttattttattccgtcctgccacaaatggctgctttatctgaattaattttatttgtttcaaatcgcacaaatttcattaaatatacatgtttaataaataaataattattttttttctttaaattacttttacgccgtccccccccccctggttccccaaaagattttggcaaaggtgcgccgcaaaaaagaggttttgaaaaacaaattttttttttgctttaaatgaatagaggaatatgtaaattttggtctccaacccacttggtttctttaaaaacttttggatatttttccagcgattaaattcagttttttgttaataaatttaaataaaaaaatcattcagaatttttttttataatcacggatcactgaaatcacggtgtttttgtgggctaaatatcccaattcatgcactcaataacaattgtccaattacacattgtaataacattatttgtctgttaattaaaaattaaaacacgaaaaaaacaaattaaaaataaaattaaattaataaatttagatttattatcaccataattttgataaagaaaggattttaggttttcatctacttttctaaattacaactatttaggtaccgattttactattttaagcaagtagaatccgttgtcatattaaaaattcaaaggtgataaaaagagtatatgaaatatattaatatctaaaatatattaattcaatttacttacatatgagattattaaaaacaaaataaaatataaatgtaaagatcggattagtagtgaatattaattaaaaaatgtgaataagttcaacggtgaagaaaaaaaaaattaaattaatcaaaataaaatctcagagaatagatttatcaataatgacggaaaaatttaatgttaaattaaattagaacatttattgaaagtgtaagagaatttttatggtgaaaaatgtaaaaaataaataaaccctatcaaatgatactctgatcaaagactggaaatcaaaatgtcctatgataaaggaaattacttatggaataattcaatgatatttaaaatactagaaatatatttattttgttgaagaagattctgttgaatagaaaactccctattatacttccttaaatactttatgcataattcatagtgacaatcaatcaaacacaaatatatagaaaatcatatcactgtctttttcactaataccaattcagctgtaattattcaatttttttatgaatattgataagaacaaataattatattatatttttattctcacaaaagaattggatataaaaaagagacaaaataaaataaaaaacactcattattctgttattgaaaatattatttatttgaaaacaaaattaaaatatattaacgaaaatataaaatctataattatagacttgacaatattggacaacaccaaacattataaaggagggagtgaccaagaaaaatataaaatattttttaatttaggaacaattaattaaaaatatttatatagaagtcatgaatcaatctgaattgaaacaattaatgtacacaatctaaaaacttaatgtaaacgtcaaaaggtaaacaaaggaaagaaataacattttcataaaattctatagtattttataatattattatcacaaagtttcataaagtaacggaaaaatacttaaaaacaataattaataacaatattttaaaaatacattataaaaaatgtaaatgaaaattaaaattcaaaaaccgtgcaaagaattatttttaattattaattatgcgaaagaaatacaattaaacaaaaattaagttaatgaagaatgatttattttaaatttattactacgctaaccagcttaattatgattggttcacaaagtttgatataatcagaacagataaccatttttaatagaatttttgaaattattcataatatttttgtaaaaattatgaacaatcaaaaaaacttaatgagcgaatagaaaaagcaatattttaatacaaaaaaaattcatttaaaactttccatttaaatatatacttattaatatttaaaatatttgtaatgtaaaaagtgcatgaatatttggtgaaaacaattattttgttaatttttggtgattaatgccatcattttaatcctaaaaatattttaaaacaatatttaattgaaaaaaataaaaattagcaccaatactttattaatcgtggttggccacttcacaaaagtgcaaatttgggcgcctcacaaaaaaagtgaaaaatcaaaaaccttattttttctatgatttttattaattttttaaattaaaacataatttaattaaattgtgcttaaatacacattattcttaaagttttttggatctcgaataaaataattaaaatttacctaatattaaataaatcatcagcaagattacttttaattttttaaatattcaatggcgcccaattacaaaataaagccaaaggtagtatttaagcatcaatttattaaatttaaaatatttaaatttaaaaaattgataaaaaatcatagga

SEQ ID NO: 16927 - DNA, 2730 bp, Heterodera glycines
tggctcatcatcggcaccaagctttcgatcagttcttcgttctcgtcgtgtttgtcgtgcacgtacggtgggcatgtccaaaagaacttcacttgctggaatcggcggcacaaattggcaatcatctcgtattgctccatcatcacttcaatggtttctccgcccaagagtgaatctcgtccgacaatgatcagtgcggccttcactttgctggagagcaccacgggcttcaggcttcgcactgtctccgccaatgttccattttttggcccgatcaccgccgtttgatccaagatttcggccaattggtgggctgtcgaatctccgattatgacacgtggcaaggcgatcagttttgtggccttgtgaatgattttggccctcaatttctccagcacccacggtgtctctcccatcgcttcttcccatttcttcttctcagaatcggccaaatgattgagtccgacgggttcgtccatgccgatttttttgaatccgctctcttccaaagcatgctttgccacggagcacttttcgaaccaacactccagcgccttcatttggtcttcttcagttgggcattgtcctgtcgccacatagtctccctttttggtcacgaacagactgagctcctcttttggcgctccttcaattatcgatttgacaaaacttcttgcggctgtcattgatttgacagtcccggccttcaaaaggaacaccgccaaaagtgcctgaagtggagtcttcactgtgattgaacccaattcagcatttccaagcgctgggtccagttctgcaacacggagaatggcacaaaactcgtgttcgccttgaccgacgtcacacttggcattccaaccgaacatgtcctctgcttcgccttcgttgtcaatttccatctctgaaaaagaaatttctcttgattgcgccgccttttccgtttttccaatcattccttcgccaccctttaaattagcaattgcccctaattgctcataatgggccatttgtccatctgattcacagacttcaaaactcgataaaatgctgacaattaatgattttaacgcatttttaaatgggtttttcccctttggaagtgttgaaatgtccgggattcctggaggaattcgaattagacgctcaatcggaacttttatgtgctcagcatttctgttgtcaattgggactaaaaatgccgacgattcgttaatttctaggataagataaggcccgaaatgagaccacaacaatttcttgtgccgagatcggcgattcagtccgggaaaggcaaccattacgcgttgccccgcttcaaatttgttagccgtcactttcggctgggaatcgtaccaaattttacttctcattctttcttcctcagaattttccctcgcctcgttcagcatattcaacacattttcacgaaataattggaggtatgtatcgctgtcaattgtgtatgctgggttgacttgtaagggcacttccccatccatcggaaatcgagcgattttcccaaaaatcagggaaaatggcgaaaatttcgtcgttttagacggtgtaatgttgtaagcgaacacaatgtacggcaaacgttcatcccatgtccagcagcttgccgtcgactttttaagcatagcgattattattcggtttactctctcaacaagcccgttcgcctgggggtcatacccagctgtgagagatcgttcaattccaaaagttttgacgatttcttcaatcgttgaattgacaaattcctttcctttgtcagaatggatttttttcggtgtgccgtatatcaaaatagctttctcaaccaacactttcgcaactgcttcggctgacttatttcggatgggctccgcgattaaatatttcgaaaaatggtcgaccatcacacagatatatttgaactctgacttactggggccaacgtccaaaatgtcgatgcatagcaattcgaatggttctgacgttctaacgactttcagtggaggttcatttgctctcgcctcctttgtatgagcacaaattcggcagtgttgatgaattttcatgcaatctttcagcatatttggccagaaatactgttctgccaattgaagaaagagttttttggcactcatgtgccctgcgcattttccttcatgtcgttgctttaccaaattttcacgaaattcggatgggacgaaaagtcgcaatttgccattatcttcacataaataaagcagtccgtcgagcagcgtgtatttgtggcacgtttccttcaaattttgcgcctgtcttggatcgtccgggaagatttttttctttaaaaattcaagtatgtgcttcatttcactttattcggatgctcgactccacttttctcttttctcctcaattgacgcttcaacttcttccgctgtcagtaattttatcattccaattaatgctttatcttcctccaggagcggttcggcgattccttcgttgtttagttgaaatgatcgcgataaaagggtctgcaatcacattcatttttcctgggtggtattctactttccagataaatctcgaattcaattccatgagccatttgtcgactcgcgcatttccagtctcctcccttgcttttgaacatggggcagaggagaattggtgatcccgtgaggactcttcgtcggaacattgttataaaatgagcaaatttctttggtccgaattccctgctaacgcttctaa

SEQ ID NO: 16928 - DNA, 1907 bp, Heterodera glycines
tttcgcctactaacccaaaaacattcataacgcctactaccttaaaatatatattttgacaacgagtttcaccaaaatatatattctaaattggtttatatttagctattttattataataattaaatttaacctaaaaatacacgggagtaaatagatatttattaaattccaaagaaaaaataaaagtaaaaggttaaaaatcataaaagtaaacattgttaaaatcataaattcaatttccatcggtatcatcagtttcttccttactatcttcatttccacggacgtgaagtccctccacaaagccttgcattacgaggccgatcagatacaaggcgttcgtcaatccttcttcagattcaaagtcggcctcgtcaaggatccgcaccacactttgttctttgatgatgtaccgttgcggtcgttttctgctcttctggagacgttctgctcgtccaatgtccagttgcttgtcgatgtccttgatgaatgctgctatgaaatcactcagtgacggatgatgattaagttcacgctaaattaacaaaaaagtgtcttccaacggacaaatttttactgcaaattgtccatgcgcggcttccatgccgttgttcgttcgctcaattgccatttgagccctggtgtacacattccaaaacgagatcgggaagcgtggaggacagacgatgtcttgttcccagcgtagaataagctgcaagctgctttcttcggacaatgtaatcgtcggagttgatggttgtggtgaatgcagtccgaattgtattcgtccactgcctgtcattatggacgcctgggacacactgaacgctaaattatttaaaattgtattaattaccatgaaaatagcatatgcatttacgagttgtgctttgagtgcgacgtagaaagaagcgtccgacatcagcattgggtccaaatgcctccgctccacggtcaatctcgaattgagttgtgccaatgtaggttttgccaaaatacgccagccatccttgaactccaagcggtgccgcgttgacaataattgaaaaagcatgccaaacgtaaactggcggaatgagtgccaaagaaagaactgatatcttttctgtttttgataaatcgaaagcctgtaaagaaataaaaatcaaaaaaactattaacaccttgataccaaagacaaagagctccccggattgtttctccacgtttgaattgaacgggctcacaattttcttcgtcatcactcgaagcgacgtcaaaattgttcctttcaatttgttgttctgcgtctgtcctctcaacattcagtacgctgtcttcatttgtagcaatgcgaggcttttttactcgcttttgcagactctcaagtatttcgcgaacagttggcatttcttattagaatctgaaatttctgtttttgaagaaaatttgaaatgacataaaaatgaaatgaatgatttatttgatgcaaaaacattatagatattgtatattctctctttttattttctctttggcattatgtatttccaataggcgaaatgaatgtttttggtttggtaggcgaaatgtcagtaggcaaaatgaatagtaggcgaaatgtcatcgtgccactattttaatgtccctagcacattaaaaaatagaaattcgcaaattctaataattttggttgtaaatgtaaaatcactctagacatttagaatcaattgaaaaatgaataattttagcattttgattggaatcagttgtcaatggcctgagttataacgtgataaaaatttgagatacacaacttttttcatatatatcgaattgcttagcatttgcccttagaaaaagattctccttttcaaaatcttttaataaataccaaattgttcagtttagttgggaatgaagcg

SEQ ID NO: 16929 - DNA, 2482 bp, Heterodera glycines
  unsure (1)..(2482): unsure at all n locations
attttctctccaaattnattaaaattttccatataataaaattcatataatcttctaantttatactccaaaaacaacccaaaattcaaaaaatttctttaatcctattaaatttacaaaaactttcttatantcattttaaaaatttatttattttaaattataaacccaaatatactattaaccnttttattacactatntttcttacaatncaacattccaacctataanttnnaaaatccatataanctatataccattccatacaccnacatccacttatattcttaatttttaattttaacnattcattccacctacttcaaaaattacatnacctctaaaatcaaaaatttagctgtgttttcacataaaattggtggctcattttctcaaattcctaattttgggggtcctggttcgaatccaacgtaaaaataaataaatttaattaaatttttaaccaattaaagattttaaaaatacatttttaaatatgaaaaatgcattaaaattatttgttgaaaataaatgtgttctgtcattgtaaagtggagaaaaattgatataaagtgaaaaaaagttgaaaatgagccctgaagcataaattttcaaatttcgaggccctgtaacttttgaagcaggcggaatgcaccgctaaaattaaaaattcacaatacaagtcgaccccgctctatccaatggtatatagcttatatgcattttcccactcacagctcggaatgttcccttgttaggtgtcaaaaataaattattaattaaatttaataaagaatttttattagaaaaataaaaattattagggacaaacctttcttctcggtctattggcggcgacttgggcatatgtcaactgaaaaatctaaaaaaaacaataaaaaaacggcattttatgatttaatgggggatgtaagccaaccccattttacagtcaacaacatttttgggggtcggtcaatacaagagttttgggtattcgaaaacttaggaaaataaactctttcagaatgttttgaaagtacggtttccttctattgtaaaaaaacaacggccagtttaatttctaaataaatcctattgttttagatttatttttcagaataatttatttaattttaaacttatttaaaactaacgaaatatggaaataagttattgtccactgtcaaacagacccacccaccggtttaacgggcggcgatgagcagtggtcgtcgttgtcaatgtgttcgctggtgcccggccgttgctccgtcgttgttgagcattccatcacggagttggaaggcggcgagcaggagccgaagttggcggaggaaagtttcccttcctcttccgtcgtgtgcgaagaaagcgccttggcctcctcaattggttgtcctcgaaagcgatagtgaccgaactcgggctccttcttcgcgtcgtaagtgtcacggcctcaaaaagacgcactgcaaaaaaggcaccgtaaacttaaaaacgtacaatgctctgccaagtcgagcagcaggaaacactcggacccgcaagacagacgtatcggcaccaagtgagggttgcagtccagcctgaacttgtcctgaaccaacttcgacacttgcgacggcagagccattcgcgtcgaactcggctccatgtcagtccttatgcaaattgttgatgacttcaaaatgcgatgggcgcataacagtggaggcgccgacctgaacatctgctggaacgcgttcgcatccgctggcacaacgaacatcggccgtattttaaactgaaaaagacaacaattggtcaagtcggcaatgcttgctccccaccttataatgatttgtaaaagtgtccacaaattggttatcaaatgcttcagtcggaataattagccgtgttggttcgggcgacgcttcgaattccttctcatagctttgaagcggtacacaatacccaactagccgccttctaaaagtgtttagcttcaaaatactgcaaaacggcaacagtacgttattccgacgtcaatctcgtcttggatgcaaaacagccggacatcgtggaatatttggctggtaatccggtcagtatcaattatcgcataagtgacattcataatttccgtgtcgcaatgcgtagtttcagttgtgttcgtgaaggatgtgcagagataataagactgaaatttggaaggtttcattggctaagttttatgatgttttagaaattcataaattaaataatcataattttgtacaaattttttggaaagaaaaataaaatcaatttgcagcattttatttttagatgctcaataacccaagcccgaagtctaacaagttttgtagtggtcaaaaaaaaaaaagattttttttctgatttcaggagactgaccaaactttgttcagtttttgttattcatgtagaatttttaaattcagaattcagtgttcagaccgtatttagggggggggggg

SEQ ID NO: 16930 - DNA, 756 bp, Heterodera glycines
cggaattcagtgcccctaaaaactctaaaaaaattcggaaatcggaattccgttctcacgtagtatgtacataccacaacaaccattcgcgtgacaatagaactgataaatgctgaccacttcttctgatgttagcacgccgagcggaactgtacaaatttttttttttttgaaagctcgagattttcaaggactcttagaaaccaaaaatcaatttttcaatccacactaaaaaccgcaaaatttcaaatgatatcgaagagattaaaaaaggggaagaataaatgtgaattaaaaaaaaacaacttttttaaagaaaaaacattgtaatattgcttaaattgttgctggcaatattcaaccattttataaaaagaaatcaaaattattttcttttatataaaaaaataaaaagtttttccaataattgttaactatttttttacaaatttttgttgaaaattcctcttttgagatgagcgggaatcgaattttgaacagtgctgggccgagcatggcacgacgattctctgctgagcaatttttggcattttgacagcatttggcgtcagcccaacgaagtgccgaaaaacgaattaaaatttaattataataaaaaacaaaatatttttaattatattaattattactgctttccaaattgaaatttctcctctgatttgcaactgatcacgctccaaaattttgcacaataatttttgatcaatttgcaaaaattcctccgatttgatcaaa

SEQ ID NO: 16931 - DNA, 2815 bp, Heterodera glycines
  unsure (1)..(2815): unsure at all n locations
aggtcnncctttttcgatcagaaatgcgtccatgagtcgggaatggcattggcacaacagcaggcatggagttgctaagctctaaaacatttggaagtcggaattcagttccctcaaaaaattctgaaaactgagtcacaagcccttaaaaaatttggaagtcggagtcggaatcagtgcccctaaaaactctaaaaaaaaattcggaaatcggaattccgttctcatgtagtatgcacataccacaacaaccattcgcgtgacaatagaactgataaatgctgaccacttcttctgatgttagcacgccgagcggaactgtacaaaagaatgaatcttagagactttcgctgactctctcttttaaatcaacagtcaaatttaaaaaatattttccatgattaaaaatcgcaaaattcaattctaaaaaatggggtagaaacaataatttctatgaaaaaaagttttgttttgaaaaataaatttaaaacggttagtggcatatttaaacattttttttataaaaaaaaaattcaaaaatgggttcgtttgtttttttataataattttaaaaaatttcttattaattaattagcaatttacaaatttttgttgaaaattcctcttttgagatgagcgggaagcgaattttgaacagtgctggaccgagcattgcacgacgattctctgctgagcaatttttggcattttgacagcatttggcgtcagcccaacggagtgccgaaaaacgaaattgtaatattagaaagcaataattattcttaaattataatttttattattactgctttccaaattgaaatttctcctctgatttgcaactgatcacgctccaaaattttgcacaataatttttgatcaatttgcaaaaattcctccgatttgatcaaagtgtcggcatatttatcaatatatgcgaaacaaggttgagtgttgatcatctgaattaacaaattattaaactaaaaaaagtatccttgtaaacaagggctttcatggcaaggatttaaattctaaaaatcagtccaaaataaatgggaaatttggctctgaaatgccaaataaaaataaaacgaaaattaaattaaaaattgtttcttaaaaataagtttcaagtaccgataaaatcctaaaataatcaaaataaaatgtccttatgagcatataatgaattaatttaaatggctggtccacaatcaggacgttgctggggttttcatctttttcccccgaccctgaaattatcattcccgaatcccccgactttcgaggacacaaatcccaattttaattaaataataaattacttttaaaaaatatataaataaaaattctcgccttattcttgctgtttccttgcccatatgataaatgagcatctgccaaattttctacgctcgacaaacgcttgaaaaattttgccaaataatccgatttggtcatttcatttttgtggacattgccagagactgtaaaaataataattttatttttaaagtatttaaatttttatcaaaaattaaaaaaatatagaaaaattgtataatttttcttgtcttaattttggcattttcaaaagaatcttacagtactaccaaatttttctaccgttctcatcttgcgaaggcatcttttgcacccattccatttccatacttctcaaacattgcaattcttcaactgctgatggtggtgtcacattttcaaatgttcctaaaatattatttctaaccattggaaaaaaacaaaacaaataaataaattttatttaagttttggcgctatattttatcaaaaagtaaaaacaaaaggggagacccttttggtttgcaaaattttttaatatatagtcatgaaaatttattccctnggggttcttggggtccataacctcgaattagatgtcagattcgtgatcagcgacctctaaaatcccggataacataattttcatggttttttatcataaaaaaattttgaaaaacaaaagggtccctccccccttttgtttgtgataaaattcaaaaactgccgcttttcatatagcgcctaagtttttatttctttttcaattaccctgatcagctgtaaattcatcatttgttgaatcacgagaaaaagacatatttttttatttcctataaaaagatcattaataaaaaaataaataaattttcctaaaaaaatttctttccatacaaagaatttgtcgctatatggaaagtcaccacttttgaattttatcaaaaagtaaagggaggggggggccttttgttttgcaaaatttttttgtgataaaaaaccatgaaaattatgttatccgggcttttagaggttgctgatcacgaatctgacatctaattcgagatcatggaccccaaaaacccccattgaacaaaaatggtgactttccatatagcgccaagaattttctaataaattgcataaggttgccaaaaattatagttcatatcggcacaatcgaaccaattgcgaatagaattttcaaaaaatttatatcaaaggttccaaatttaaccatttcgtaattttaaaaaagttgtcaaattagaataaaaaaggtatctcgactactcttttcgtaccgccgagaatagttaaatttttcaaccatttttggacaaaaactgttaaaaagttttgtttaaaattgtctcaaaaatatttatgtatttaaatcaaaaacaatttactaataaatgagcaaattttctttatgcaatttttaaaaaaaatgggaaaaaatggattggaataaatggagattaaatga

SEQ ID NO: 16932 - DNA, 2437 bp, Heterodera glycines
tgatactcctcagcgcaagacacttctggcaattcttccaagggaagagagaagtgtctcccgggctgtttgtgatcaacacatcgtttggcccgctgataaatggcgagtccaacattggaccgccgaactcaaatcaaaaagttttctcaatgatggccatccacagcactaatctggaacaaatgccaaccatcaatgaggttgagcatttcttcaacctcgaatccttggggatccaggatgatcctgcccaggatgggctgtcatcggtgctaaccaagctccgacattctccagaaattctggagaagtacgatgccaccatccgcgatcaactgcaacagggcatcatcgagaaggcccaaagggctcctggacagcttgagcacttcctccctcaccatggagtgctcaccaaaaagctacgcgtcgtttatgacgcgagtgctcacacacgcggaacaccaagcctcaacagctgcctcttccgaggcccagtgcttctgccagatttggcaggcatgcttcttcggttccgttgcccgacttttccacttctcgcggacattcaagccgcatttctccaaatttcattggagccggaagaccgggaggtcacgaagttcctttggctaaaggacacttcaaagggactcccgacaacttggcaatatttagattttgccgagttgcgttcggggtcgacagctcgccattcattttggcggcgacactccgccatcacttgcaacacttcgactccccactgtccagggagatttcggagtccatttatgtggataatgtactcctcgagtgcgagactgtacaggaggccttggaaaaatacaaattttccaaggacatcctccaacaaggatgcttcaacctgagggaattcatctctaattcaaaagaggtgatgaaacaaatccctcaggaggatcagctggataagccgaaggccaaagtccttggccttttttgggacaccgagaaagacgagatcgtcttcaaatttccaacaactgatccattgaggccagtcacacgaagactggtcctcagccatctcgcatcgctctttgaccccttgggggtccttgggccatgcattttgccagctaaacgcctcttccaagaactttggaaggagggccactcttgggatgatgccctctcagaagaggactcaatccgctggaattccatccaaagacaatggaaagacgaggaaatcagagttcctcgccgagcaatgctcaatgacacacagtcaattgagctccacgcttttgtggacgcatcggtccactttattgaaaggctgaaagaaatccgagaatgtctcggatgtacctttcatttcgtccgtactggggacaacccagcggacctcgcaacacgcggagcaactccttcggagctccgcaaccatcatctctggtggaaaggtccaccttggctcgcacaagcgagtcaccattggcccagcgaactctgttttcaagtaacagagtcggatcaacagccagactcaacggagaatgttggtccgagtggtgcgtttctcgcacacactcactcaaaccagccaaatgagcaggtcttaattgacccctcacgcttcagctcatggaaacgccttatgcgaacaacaatgttcgtattaagattcctcgccttaatgtttaaaaggggcgaggaaacggttgcttcactcgcgaagcacagaaaggaaattcgccagatttccaagtctggggacttcaaggcggaagacttcgcactcgcggagcgagttctcatccgcctagaccagatggatgacgcttaagaattccagcactttaaaacagtgactggagacgacggaattctccgtctgaaaaccagactggagatgagtgagaagccgtacagcttctctcatccattcttctcgccaagcattccgctttggcaaagctgatcattttggatcggcaccaaaaaaggcatcaccttggagtggacaccactctgacagaattcttgagtgaattctggatgccgagtgcccgtttaaatgttaaacggactcttcgggactgtctccattgtcgccgaatgaatgcacaacagtttgcattaccgacacgctccatttcagtcgattggaattgattttctcgggtttttgaggtgtttgtcattcctttataatttactaatttaatatatttttgttttcaaaaattagcgaattactatttttatcacataacattaattaaattgcaaaagaaatagcaaaaaattttcacatttgctaagtttatttttaaattgttttctatgtgatttgttgaaattttatttttcgaaattaagttagaatgcatttttttataataacgatttattgcattttttaaataataatatatttcca

SEQ ID NO: 16933 - DNA, 1302 bp, Heterodera glycines
taaaaagggacggacagtggggaaaatgatattttaactctttattattaagggaaggggaaaacggagaaaaagagacaaaccaccaaaaggacgaggcacaacaaatcataaaacagttccttatgaataatttgataagagattaattaccccccccccattttaatgggaccttttgcatttcaaaggaattaattagtcgacgggaaacttccattgaaaaatgaaaaaaaaacggagagagaggggggagggaaatgccttttgtgatttattaagaaaaaatagcaattttaatggttggtgggtaaaaagggaatgaacgcctgaagcaaaaaagaagcgatgttgtgatttatgtggcttaaaagtgtgaaaaagtgagccttcgtcacattgttcgccccatcaatgcttttatggtggttttggatggaaaataattgtcttttggtggatttgctgatcaacaacatcctcccccatccgttccccccccctccatttattttgcatcttcagcagaacagtccaattcctcctcctctcttcttccccccccccccccccgccgctgtcgcagtgacacggcgtcggtgtcggagtgaccttcgtcctcccctccgtcccctcattctcttcgctctgtccgcctttaagctcttaaaaaatgctctttccccagggcattggggggggggggagggagggaacgttggcgtcgtcgctattcgttgacctttgtggaagggtaatgggaaaattgctggaggaggatggggcgggggacgggggggggggaggttatgtcatcaacaaatcgaaaatagcagcaaagggacggaggaggggggaaaagagtcactcaatgggcggacgacgagggggtaaaaaaacgcaaattgggaggccaatgccaaaaacggggcgcgcaatttcagtgtgaagtcgcttcttcgaaattgccgctcttccgaagaccttcgcttctctgctgacaatgaaaggggaacgatggttggctcagcagtgggcagcagttccgaagatgacctcagaatgtggaagaaacagttgcgcagcagaggctagacaatggacgggaattgaaagaatcgcctaatttacatttattattcgtcaggcgacagagtcctttttcgcccgtcaagaaaaactgtacgtttgggatattttaattttgagattgtcagactccttcagctgttttctggcgtattcggaaatgaaaaaggggcaaagaaatattttccccgttttggtcagcctgagcgggag

SEQ ID NO: 16934 - DNA, 2579 bp, Heterodera glycines
tccttttaagcctcactcccctccaactgacaaatgagcaacaaccagataaagctaaagacaaaaagtcactgctatacacaccgacagctaataaatttttttgctcttttttgtcatttaaaacgttttcaaaattataaagcaatatttcgcggctgtagcacagaattgtgcccggtaaaaactgcccagagttttaatcaatctctaatggactctaatcattagggctggtaaaaatatggatataaagtcgcgaaatatggccataaaatatggaccaaaaatcgcaaaatatggacataaaattgcgaaaatctcaaaatatggacataaatggcaaaaacgtcaaaatatgggcataaatttttcaaaattgagtgtaaaatttcttcaaatttattggttgaaattgcatatgagatatatttccaaattttttgactcggtaaggcgctttgacaaagacggatttcgttttgcaattagtcggtcaacattcggaaattggtctcgaattttttcggcaattctgtgcaatcattttagaagaaaaaaaacatgaaagctaaaatttattaatttttttagcgcaaaatcaaccacaaaagcgaaattttcgctttttttgcttatttttgacataaatttattaatttttaagaacatttaaatttattcaatattctcgagaaattttggcgaaaaaatgattttttgaaaaatttttcggtttttgggctcaaaaaggctaatttagctgctgggggccgttctaatagaggttttttgaaaaatgccaaaatatggataaaaatgccaaaatatggaaaaatatggaaatatggacatgaatcgcgaaatatggaaaaatatggatatagaaatccattctagaagcttcaaaccaagcttaaaacatgtttttcgtgcgtttcaggccttccacagtccaggaaaaaaaatatggatttccatataattcccagccctactaatcatcataaaacgaaaaatcaaaaaacagtttaaatcacgaaattgcatcaaaaatcagccaaaaaccttttaaataaaatttcggacgaaattttgttcgctactatttttgccattgtttcagcattatttggttccttttagctttttagttaatcttgggattttttgtcactaaaaatccgcgccctattcataaatactaatccatggggaggatttgaaggcaaaaacaggtaggtcctttatgataacatggaatttctatgatttatgcacgaccgatattgccattttattaatatatcaaatgtgtatatatgaatacaacgacgatgaatatgaatgagatttcacaaatatcgaataagcgaagcacaatatattaatgggcatacaacatatatatgttcagatcacataaggaaggatcactgttcacaaggggaacatttaggaagcattggaacagacaaaacacagcaatcggaagggacgggaatgatcgaagggatatgtgtgggtgtcgcgagacgtcgtcgtcgaacacagtcatttgcacgcatcacggcctggctattgctctgcttggctcgtctccgctgcgctctgttctcccagggcttcgtccacggtggatgcatcggtggtgtccttcttcttgcccttcttgtccttcttcccgtgcttgtccttcttgcccgctttgctgtcgtcgctcttccccgactccttggatttgtgtttgtccttgcgcttctcctcctttttgtccgccgctggtgctgctgctgcgccttcgcccttcttgtccttcttcttgtgcttgtcgcccttgctgccagccttcttctcctcctcgccggcggtcgtcgcttcttcgcctccttccggcttgggcttctcctcgtcgtcgctcttcggttggtcgagcatcgggccaaggtacgtcttccaacagtactgaaagggacaaaaatgttatgaaatgcaatttgaaaaaaatgaagaaagcgcagcattacaattcccgctccgaaggcagcagcagcgaggaataggtacgtggccattgcgttgcgttgggcactgaagcggttcggtggttggagtgtggtgacagaagaagtagaaatgtgcagcggagggaaagacggctccttttatacacatccgattctgctggaaggaattgaaaaaaattgagtataaaagaggggcggaaaatgccaaataaccaatacaatctacctatgtggaataaaaacagcttgccagactaaaacgatccccacccgaattttagtttttggtacaggagctcattttccggacgctgtgtataatgagtagggcgtgaattttagtgaaaaaaaatccccgaaatagttaactaaaataggggtccgcatcgttttggcgccagggtcgttttggcgccgacgttttggcgccgacgttttggcgccgagctataaaaaaaaaaaaaaaaaaccccaaatttaaaattttgtaaaacacaaaaaaacatattttttccgaaggaaaattgccgatggctggttgccccccctttt

SEQ ID NO: 16935 - DNA, 1730 bp, Heterodera glycines
atacggtacttaatccgtatcggtgtcaagtacgtaatacttatacttatccgtattttcgcaaaattccgatctctaaatcttagggcaatcgaatgatattaattaagtttatattaaaaactcggcgttatttttttgggtcggggtcacttcggcgcggaccatttcggcgccgcaaattttgaaatgctataacttttttatttgtcaattaactttagccaatctggcatcatttgaaagctctatgtgtgctctatattaacatgtcaaaatagaaatgaatgattcaaaattaaaaaaagttatggcacgctgcgccgaaaaagccagaaaaagtcaatttttgaggttttttggccataacttttttgtaaactgacgaaattttttgaaattttgtaggttactagagaatcacaagagctatcatgataacaaaaatatttaatttggttgataatgaaaaaagttgtttgcaactgcgccaaaaaggccggcgccgaagtgggcggttcccattttttggggtccccgactaatattttaacaaaagatttattaagtatattaaaattttaagtttcagattatcgaaaataaatttaaagtgaatgagaatcgccgggaaattgaggtacagtatatgttttggtacatatatataattttgatcagaaaaatttggccaaatttgcaaaaaacacaatgtttcttttgaaagaaaaaattttttaagcaaaattataagaatttgacgttctttcaaatttttaaaactaattctaagcaaaatttttttaataatttgaaaccaacaatttttacaggcgattatcagcgagacgaaaagcgtaatgccttttgtaattggtggaagagaatgaggaagaggaggaggaggaaagagaaagaatttaagggaatgaggaaaatgaagaaagagaagaattggcggaagagaatgaggaaggaagagaagaattggtggaagagaatgaggaagaggaggaggaggaaagagaaggaatttaagggaatgaggaaaatgaagaaagagaagaattggcggaagagaatgaggaaggaagagaagaattggtggaagagaatgaggaagaggaggaggaggaaagagaaggaatttaagggaatgaggaaaatgaagaaagagaagaattggcggaagagaatgaggaaggaagagaagaattggtggaagagaatgaggaagaggaggaggaggaaagagaaggaatttaagggaatgaggaaaatgaagaaagagaagaattggcggaagagaatgaggaaggaagagaagaattggtggaagagaatgaggaagaggaggaggaggaaagagaaggaatttaagggaatgaggaaaatgaagaaagagaagaattggcggaagagaatgaggaaggaagagaagaattggtggaagagaatgaggaagaggaggaggaggaaagagaaggaatttaagggaatgaggaaaatgaagaaagagaagaattggcggaagagaattaggaaggaagagaagaattggtggaagagaatgaggaagaggaggaggaggaaagagaaagaatttaagggaatgaggaaaatgaagaaagagaagaaattggcggaagagaatgaggaaggaagagaagaattggtggaagagaatgaggaagaggaggaggaggaaagagaggaatttaagggaatga

SEQ ID NO: 16936 - DNA, 1071 bp, Heterodera glycines
gaaggaagagaagaattggcggaagagaatgaggaagagaagaattggcgaaagagaatgtggaagaggaaggaagagaagaattggcggaagagaatgaggaggagaaggagagaagagaaggaatttgccagaaaacgaagaagaattatttggtaaacgaatgtataattccttggattacgcctcttttccaagttttagtgtatttttaaagtttattttaaaatttattattattattttcttaacagtgcgatgtttgtggaaagagatttgcgtttgcatcagttctatggcagcatcgccatgtccacacggcgaagaaaaattttttggtgaattacaaaacttaattttatattattgtattttttaaatttattattaatttaattttttgaattttattacaatggaccggatttaaatggatttctattttttcatacttatttcgacctaaaaagcatgtaaatcgtatttttagcttggtttgatcctttttatttccacatttttaatccatatttcgacattttcacaaagatggaaaacttttggaaaatatttccctaaaatcgaaaaattttgaaaaaataccaaaaattgtacaaaaaaaaattttaatgtgaaaaattcgcctaaaatgattttgcacatataaatccgataccaatttattacagtgcgatgtttgtggaatgagctttacgcaggcaccaattctatggaatcatcgccaactccacacggagacgaaggcgtatatggtgagaaaaaaaaataaaattaaaattttgggattttatttccattttctttaaacagtgcgtttgtggcgataaatttaagaccgcacggaatttggccagccacagaaaaaggtgcaagaatttgctcaattgggtgtgattaagaaaattagtttgagataaaaaggattatcttttgtcgtttgtttgtttgtctatgcccttcattttccttatgctatttttatttttctgtttctctgtctctcttatcatcgaattctctctctcccctcacagttttcttccaatttta

SEQ ID NO: 16937 - DNA, 2382 bp, Heterodera glycines
atatttagaataaacttttttttggaagataaaaattaatttaatttaatgcatattataaatttagaatttaaccaaaatagtgatggtaaaaaaattgattttaagaaaaaattttatattttatgcagttgtaaaagaattttaattaataatgagtcgtaaattattttttgtgtaatatagctaaaaatcaattaattatttcaaaggcggaacaatgtttggtgagatgcttttacaattatttagtatggttaagtattatgataaattactaagattttctggtagtgtatgtatggtatctgtattaattgtaattttagacctaattgttccttaattttttaccaattgaagattttatgcagaaagaagggttataatgaaattatatctatgaagcataatattggaatctgagaatatagtcatcaacttcaacagatttacatatgtttcagtagagtgaaatttataaattatgattaattaaggaagggagtgtataagtcataaaaaataactagcaaaaatattgtagagtgcataagacaaaaggaagtgacgaataataaatgattatgacatttgtttacagatttaactccgttacggtatgaatgatgaacatgaaaattaattctaaattatcagaaaaagaatacagattttggggggtgtaaactttttttattaaattaattaattctttataatagtcatagatatgcataaaaaacagaaacatatatataacgtgtggttttttggtagccaaacatcctaaggttcggctctccggtagtcagtacctaattaagctcggccctccagtcaccaatacctcgtaaggttcggctctccggtagccaatacctaattaagcttggcccgccagtaaccaatacctcacaaggctcggctctccggtagttaataactgagtttgcgatggtaaggagcaataatgaccgaatatgtgttggagaggaagggtagagttgaggaaaccaaataagtgaaggagaggggggtgaggtcactgcgtcatattatcctgtaaatcgattcctctaaaaggaacaaatggaaagaggctaacgccaactgttttcttaacaaaatcctatatttagagattttggtttcgggtttatttgaattattttccttttctccgtaatacactttctctactcttctatatctgtttactttcactgttattccttattaatttcagacctacatattgtctaaataatcgtttccattagctatttttcaatatcttttcttccaacactatgttttattctcgaaccgttatcttccaagtgttcatattcttgttctttatcaaactattctcttccctatacattacctaatgtttgccttactaactcatattaaattctcactatttaatattgactctcttcaaccacatttctgagttctctatctctatctcttacacccattattaattgtccttgattctatggtgcactacaatatcctcatatgatttcttcatttattcctattacaagacctgcttcacgcatacatttagcccttatctaccctttctcgtcacatacagtcagtcaactatttgtcaaacctactttctattctcggttcaatcttagattcaaaattgtctatttctcttgtttcctttgaatattacttattcaatggaattgtaaatgttccttccttattataattagaattattttacgttgaattaggcaaggagcattgtttgtgtttatgattaaaattaacaagttttatataagttaataaatattatgcaaaactttcaaacacattttatcctcaccctcaaaaaaaacatacaatacacacatacgaacacgcatagacacgcacacacgcgcacatgcatacatacgcatacacacgcacatgcatacatacgcatacacacacaccccatgtgtgtaatttttacacatttttgagtaattccttcatttaatcattatttttcttaatttttgctaaattgtatcttctattccttaataatttacaaattgtaacttctttcgcttaattctgcacttttctacctaaaaaacgatgttcccaaatgtttaataattttcaaattgtgtcttccgttgtttaattctgcatacatgttaatgtgtttaattatgcacttttctacctaaaaatgacaggttcgtgcacataataaaaattgtatcttccactccttaatatttacaaattgtgtcttcttgctcttaattatgcatttttctacctaaaaatgaggtccccaattgcttataattttccaattgtatcttccattgcttaattctg

SEQ ID NO: 16938 - DNA, 3484 bp, Heterodera glycines
  unsure (1)..(3484): unsure at all n locations
ttttcttaattaatatttgcattatttaaattgtgcccccatttttcagtgaatggtcccgctgctcgaaggttaaattttttctttatatgttatgcctttttgtttatttgatcactttttttcaggtggcattctacggtcgtgatggctataaatacgctgctgaaaagtacggtatcgaaaaagcggagccgccaaccaaaaacttcaacgacatggacgagttcgacaagttcgggttcatgcacggtgagttttgttggcattttaaaattggtttggcattcaaattcgaaaactagctaaattttaaaaaaaaattagtcatttttgtaatgtttttaaaaattttacgggcatggaatcaattttatgccaatgatatttttattttacaaaaaaaaaattaataatttctttttctcagacatggtgttgctattgtttgacggttgtgccgtatgcaatggcaacaaagtgccgaatgtaacgatttcactgctccaacacatgccaccagtaaaaaataattaaataattatttttggcatttttataattttttaaatttaattttcccagggattgttggttgacgagtgtaaagaatttgttaaccgatccgggtataaataaaataaatattaaatatttgtgttgaatttattgtttgtttttcaagggaagcattggctctacagatggaaatggttgaaaaacaacaaaaatccaaaggcacctttgcatacggtgtttcgctgaaggaacggtacgataactaaaaatgcgtactgtacagtgtactgtatgcaatgtaaaaagtcaaaattaatttaattatttacaatttggcaaaaaataattcctattttttagcctctgtgttgagaagaaacccggcaccgagaaagcagaatattacatgcaaaagctcaagtgggaaataattatcaagatttaattacgcgaaatttttaagggaaaataaattttttgactgaaaattttcgaaatttccgtgttcgttggtacccctctcttagacctctcccacccaaattttctcactaaatttttccaaaattcgcaaaaaatttgtcgaaattatgtgttaatcagctgattttctttctgtattagatacaaataccgagtggtgctggaagtgaagcacacctgcggcgccgacggagagcaaaaaacggtgcttttatttttgttaattgagacttatttttgtacaattaataaatataaatgtgagggtaaatccgatttcatgttttttcttcagcattacatttggttgccggaaatcgatgtctttgataaggaaacggtggtgggccgcgtgatgcaagtaaaaaatgaatatatttttttaatttttattaatttttattaaaaaattggagaaccgtaggggtctggctgtgccgacatttttttggaaaaatttagccaaaatttttgggaaatttgagtgcgtgagatcttggaggggataacaacaaggagaatcgaaattttcaatattgatgccgaaaaatcggcacttttacgcttttgcactttgctatttttcagatccgccaactccatttggatttcgccgacatggaagatactgttgatttgacattgatactgtccggaagcgactccgacaaaagcggccaattcgttaatgccacattgatcccctacaaacacgaacccgtggtgccaccaccatcggtagggtgccattcaacaaaaacaattaaaaggtttagaccaaataaataagctaacttttagggttatggtatacttaaattttttattgtatataaatttttattaattatagcccatcggcctctaataattttatattgtactgtaacatggacgggacggttttgattgtagaatatattaaaaatattaaaaagacaattactttttatttctaataacaaaaaagtggaaaaaataggaaaaaagctaagtgggcggcgggggttaattgagaaggcacaactacggtaacacttggagtaacaaaatggcaactgcatcttaatttaaatttttcttcatcagccaaatccgccaatcgcaacaaatgtggaccatttgggagccaattgcacacaaattgtcttttccgaattgatgccgcaattttttttgaacgtctccaatgatgcgtttgcaattgcgtgccaaaagttcgcggccccaatctatactggcaaaaatttttcggcagatgattattatgccaacacttgcgcgcaagtgccaacttcgctgaactgcaacaagtcagaaagggcattgaaaaattaggcttatgtattctgtattttctctgatacagcccccggtggctccgtttttttaaattgacaaccctctcggggggggggggggggggcattattagagggggctcataaaacagtaactctgacaaatcaaaatcatttaaaatgggaaatatgccgagcagtgatagcactaaaaacaaaaagcttaatgtataaaattctgctttcgatacactatacatcccgtagctcagttggttagagcaaggcacgattgctggggtcgtgggttcgagtctatagatacttctatgtatcgataatatttttttttatgcacaaatgattagaaaaccacctaaaattcagtgatcacgagctgatcggctgttacaaaacgaaaaaagtgaagcacgtggtcaacaatgaaattgccgaagtttgccaaaaacatcttggaaatgttgggcaacagcaggcgcacggatttcgcatccgtttttgtgcccagcgtaacgcgaaggagcagctgatcagtgtggaatccattctggatttctcattctcggacaaaatgtaattattgacataaaaagtgattgtttttccaggacaaaggtccttttttgaaaaggatttccaaggactgtccttggcgattcgagccatattttttgaggatttttgccatttatttttttgtaacctattttttcgtcttataaaaataaataaattaaactgtatcatcattgtcaattaattatgattctcattaataaattttgcgttttttatagatacaaaagagagcacagttactcatacaaaccgggtggacacatcgcaatgaaggagaagatgccgttttttttcattgagttcggcaatgcgaagcagcacagtatgcttcgtggcacgggagacagtagcgaactgtcagcagaattggtaatttatttatttattataattaattaatcagctaattgataaattgcgttttgtgaggngaaagaacttttggcacaattaataatttatgaaggtttcgcctacccactcctaagaatttngacctaaaattttagcttcaatattcgggaggggggaatcgggaaatcataaaaaaaatgcatatattgaaaaaaatgccccccccc

SEQ ID NO: 16939 - DNA, 1679 bp, Heterodera glycines
gatagcactgtttcaacttttctgtccttttcagattggatacaatcagccaactggtttgatcgcactcgtggctatgccatcggtcgcaaagactttaccctcgaacgtctggaagaagcgtacaccactgagaattggcttgtccgcatttaccgtgtggtgcagccggcaaacagaaggacaatcaaatacaaagacagacaagtgaaaggacgccgtggaagtgcgaaaaaggtggagggggataaaagttggagccaaaaatcgaacaatcattttattaaacaaagccttgacaatttttaatgaattatacgaattgtcttggtaaaggttttaaaattaaaaagaaaattccaaaattttaccatcgaatgttctctgaacttgattttgtgatttttagacgaaagtgggaagaaaaggcgttttgaggagcgacgggaagagagcgaccgccgcgaactgagcggagccgtaaagagaatgaccactgattgtgagacgaaatgcaatgactaattttattttttgaataatgcgcaaacttttggactttcttttattacaactgaattttaaaatcagtcagaagtttgctaattgtaagtgttaatttgtgcgtgctaatatggtcatcatcctatcatctgcacttttgtcagggtatgtgatctttcaattggtccctttctgctttctcccaatgattttatttatttattggtttatttattttgccaatggtttcttttcctttccattataccgctttttcaaatttatggaattttatttgttcgttcgttgttgttaaataaaaacttaaagactgttattaacattatccgacaattattcccggtttgatgactttgatcatttcctccggtcttttcttttttatccgtctctgaccaatgccttcgtcattttgtctaagagtgcccaagtgatcgctaacatcgtcattcctctgatcagtgtgtctcccgtcctttttcccacatttattttttgctccgccgtcggctgttccctccggcgcctctcttcccggcacatttcttctaattctttcgtcgcttcccaccgtcgtttttcttcttcgtttgtcttccattgccatttgcaatttggcaccttaaaacgccattaattgtccatttttgctattgttggcatagcgacaaaaaatgctcacaatttttttactgcattgtttttcacacgaatggcacaagcgaattgcgcaggaaagacggattttgtccgtgttgaacagtcggacggtaagccaacccaaagaaagggccgttcgttggacgtgccgatggattggggaggaaatctgagggagtgccacgacggaatgagtgaatgcaattggatttcgtcgtttgaatgccattggctactctacccccccccctccccatctactgctgaccattgtctcctctctgctgcaccccccgtcgtcgatcagttcgattggatttcgttcgctgcccgtccaacagttttcctctcgcattgccattcctgtgtcacttttcaaaggatatagaaaaatggacaaggccgaatttcccgttttatggctaatggtttactgctaattgtaaaccgccccctgccgaatgatttgtcgtcggatgggccatttacccccc

SEQ ID NO: 16940 - DNA, 1029 bp, Heterodera glycines
ccgaaacaactcactgacccggcccaatcccttgacaattccagcggaaacagatgcgcgtgtcccacccaatgctttaaagtgcaatctttggaaatgaacagaatacgaattgttagcacctttcactcggctttatctgctgcccctcacaatttgcacttcggtggagagaaagagaacaaagagaagaaaagtcactggaggagcgattggtgacgccaaagtcggacgaatcgtcgaaaatcacacggattggatcgacgacgacggacactttctgatcgatgacatcggaaagggacggcgccgtcaccgaagagaacaaattgcatttggcgggaatattttggaggaaaagggcaaaaaatggaaaagaaacgatcggagaagaatgataaagccaaatattgatgatgaagaacatggaagggagaggaagaagaaatgggacgtatgatgaaaacagaaataaagggacaaaaggaaggggtggcctatctgagggcgaaaagcccccaggggaattgcgctttatgaggcgacatggccagagattgcggacgaattggagagggagtgagagaaaacgcgagagagagagagaaagagggaaatgaaatttattttttatttgaattttaatatgtaattcctaatgattttgaatgaattttcggcttttcattctaagagttcgttaattgccattcgtctgctgtctttgcgcatcccattgttcattttttttcctgtatcagcggatgccacaaatgtttgtctcgcgatagttgcttttctggtgttgcgttgcgatggcatcccccctttttttacatccctcggtaatagtaccgatggtaccccctttttcgaaaaatgaaatttttaaaatattttttcgattaaagtctgtattaggggttttaagggtcggagaatccgaatctgacattaatttcgacctaggtcgaaccccggacccgaaatgagcaaaaagtcggaaattcaaattttcgaatttctcat

SEQ ID NO: 16941 - DNA, 809 bp, Heterodera glycines
ataacttttttctttgtcatccaaatcaaagattctcccgtatcattcgaaagcccttcaaatgttctattagcctgcaaaaatccaaaaaatttcgtcaattttgaacaaatttatggccaaaaaggttggaaaatttggttttttgaatttttctggccataacttttctgaacctaaacgaaatttttcaaaattttgcaggctaatagaagacacttagcgctttcgaatattaccaataataacggatttggttgacaaagaaaaaagttatagccaaaaaaacagctggggcccaaacgtgccggggcccaactgacgggttccgtcgccggactaatttttggaccataaattttttctttctcaaccaaattaaaaatttttgtattgttcgaaagcatttgaaaaacactattaacatgttgattttcaaaaaattttattcgtgtacaaaaaaaatcaggacaaaaagagttcaaaaaactaggtttttgagttctcctggccatatttttgaaacttaacgacaattttcaaaattttgcaaactaaaaattaaacacacagagctatcgaaaaacatcaagaatgtttaattttattgacaatgtttcttccagcgacgttttggggtgcacccccaaaaattcttattttatttggtttttatgcttgtccggttaaatttttcttttccctttttggggggttttcctttatgataattttcaaaaaacttcaatttttcaatgaaaaattttttttgccaagcctagtctcccgctaacaaatttatccactgt

SEQ ID NO: 16942 - DNA, 1356 bp, Heterodera glycines
  unsure (1)..(1356): unsure at all n locations
aatcaaattanggaccccggcggtgccgataaattatcgaaacaaaaaataacnnccaatatttataagtagatgtggtgttgcgacatttatacatattaaaaattcatattttatgagcgagaaataacaaaaagttcaatcaaaaggtctatgaacaaacaaaatgtaaaaacatcgtcttccttcatagcatatgtatatgcaaaaatattatatatagaaagatatacaacaatagccttgggaaaaaataatttataattttaataaattaaatgttccataaatataaaacaggaattacctaatggtgagtctaattgttgtgtcgtgtcaccacgacatttaatggaattgcatttgtgtgttgttggtgttgcgtgccgatagactttttaatgcaaaagctctccaaaaaagcactaatttcatcgcggtataaaaggctttaaaaaaaagtacaaaatttaaaatttatttgaattttcgaataataatcattatttatactaatttcacaattaaatttcgtttttaattaatactaatttccctattagatttaattgacactgattccaaattaaatttaaatgtaaatgatgaccaataaaatgtgcattagcactgttcgattaaacaaaagtgacacgaagagatcagaaggtgtgcacacaaccatgcttttgataaaaaattatattttatatattaaattaaattaattaattttttattcgtttaaaaattctaaggttaattaaaagtgccaaattgggaagaattgccaacttttcaattcttcaacaaatttggtgtcataaatagcttaaagagttctcaaactacagaatttttcataaaatttgtaactataaattttattgcactttatttcacaatattttcaaatttaaatatttcaaaatttgaaaatttttaattttccttccttattgaataaatcttttttacgtgtctatgtcgtgataagcagaaaagcatagccagatcattaacaaatttgatgcaaccgatacgcaaaaaaacaatacatgaaaattttttgagccatttttcatactcctaaataaaaaatatattataaaaaaacataaaaaatcaattaaaaattattccgaccaaattgacaactgaacatttgtgagacgttcaagtccaatttggaacatcaagcaaaaagacattagcacactgaagactggcactgcttgcaaataaaaacatgccgaatttggcacaaattaaatagaaaaataatttaaaatttttttaaaaatttataaattttctaagtttaaataatgatgtgcttttttaggcgctatgtaa

SEQ ID NO: 16943 - DNA, 4441 bp, Heterodera glycines
  unsure (1)..(4441): unsure at all n locations
tcagattttagagccaagggaaattttagtaatactccccccccgaaattatagatacttttttggccactctttaaaaatggtctttttcgaacataaaggcaggcctaacggtatttttattaaaaaatacaaaaaaaatattaagtttcagagatttgcaccttttccatgtcacagcttagtccgaaccatctcttcgagaatctcaaatattttgaaacccgttttgatggagatgggtgaattttcagttatttataaaaaaagacatttctctaaaggaccttcggtgttggattatcatcgacaccagttcaacaaaatgagttcattgggtggcacagtgggataggttttgactcagatggtgacattatcggtaggagtctattgaactctagctagaatttaattctgacatcattattataaaggactagagcaatatggaggaccctctgtattgaagacttggacctattcgagaggggatgttattggtgtaggaattgcaactgatgagcttttctttacaataaacggcgcaatcataggtagacataacactattcgcgattttaatatattttttttggagtaaaaaataaggccacagaagaattggaaactctcgcctctcgccgaactctcgctctagttttttttgggactctcgcctctcgccgaactctcgtctttttggggactctcgcctctcgcctaactctcactctcgtcttttcagaaacaagttacacccttggggtatgtgccctgcggcaaggaaagaattgggtatatgcccaatggggaggagtcattgtgtatatgcccaatgggaggagtcattgggtatatgcccaatgggagggagtcattgggtatatgcccaatgggaggagtcattgggtatatgcccaatgggagggagtcattggggatatgcccaatagggagtaaagtcattgattttttcatttttaatttatttttacaaaaaaaaacaaatttttaataatattattttgtaatttagttagtatacaatattttttttgcatgttttcgttgttatttgggaaattttttgctatttaattaaatttttataaaatttttccactaaattctgaccaaaagtttttttttttgcttattatctgtaataaaattttgatctttataatttaacataatatggaagatttaataacatttgatctggtataaactcatgtgaacatcattatgatcggggatggggtctgaatatttgtggattgttctattgcgctatagtttaacataatacggaagatttaataacgtttgatcaggtataaacgcatgtagaacatcattatgatcggggtttgggtctgaatacttgtgagttattctattgagcgaaacagacacacggcaattagcatttgaacaacgatagcgaatcgtacgctcatcattccaactttcgcttcgaaaccattgatttccaagtattatgtatttctttggaactattgtattttctttctcaattattggttgatggtttgcgtaaattgggtcaaaacctttacggtagcatatatattcttttctgacgaatttccaggcctcttcggctctttcaacttcatcactacctcctccgccatatttttaaatcatatttagctttgttaattcatgtgcatcaaaagcggcatattgaaatcgtttcaattctattctggtatccaatccatatggaacccaagattttggacccagattccacgcaattgcacaatttgtccccttatttagaaagaaaaattttttaatattgcaagtttataaataaaaattaccgtactaaatccaaaatgaattgaccctgggagtgttaaaataccctccccgcctgtttgtaccttaaattttttttgtttgattttgttatacatttgtcatagttatataattttatttataaattatacaaattcgaccgttcgaacaaagcgaattctgtttttgataagaacttttgggtgtataagcacctttttctttcttaaatattcatcgttttttgaaaattctttcacaaaatatgtacttgctagacttttaaatttttgaaaatcagcagctgggatactatacctataaataaatttttagacaaaagatggttaatatgtatcttttttatatctaaccgaaatctaaagattaaaaaaacttaatttaccatattgttaatccttctgtattatttggcattataatattaattgaaaacaggtctgcgttctctgtatgggcaggaaaaaatgctgcacaacgcctaagatatacgtagaaatcggttattcctgaaacaggaattccgaatccttgcggcgggtccaaaatttgatgttctagtaccgcccctaacggcgccttccagtttttatcaatatgtttcggctcttgttcttgagcatatatgaaaactgtttccgaatttgcattttcaagttgattccagaattcgcttaaaagttgaaacggttaattcttcatttattataccccatttttttgaaaattcgccaccattatgccctgcccactccccgccgaactgatcaaggaaatagttgatgctcttccccctccaaaaacacatcggcttctgctcgtaaattttgttttggcatcctttgttaaatgtcggttctattccatgatgagaagattgtttcgcacagaccatttattaatgccaatggcccgaagaacaggaatttatttatttttcgatgtttttattccccacacaactcaccaaagatataaaaccaaaacacttgggaaattagagtaatctttctttttctacagcgaacagggcttaaaccaattttcaagggccaaggcgttcgtatgaacgaagtatgtgtgataaaagaaggagaccactgggacggaataaaatctgtgacaaaatttttcaaagtcaaaaacttctgtgcgagctgcgaagtgacatatgattggtctttgcgtcatagtgctatgtgtaagtatcgctttaagaagtgtctttgcgtcatagtgctatgtgtaagtatcgctttaagaagtgttatcgcatggggtttggatttccatgtgcaaatgtgtgtgccgaaatttattgcaagcagtgcaatcttaagttctacaacccggaatgttttgaagcacataagaaggcggcttgtaacgagtacaaaaagtgtgaaaaatgaggtgaagtgtgccaaacgcgatcgaagcacacatgtggggagaagttttgtcggctttgcaaagtttaccatcccgggcggcaatgttacatcaaaaagatcacagtccgcccgcagagagcctacagaattgtggcctatgaccttgagacaacggtggagagtggtgatcaccagccaaatcttgtcagcgcagcgcgaacatgcagcgtttgtgagggagaacaacgggaatgcgcgatttgtgaaggtccaaggatggtcacctggtcggcagaagacggcttggaacccatgagtgaatttgttaattgggtgatgggcttcagcagatttgaaacggttgcctttgcacattacggaggacggttcgactcgcatttcgtcttggccgagttatcgaggaaggaaattaaaacggagctgatgatggcggacttgaacatctatcaaatcaaagcaggaagggtgtgctttcgggatttctggatgcttagtcagaacaagttggcggatctccccaagaccttgggactgagcatcgcggccaagttgtactttcctcacaaatacaacaaaaatgggaactttggcaagagattgcccaatctaccccctttggaagactattgccctgacagtatgaaggaggaggaagcggtaaaactggaatcctggtataagggtaatttcgcaacagatttcgaattaggtaggcagaaaaaatattggcttcttaatttaaattggttttaaggggaacagctcagggtttactgtgaaaatgatgtggaaattttgatggctgcaattttgaagtttcgacaattgtttttggaaattacgggggatttggatgtgatgaaggacagcgtcaccattgccggggtcgttaagaagatattcagggcaaaattcttgaaggacaggcatattccaatcatgccagagggaggatacgagagggctgataatcagagcaaaattgcagtgaaatattttgagtggttagcccaaagaaaaggagtaaaagtgcggcatgcgtgtaacggaggaaaagtggaatttggtgggctgaaagtggacaatgtgataggggcagagaaaaaaataatagagtttcaggaaaagaaaaatgatattttatcaantattttaatgttaatcat

SEQ ID NO: 16944 - DNA, 2900 bp, Heterodera glycines
aaaaagcattttttctaggattgaaaaatgcgctgatcccaccaagtgagctcgggttttgcaaaatctgatttttatctaggatttctcaccaagcacttaatttttttttctaaaattttatttattattagaattttctttccgatgaattaaaggtaaaaaaaatgcgctgatcatgaatctgaagtttgatttcgaccccatctcatatgacccctaagggccagttattaaatttcaaaaaatcgtaaatatacttgagttctccagacaaaaaataactcattcgaaagtctttattggaaaaaacggtttttagggataattaaaaaccttttttttttatttatttatcgataaagaaaaaattggggtccgtatcgttttggcgccgacgttttggcgccagggtcgttttgggccgacgttttggcgccaagctataataaaaaaaaagaaaacacccaaatttaaaaattttgtaaaacaacaaaaaaacgtatttttcgcgaaggtaatactgccgatggttggttgccccccttttttgaagaaaattttttgttttcaaaagtcatgaaaacatgcttccaatggttttcagggtcgctgctcacgaaccaggcatccattgcgaccaattcggaacccggagccgaaatttgaacaaaaaatcgaaaataaaaaatttcaaaattctctttttgtttctaaaatagattaaaacaaccaaaacgttttggcgccgacgatttggcgccatgtagggaggaggtagaaatgatgaaatcgttataatttttctgacgaagtctattaaagagccggatttaattcttcatttactctttttcgctttggcttatgttctcttaattttgtatttaggtaatgaatcgtcaaattgatacgaaaaaacaaaagcctaaaataacgcatgaaggccgagcttcggccggtgggctgatcgaatgaaagaatgtttcggaggcggcacattctcattggcacctccaatgttcaaataaattgtttccatttcttcattttgttaatttttatatttaacgaaaaatttaattttttataatttttacaatttcttcctgccttttttttcatttttggcttggcgccaaacagtcggcgccaaaacgactctggtccctaaaataccaacttaagaagaagtatcctcaaaaaactacaaaaaaaaagccccttcagcctttaaagcaataaaaagagagaggagataatatatatacattaaaaataagggaggggggaatcggcggaaaattttgcgaaaggattcggcttcttttttgcttttaaaaacgttttttttgcggcaagggggacaggcggcaccgagccgccaaggaaaaacccggcattactcaaatcaaaattaattaaaaaatccgatacccaacatttaccaagagtgtcaaaaaaatttcaggattgatttttgtgcttaaagaatttccaccacctcagtgtttggagaacacaatgttgtggatgtcgacgaagtggttgatgatgacgagtgattgttgttctcggccggcacagaaggagcctgaaaatttcgcgttttatactaaattcaaaatttgcacagtctatccactgtttgagcagaacggcaaaaagaatcaagagacagtttaaaaatttaattttttttattttttaggcattacttttcaaacattcattctggcctgttccgaattctggacccgaattcgaataaaatataaaattcgagaattctgcattttcaactttttgttcggattcaactcagggctggagcgcgcacagaaaaaaaccgcggccgcgcatcgcgcattcaaattgccgcggccgcgaccgcgcatcgcgcaaaaaaaaaaaccgcggccgcgcaccgcgcatcgcgcattcaaattgccgcggccgcggaccgcgcatttaaaaacaaaattttcaaaaatttcaatttaatcaataaaattttcccaagtgaaagtttttttgaaaaaaaatttgaaaatttgactgcactttgttacgaaaattgcctatattaaaatatgtactcattgggggaggcattcgaagaatttttccattatatagaaatttttttttaaattttcatgcgggggggggggggaatcttggattttctgagtcccaaaattctggattttttttgaataaattaacaatctattaattttttaaatcgcgtttttgtgggcggttccaaaaaactttttgggaacattgtggggggggggggggctcgagtattgcctggatgctgtcaatcataaattgcttcacatgatgagggaaccactatagcttctaccgtctgatactatttttatatgaattaagtaagttatttaatgtatactttaataatagatgctttgcattggttgcttaagaccgaatgtaatcattttttgaatctcggtcaggactataagtttcattccagccttaatcgcggtcactcaatttcgacatttacttatctcattgtgcaagtaaatgggtgatttttaattttaatttgattaaattctaattatatgttgaattgcttcaattgtacttttcaatgcattattttattcttttaaataatattttttgatattatttgtttattttcttaatgaatactttcttttcaaagaattttatcgatatttaataaatctgaattcttttcagtataaatagtttttaaaaggttactgattattagaatactttttaatatttgtgttcactcgtttgcaaaaactttaaatgcttaaagaagaaaaaacctttccatccaattaaaatggatcaaaattaaatttaacctggtttttatt

SEQ ID NO: 16945 - DNA, 2344 bp, Heterodera glycines
tggcgccattgtgctccccacgcaatgcgcccggtccccctactgcactggcaacattcgtcaggagcaggagggaaccgctgagcggaacagaggaccgagcgcgttcggaccgcgcgaccgtttctgacagcggacgattggcatttgtggaccctggcgagaatttatgcgcgaattgccccaagaccggcacccaggacaatttaatgtcttcgattttgcagtcgatggatatggtaaagataattattattccccctaattattatgatcgattggtatctttgcttttcaataataattaagagcaaattggacaacattttcttggatgttcgacttttgaacactcatgccaccaaccgggactacaccatcgaagttgttggtaagcaaaagtactcgatccattaaaccattgcttccctcccgctgcccctaattgccactacatttgccactttattcaggtgagttcagcgtgggcggaagtggcggcactccgttcggtgcctttcccatgcaatttcccgactacgccggtgccaaaatggcggacattttgatcagcgatttcaccatcaattcgctgttttaccatttgcaaaggtcgcacggcatttaaaagcttaccaatcgctttccttttccttttagcgttgactttttgcgcattcgaatgggcccggaaacgccgaagtacggcgaactgatgaagaccacctgctcatcggaggaggacaccgggttggaggaccacggcgtggagacggaggacggagcggcggctgtggcggtgcgggtgaagcggcaggacgcgggtgacttgaccagcctgggcgtgtgtctgggcgacatcctgcccgcggtccgcgagcagtaccccaaccaattggtgtacgtcataatccacacaattcgtgcgccctcaattatactgagcagtcaaaacggaggtgagaagggcaattaatcaatcactgattggccttggcaggcgtcgctttgctgaatttcctcgtcgacgtcgacttttacattcagtcgacaaaccaaagagtgggcacaattcgaattgcttcggatgttcgcataaccattcgcacaaacggtgggtttaaatttaaatgcgaacaagtcactcactgatcagatcaattttatcgtggatggcatcgaaatttattccgcaaattccgtcccctttctcttcctcttcaggtgcccatgttaccggccatgccgatgtggtcagcatgcatttggaggacgtgggcaaccaactcggccttccgcaggacgcgttggacaatttggggacccttggcagggatttaatgcttaaggtggtcacttttgtgaacaaatcatatcgcacatttttcatttagtccatcaacgacaaattagagcagggcacttcgctgaatgtgcccccgggcactggcggaattccaatcgtaagcatttgggtgacccaaatcgaaatgcataaatgatggttgtttcttgccagaacattgtcgacccggtcccgcacattctcgaccatgccattctgatcgagtccgactttacgatggacaccagccaattgggcggatcagagccatgcgaatactgatcagatcaaccacacgcacgcactagtagcaccaccggcattcctttgatcgtttagtgatacgaaagtgacgggtaggagacatccgattggttttttggggagaaggggggcttaattcgatgaaagcggataattttacccgaaattaccaaaacagcgaaatcaaagcgcagtgagcgcgtaacccggtcttatcatccttatcagtctgtcctatcatttttatcatctctgtttttgcccatttgtcttgccttagcttttttgtgcaacccttctcttctcttcccttcctctctttctctgttcctccaattttgtttattatttgtttgtttttttcattttttttgtttatatttaataattaatcgcattttataggttaattttcttgttttccgcctttgtaattgcactttaaaagtcaaaagtatcattcccctttttctgccatttattattgtaatgatcttgccaaagtgaatgaatttaataaagaaaatgacaaattacataaataataaattaagcaaaataaattagttaaaatgaaagattattcttgtaaatacaattaaagacttcggtccaaatgagtccaaatgtgtcaatttattaatgactgacggggctaaatgccgggaagcctttgaatttctgttcaaattcgtccaggaattcgggctccatcttttcgtattgtgcagcaca

SEQ ID NO: 16946 - DNA, 1542 bp, Heterodera glycines
  unsure (1)..(1542): unsure at all n locations
gaaatgcataaatgatggttgttcttgccagaacattgtcgacccggtcccgcacattctcgaccatgccattctgatcgagtccgactttacgatggacaccagccaatgggcgggatcagagccatgcgaatactgatcagatcaaccacacgcacgcactagtagcaccaccggcattcctttgatcgtttagtgatacgaaagtgacgggtaggagacatccgattggttttttggggagaaggggggcttaattcgatgaaagcggataattttacccgaaattaccaaaacagcgaaatcaaagcgcagtgagcgcgtaacccggtcttatcatccttatcagtctgtcttatcatttttatcatctctttttttgcccatttgtcttgccttagcttttttgtgcaacccttctcttctcttcccttcctctctttctctgttcctccaattttgtttattatttgtttgttttttcatttttttgtttatattaataattaatcgcattttacgggccaggacgtttgcgtaccgccgttttcgtacgagtggatatgcaaaaaaaaattgcattcaaataatttgttaattttttttaattacttttaatgttttgacagttaagcttttattaactacaaaatgaaccagcagcaagtaattaaaacaaaactaaataatgataaattggtgcatgatggtgcacagaaaaagaagtatcgcgatgccgacgcacggattcttcgtctcgtccaacgctataacgatatcaataacaatattgtccctcaaaatgatcacaattatgccaatgccaatgtcaatcccgaaaaccttaacaattttctcgctggtattttccgaaattatgagatgcgacctattttgtcccggattttgttattattataaagttatgaattttctacaaaattttatgaatgggaaacaaaaaatgataaattttggttttattagttcttaagtttttctatttgaatctgacgcttgtacaagaactcgtacgaaaatgtcccccgtacgaaaatggcggtacgaaaacgaccctgaccgcaagattagcatgtatttgtcagataaatgtatgtccttattttgaaaacttataatcactttcatatgaacatatgaactattgataatctttataaaaaaaaaactaaggcaaaatgtgtaaaaattcaaacacaatatttttcaaggctaaaaatttctaagaaattaatttaggataaattaggggtcccgctatttaggaaattctttaggattctaaaaataaatttaatcctccgaataaatttaaaactcataaaaaataagtaaaaatcagaaaaaaataataaagcaaaaagtggaaaattcaaataatattttcctcaaggccaaaatttctcagaaattttgtataccttaaagtatagcagttttcctacnaanatttggtgcgtcacataactaaaatgaantgatggatgatcatttttanaaaatttatatttttacaaaatt

SEQ ID NO: 16947 - DNA, 1645 bp, Heterodera glycines
tcacggccattaattttgggctccaagcgcaaataagtttattatttacttagtaatcagaacgccaaaactgcaaaacttaaaatttattggggattttcccttgtaaaaatgcaagagccgatctcgagttagaaaagaaactttcaaaaaacaaaagagaattcgatagaaaagaccaaaaaattcacttaggcaaaatttcaataaaattggtcaataggaaaaaaattttttcaaggacaacaaaatcaaatttatttgcaacatttttagcataaaaaatggtatctacacgtaataaaactggaaaatttatgaagctaagcaattctgggactgaagcaaagcgaaagcagaaggaatggcgccaggagcatggtcgcagagtcggttcgacgccaaaaagtgacgaaaattgaccaaaattaattttattttaaaacactgcatttttcagcgctaaagcagaccgaagccgagacaacagcagacggagagggtacatcgacccaagccgccgaaagtggaccatcaacgtcagctatggaccttcgtaagtcaaaaaagtcactattttagaaaaattaaggcccgcattcaagcccaaggccattgtcagcgactccgatcaggcgccatgcgcgtgttcgtgcaaaaactaccgacaaagcaacgaacatggatcttacaactaccgacaatgcaacaaacacggatttgacaactgccgacaaagcaacacacatggatttgacaacgatggataaggcaacagacgtggatttggcttatgaggacgccgcgacacaaaccgagcagttggacaaacagctgaaagagcaggaacaagtgatcagctttcttcaacagcaggtccgcaacagagacgcactgatcgctgatctgcgccgtcaattggaacagcaggcgaaggaccagccaacaagtaaattttgcaaattttagggtgccatttatcattcaaattgtttttagcatccacacggcgcaaaaagaatgctgctacattggagcagacctcgcggcgaaatctggccaagaaaatcgctgatgtgatcgatcgagatcggtcgcggtcagtgagccgatgtttgctgcaatctctgcatcgtgaagtacgtcacaaatttggacactacacaccgatgaagaaggaacaactccgacaacaacaaacaatccatgaagaagatgggctgcttttgctgtcacagctcgggactcaaaaagcatatgagaggatgaaggcactcttgcgtcttatcggcggaaaatttgatgttttcccaccattgaaaaaagtaaaaatgtttattttaattcaaaaaaaaatcttttttgggtgatcaaaatcaaaaaggagatctgcgcagcactccaatatgaggcaatttcaacgccgcatggaattggatttttttgttccgacatagccggggcactggaattcagattgtcctcggccaaggacaatctgatcaacttcagaccagacgaattgattttaaaattgagcggcgacaatggccaagggttcacaaaaataaccatttccttggcccatgcttcacatccaaattcctccggccaacaatttcatcgtggcagcatttcccgcaaa

SEQ ID NO: 16948 - DNA, 1585 bp, Heterodera glycines
aaaatggagagaagccaactgttgctgctcgagcgttgaccatgggattcgtggatgaaccactttttgcgatcaatcgaatttgaccggatatttttgggcgctttttcacgtcttccagggcattggaaatgccttgatcaaagagctcgaagggtcaacggaaagcgcggaaattgcgaacgaatttttcagaagcatccgggtcaggagggaagcgttcagaaaaaaggacatgacggggaactccatcagaaaagttctgattcatgcggaccaattggagagacgttactcctctgaatggccacaaatcatttgccaaaccctgggacaattggcaaagatacaaacttttacaaaagtccttttttatttggtttttttgaaaattaaaaataaatttaaggcccagcccatgtcgccacgggatctggacgaattggaaatgtcgattgatcaatttcggacatttctcaacgatcagccacggatgcgcactttgctcgccctaaaaccaaaggtccatttgctgttgaaccattttgtgccgttcgccagacaacaccaatttttggcacttttggacgagcagggtcataaataattttgaaatttaatccatgaatttttttaggtgatgaagcactgcattcggtgtggaggcgattggaacagctgtggaaaacaatgcctgacgaagaacaaatgcgtcaattgttggaacaccattttgtgtcaaattggcttctcgacacaggaaaaattgacgaaatgaagcgggccagtttggtcaaagattgattcgagataaaattccatttttaaggaccgtgaagaacaacaagaagaaatcggaggccagaagagcgacggagaaagcaatggagaagaacaacaattcgattttgaataaaaacagttggatgaaaggtttttctttgtttttacagaaaataaaattaaaaaaaaattcttggcttctttaaaagttgttttatcatttcacatatatttatttgctttaaaaacctcaaaatacagctataacatgcattggattcgaacctgagaccccccttttggtgactaactcacagaccactaagacaaaaaaaccaacttatttgcgcttggagcccaaaattgactcgccgtgtaatccaatccaatttcttcgcgctgcgcttatcacctgcatttttaaacattaataagattagcttaattgtccctttgttatctaattttgtcgtattctcgaaaccatcaatttgacgtcttcaaatgttccaaatggcaaagttaactaaaccagatacaataatattctaatgcccaattaaaataaaaattcaaatttaatttcattagtacagtaaatttaaaaaaataacatttccttttttatgtgaataataataaaataataatttaattctctgtcgaaatcagccactgtcgggaatgtcggaaaacagtaaaataaatgaaaatagttccctgtcgaaatcagtcactgtcgaaatccactgtcgaaatcggtcagtgtcgaaatcagccactgtcgaaatttcctggcacg

SEQ ID NO: 16949 - DNA, 3447 bp, Heterodera glycines
tagtagagggaaatttttccttttttgggcccattgcacattttttcttgccggccactcccccatcgattgtgagggtataaatgcccgcccattctccattttcttcacttgtctagtattctacaaatttttttctatatttttaggtctgttcactcttcagtaataaagtcttttgaaagggatttctgcaatttttaaggtattttaaggataagattctccttaaatcaaaatgttatttgtgaagagaagacattcttctctgtcacaaataggagccgaacctcgactaagattctcgcaaatttttgccaaaggcttttttaaacaaatttttaagcaattaaataatttaaaggctgtgcgtaaggcatcgtaaatcttcttacacatatcgagtaacttaaactcggtaggtagaggtttagcgcgcaacgactgcaaccgttcttttgccaaaggggttgttaggcgcaaagttctaatttttctagaatttttcacttttggcattctaaattaatttttaaattttcttatacattatgctattcaaaagaattataaaaataaaattgtaataacaaattaatgggtgataaaaaatttaaattattataataatgttctatttaatgaaacttttaaaattgtgaaattggtcccattgcctgaataattcaatccatttaatattaatcattgatttcttttatcaataaaaaattctgttaaatatttcatattattggaaaattttatttttaaaaatacttattttggaatgtgatactgttactgattatcacacattcgagaataaaacggacagaaatgggcacaatatgaggagggacgatcagccactaaaattaattcaaaacagctaaggcgagaacagatagggcgagggcactgatcagaacagatagggcgagggcactgatcagaacagatagggcgagggcactgatcagaacagatagggcgagggcactgatcagaacagatagggcgagggcactgatcagaacagatagggcgagggcactgatcagaacagatagggcgagggcactgatcagaacagatagggcgaggcacagatcagaacagatagggcgagggcactgatcagaacagatagggcgagagcactgatcagaacagatacgacgagagcactgatcagaacagatagggcgagagcactgatcagaacagatagggcgagagcactgatcagaacagatagggcgagggcactgatcagaacagatagggcgaggcacagatcagaacagatagggcgagtcgtgtagacccatggcaatccgaacgccgccctcccgcgcctcggccgccttcgagcgcagcatgtggtcacgctgcacattttcgattgtggccaatgtttgggcattgtccaaaaagtaaccgactatgcccaattcgctagtctataattgaaatggaaaaggacaattaatcataattggtggtttgtcaagccttaattcaatcagttaccatggaatacattttcggcttttccctcgcgcgaattgaataattctgaaaataaaagtgatgatttaatttggatttgcatatttggatttaacttggatttttgatatttaaatttaacatttgcattgttttaccgtcacttggagcatctccaacttttccatcagaatgagtcccgcgcgttccgtcctcgtcatcgttcgcaatttgttcttcccagaaattgttgcccccccccgtcccggttcgtttttaaaattcacaatgccaagacaattaaaacaaaacaaaagccagcagtgcctccgagagcgccgccggtgaagtgtatgaaaaattgaaattttttaataaaaaatgaaaaatttcttagtggggaatatcacttaatttttaggcgcgtaattaaacatttttccatgccttctaaattaaaatttatcttattgtgctacacaactaaaaaaaacaattttttttttgccattggaatcgaaattttggcgctagtgaaaaagtaacctattttgaaaattttttcacttaaaaatctgtcactttataactagcgccaaatttcttaatatgcccaaataattgtcatattcttgatcagcgacctctaaaacccccgggtatttggtttcatgactttttaaacaaaaaaaatttaccaaaaaaaccaaataggtcactttttcactagcgccaaaattttcaacccatggcaaaaaatgtttcatttccacacctcggtccacccactttcggacatgaaaccggcactttgttgtcgattcattctttggaattgatattttaaaataaaataaatcatataatttatctatgaataaaaatagaattaacaattttagataaaaattaataagattctcattgtgaatggtaaaggtctagaacacttgtaccaaaccaccaaatcgctactaatgcacttggctctattgcagttcacacgaccataaaatttttttgcaagtttagtgaaccataactttttcgagaagcattcaatcgtttcgttttcgtaccgaatgcccttttggtttcgttttcgtatacaaaatttttttaaaatttttgtgcagccctgctcttaacagcaaaaaagagataaataaatgtgtcttaaaatgtttacaattaaaataataaaaaaaaacaatttagaactccattttctttgctgattaattgggttgggagtttttttaacctaaaaattgcctaaaatcggtaggatgatttgaattataaaaaaacctaaaatatgatcaaaaaaatggggaaataagacctaaaacattctcgggtgaaactggtctgatatatatgaattaaaaaagtaacttttaacaattttcaaacgattttttttatcgtttttattgcatttctgtcagggaagccaaaacttgcgagaaatgtattccacagaatcgaaaaccgagaccgagaatgaccccgagaaacgatacaagaaccgaaacccaaaaacaatagaaatttctcgactcgggaatcgaaaaccaagaaatattaattaatttaaaagtattttttaaaaaatcaatgaaaaagggtaggtcaaccgcaattttagcacagaagtctcaacatcgaatttgcggtgcgtttttttcaaaaaactttctttttttgggggggggggtgtatttttaatgcgatttgataacagatttatcacgaaaaactgtttcctagtgttttctagccgctgatcacgacgaaaactttgagctttcaactttttgctcgaattcggtttcaagaaagaaattggtcaaaatggacgctggattcgtgatcagcaaagcctgaacattctatgaaacaatttttcgtttgtgatttgactctaga

SEQ ID NO: 16950 - DNA, 431 bp, Heterodera glycines
cccagggacggtcccaggattttggcttgggggggggcacctccccccgggcgacgacctttttttttttttttgcttttcacacccgttttttatgtggcgcggtttttgcaaaaaaattttggggtacagggggtccggcggtgccgataggcgccgccgggaaaatttttgcggttttaaatgcggtttgttaacagattttgtccaaaaaatgaccaaattttgtgattttgagccatttttagcagattttcattaaaaatttgtggattttttgaaaaatttagcgacatttcttggaaaatttgggtgaggccaggtctgtggggtgggggtaccagcccagcaaggaaaacctaaaattttcagccaaaatattatttttccttaaaaatttttggacccggggggggggggtcttggggggg

SEQ ID NO: 16951 - DNA, 2026 bp, Heterodera glycines
ggaggaaggtctgtaagtgggcaccaatcctttgaaaatttcgcctggaatggtcttagggagggggctgaatacgtaacttggttttttttacttacagaaacaatttggccctgtttttgctctccgatttgcttctggttggccccacttcccccgccgtcgattggcccgcctatcaccccaaactgttacacatggcgacaataaatttggactcacatcggccaattgtgtgcgcccatgtccgtcagcttttgctgaacatttgcctgtattgggcaagcagtgggtcgtgctccattaaccaagtggccaatgccattctgaaacattgccattcacccaattgcaatggccaaatcaattcaaatgaacaacaatgccaaaatgcgatggcaaacaacgtgatgacaacgccaataaaatggggcaatgccaatgccaaaaatttgactgtaaaaggagaggcccgtacaatgtccatggtgtttccgtcaaagaaagaactgttaactgtgcttgtccagcttttttccagcgagtaagtcacgtgaatcatggggaagagagttgggtgttggtctccgttcggtggaaagtagcattgtaaagcaaaactgttcattgttaagtcagcaaattccgctttgggagcatgaagaagtgagtccgttgtgttggaagccggacagtgtgaatcagttggagtgtttggtgcgtcttttggtcgcttaccttctcggctctatccccgatttggtgcttcattggaccaattttgccgtcgatttcgccatctccagcaacaatttgcatttggcaggtggactgttcgtgctcttgcttttccttttatttatttatttttcaggccgttctttccaaactgccggtgcccttggcctcagtccgagtccgtttttgcaccaaattctttcgaggcttaccgaaatggtcggcgatgtcagtgaggagtcccaaagttacatcaccgacttgttcatgtgcttacaaaatttggcccaaaatatcacaattgctgcacacctcgccaattcccctcaattacaatcatcctctatttcaactggtcacaaccgatcagtgagttatacccaacaaatttcgacacaaaatttgcaattcaaatcaccgtcacgaagaataacacagaaaaaaggtgacttggttatcgaatcaaatttatgtgtcgttgatttttgaggttcggacatgcgtcattctctgctcgttggtgccgaaattttattccccatcaaatcggatgccaaacctttgactcggagtcaaagtgcggcaacgcttaaattctctgaggatagcgccagcattttactcactgaaaatgacatggaaatcatttcgcaacttttgttcatcgctttggccatgacagaatccaatttggaaaacgaatttcttctcggactcagattcgttgacaaagtgaccaattttttggcaatttccattaaatcgcttttttagttgctgctcatttctgggaaagaacggctaaacattctcgagaaattggaggaactgatcgttcagcatgggtgggacgactttcccggcattatcgcacattgcttgaaaggtgccataaattgaaaattgtcagaatattttcctttccaggcactttgtattcgtccggttctgaatgtgccatttccgtcttttgcaattgtttgccgcacctcagcgaacaaatgatcgtctctaaacagccaaacgatgcttttgcgcttattgtcattgcttctcttcctcaatttgtgctcaacttagatttgcccacccaactttgttccaatctggcccaaaagatcatcttggtgctttaatatttctattttttaaattgaaatggtaagccatttttcaaatagtattgccaaaatcgaatttccaccgatgaattggacgtttcttctggcgaccatccgatctgcaatttgaacgctgttggtttatttgattgcctttctctacaatt

SEQ ID NO: 16952 - DNA, 3222 bp, Heterodera glycines
tgattaaagaggtacagcagtgattagaagaggtacaacagtgattagaagagatacaacgatgattaaaagaggtacaacagtgatcagaagaggtacaacagtgattaaaagaggtacaacagtgatcagaagaggtacaactgtgattaaaagaggtacaacagtgatcagaagaggtacaacgatgattaaaagaggtgcaacagtgattaaaagaggtacagcagtgattagaagaggtacaacgatgattaaaagaggtgcgacagtgattaaaagaggtacaacgatgattagaagaggtacaacgatgatcaaaagaggtacagcagtgattagaaaaggtacaacatttttgatgaaaatgtgctaaaaatggctcaaaatctcaaaatttggtcattttttggacaaaatctgttaacaaaccgcatttaaaaccgcaaaattttcccggcggcgcttatcggcaccgcagaccccctgccccctaaaaatttttttggaaaaaccgtgccacaaaaaaacgggtgcttataatgaattacgaatttggaaaaattttctaatttatgagccatttttcgaaccgagaaaactttttgcatataaactccttaaaaacacaattcgcgaaaaatacccaaaacccaaaaaaccaatcacatttagaaaaaaatcaaaataaaacttgccgaattggtaaattcgcaattcacttttgccgtcgaaatatttgtccaccagagcattgaaacgtggcgaaaggagtgcaaatttgaggccgagttgaagacggtcaaaaaaggaaaatatccatccaaacattgttacgcagttgctgaaaatgttaagaatataaaatagcaaaaaaaaagtaccaaatttatgttcaaaacccaaaaaagaagtgaaaaggtcttaatttgtaagcctgttcaataacgaaaacataagtcaaaaaaaaatttggttcccaatttcatatgtctcaatgtaaaaatgttgaaaaaatagaacttacgtaaatccactttatccatcaaaatgtttgtccactaaaacatcgaaacggggcgaaatgagtgccaatttgaggacgataaaaggaaatgtccacccaaacatcgctgggcaaccaaataaaataatgtaacacaataaataaaatttttagttgtaccaagttaaattaatgggtttaaaaaaattcgtagtaaaagaaactatagattagaactaaaaacatttggctctaatgcactttatgagtccaatcgatttttataagtccaaaggtattttatgagtccagaagctaaaatatataaaagctcagcgtttaggccattatcagaaaagatttaataatttaagtaattattgattattttcgtttgttgctttttttaaatgttgttttttttgttttctcatattattacatttaaaatacctttggactcataaaagtgattggacacaaagtggattagagccaaaaatttttgtttataaaaaaatcaaaaagttttgacaattttttgtgaaactggtattttagtaatttaaaaaatattaaaagcttacagcattcaaatttttcattgcgaattctgctccaccatcattttgcttttcccatcgaattctccactaaacatcaaaacggggcgaaatcagtgccaatctgaggccgagttgtagacggtcaaaaagaggggaaagtgtccatcaaatatcgttgcacaacacccagctgaaattgtgaaaaagcttaggtaaatgagtctaacttgaacttagaaaaccattaggggttaaatttggtaaagcaaccacgaaatacaaattaaaaagcgaaatttatcaacaaaaaatttctggaagtttcaaagaaaaaagttctaattttttggttaaaaatggtttaaattatttttttaattgagcactactggatgactttcagttcgttactatatatttacataaaacgaaaatttaaacattaaaaatttaatgacaattttcatatttaagtgtagggctgccaaatttataaaaatacatatatttttctcggcttctcaatgctctaaatatgctgaaaaaagccacaaaaaataattaaaatataaaaaaattgtttataataaaaaaaagcaaaaaaaaaattgtttgaaaaatgcctaaaaactcgcgacaccttgccgaaattagaaaatatttgaaacgtattggtattttttagcttgttatcattgagggcgcatcaaaagacaccgaaaaattctttgttttgttaagcctacgttaaaaacaataaatttcaaaattttttctaaattttgtgactactaaagacaaacgttcaccatttcgcgtaggcttggcgaaaccaagcgttcttggtgtctttagatgtgcctcagtgagataaagctaaaaataccaagaacgctggtttagcccaagcgtatgccaaataatttttagaaaataaaaaaaaattgtaaatatcaagacttgacgaaaatcataaattttgatattgctaaattagtgctcagattcgtgaccagctcatttttccgatcctagaaaatgtcttaacaaatcttaaacacactaaatttttttgcctattttgaatgtcgtcctgaaattaaaaaatgaggtaccaaaaagacaaaaatcttaattaaaaaaaacgccgaatttacaaaaagaaaaaaaattttagagccattttgataatttgaggcccattttagggcacaaaatctttaaaaagattcaaaaacccttaaaaaaacccggcattttaacaaaaaaatttttaatgacttttgcagaaaagtttttaattaaacaaattaaaaaaagaacttgccgaaatttttaaaaaattcactatctacattgaaatttttgtccaccatcgaatcaaaacgtggcgaaaatacacatccaaaagaactaaaaaaaattcccttgtatttttgttaaaatatggcgatagagcaacaaaatgtttttgcaaataaaaaattgaaaaaaaaataattgtgactattttcatgagtaaaaaaaaaagtggcataaaatcgctaagtaaaaaaaagagtaccctaaaagagcattttttatataaaaagtaaatcaaaaagtgggttgaccagtgccgtgcgcggccaccgaacgtcgtatttagag

SEQ ID NO: 16953 - DNA, 2770 bp, Heterodera glycines
aatcactaataatttctgatgaccttaaattggcatttaattgacaattactatgattaattaagggtggtcgtctcacaattcgcgtgagtgaaggtgaacattcccttgagaaatttttttgctaattttagcatgcggatgaatccgacgcggggatttactcatgcaaagcgcaaaatttggccggcactgacataaagccgcttacgttgggaatcggaagtgaccccccccccccccaatccgccacccatccatctcttttaattgtgacaattgtcccaaggtgccccttcaattgtgccaggccctgactccgtttttgctgagatccaaaggaccgttagcattccctgccgtgcttttggagtgccaaaaccgcaaatccgctggctaattaacggagagccgaacggcatgggagagagaggcgaaaaggaaagaattgtgcatttgccagacgattctttgctgataaaaggttccgagaccggcggaaggaacatcgatcatttgaaacaattaagaagttcaaacgacggaccaggccagcttcacatgcgtggcacggaacgaatttggagaacgactcaaacacatcaatttggtggtggtcggattaggtgggttacggtaggtggacagagaggaaacggtggcaaaatgaggaaggtcggggggggggggacgaacggcacggagtgacatggcatggcactcattaattacccacatgagcatttttattgctttcccatttcaatttgcaatttttccttttctagtgaggcccgtgttagcggaactgcctgcgcgaatggagctgatccagggcaaagagatgcaaatcaactgcatcgttctgctcggcacccctcggcccaaaattcgttggcttaaagtgccgactgtccgctgatcctttcagtccttcgcccattttcagaatgatcgtccgctgatcggtggcgacgacaaacgcacggcggtggacttttgccgaatgcttttctatctcttattgtttgcgattaaaggtgctccccgatgggtctttgctgttgaaaaacggctcaaaagaacacttgggccattacacgtgtcatgccgaaaattcggcgggaaacgcaacggttggggtggacgtggagctgatcagtgagtgggcaccgatcatccgatgcaattaataaatcattgatcaacctcaacccaaacgtgtgccaattccctttttggcttttttattttgccaaattcccttcgtttttcgttcatcctttttatcttttgccatttttcttttgctttaacaaatcccatttcattaatgccttttgtctctccctttgctccgtttgttgtgccgttctgtctttggcatttcccttcagtgaaaccgacaatggcaccttcgtccgcccttttgggtccgtccggcattgaggaaatggtggcccgaaaaggagcccaattggacattcaggtcgtctcatccgcttcttatttttaattgtgcttttctttttgtgcgcttttagtgccccgtgagagttccgttgggccaaaaaatgccgaagattttgtggtctttggactctgtgccattaaatgtgaactcgtcgcacttcgtccttttggtcagtttaagctcccttcgagaaattttaatctcgataagtcaaatcattcgctccgtgtgaacgaagtgagcagtgaacacgcgggacgatacaaatgcaaagcgataaacgaagcaggagaagcggacaaagccacgcttgtgaaggtcggtgaagagaaaggcaatggtcggacaaacgaaacaaaaaagtcgagactaacgaatgccaatggaaaggaatgccgtagataaatacattcccaatttgcaggttcactccccgccgaaaatcgccttggcccaaaattcgttcagtttgctccgtggtgattcagtgattttgccatgcgaagtcgagggagagcccgaacctaaagtcaaatggtgggcgacaaagccaatcattggcatattgtcaccccattcaaatgccaaattggcaggtttttgaatggggaggattttgtggacggagtcattggggaggaggggtcgttggcattggaggcggtggaggagcggcaccggggaatgttcaaatgtgtggcggagaacgaattgggacgggacgaacagaacgtttcgctggccgtacattcggcaccgaccattgatgggcacggcattgtgagaagaagacaaaactggcacaatttaatggcatttggtgccaggttcgttcattgatcgctaaccaaagtgattggttggagttgcgctgccccgcgaccgcacatccgccgccaaagaggcggtggagttggaatggacagcgaatcgactcacgagcggacgccaacggaacggtcactccctccggacttttggcacaattcgaaatgtcatcgaatggatcgctgatcatccgaagagtggccttagcacatgcgggcactttcgaatgccatgtttcgaacgtggccggcgaagaccgaattcactactcactgaaagcaagtggaaccaagcaacatttgccatggcttttggtccgattatttcctttaggtgcaaagtccgcctcggatcatttccgccgattcggtcgaaaatgccatcttcgcttcggttggctcttctcgggatttgctctgttctgctgagggagtgcccgagccgatgatcagttgggaaacggatcat

SEQ ID NO: 16954 - DNA, 874 bp, Heterodera glycines
  unsure (1)..(874): unsure at all n locations
ttcttttaatccatcggcaggtgtgcgcactacaaacattcggagtataaaaggcgtggagttggcacacncaatgccacataatcttttttgtcaccattatttggcggcacggcacgctccgcccaccatgaaaagcgcatagtaataaattataagcacaattaagaaataacacgacaaattggggcattgatgcgttcgacccccatctttgttttttgtatttaattctttttgtgtgtatgggcatttttggctcattaaaccaatattcttcacccccggggggcattaagcactcaaaagcatccgcttgcccttcctacgcgttgcgcttttagtgcttatttttacttacgcctcagggcactcacgcggtttttttctaagcaatgaaacgaaaaatgaagccaaaacgccggaagaaaatgatgagcaggtgactgaccaccaattaataagcgtaggcaacaaaatgcgtcacgcaaatgcgcaagaaaagccgagtcacctgctgcttttcgacgaattatttttaaaaaactccgcggtatacacaatccgattctcttgtcactttttgaattttgtgtttgcgtaatgccattaaaataaggttcaaaaatatatatatttaaaaatggttggtaaaagttatgaccaaaaaggttggaaaatccagttttttaagttttttggtcataacttttttgaaccttaacgaaatttttcagctttattcagactaatagaggacagttagtgctattgactgataacaagattgttggatttggttggcaaaaaaaaaagttatagccaaaaccccgctggggaccaaacgtgccggggcccaactgagcgagtccga

SEQ ID NO: 16955 - DNA, 2095 bp, Heterodera glycines
tgcacgttcgttcatatggcagtaaatattggtgtaactcattgacatttttgggtttttttgccttatttgccaaattgcccctggggaagaaagggtaaaaggagtcagtcagtcggtggtcggtcaatttgattgcgcccaattagtgatgctaattgctgccccacccaattttctcatttgatattttattttgttttatattcgtgtgaggttggataccatttattttttgcttctactgcagcttctccgtccgatgttgtcaactcgttagctttttctcccctattaaatcggcccccatctttggcttattaagcgcccaattcgttccctgaggggacgttcgtccaaacccaatgaatgaatggctcatccgtcgtccgcttcctttatgtgttgttgcttctttgtcacatcactcaggctttatcttccaattatggaaagcagttcttttcatgcatcatcgacaaatgtgttcgcccctccccccgggccgatctcccccttccccccccctctcgcctaattgctttaccgctttacctccccccccccttcctctcccaatttacttttccatcattttcatattccattttagtagttccagcagaactcctcctcagcagactcactttgtgtcctgtcttgtcgtcatattctccctactctctctgcccatttgggcccattaatccctcgggggtgggagaattcgtagcgcggaagtgggggcgaacacttctgacccctcccccccccccccgccgttccgctccccggggctcatccaatttgttctgcgctttccttggtggcacccacccgccgtttgctccgcctcccccctttctctgcagtgcagaatcatttttcagtccgtcattttcataatttggccaataatccgacccaggcggcacttggggggtgtgcttgacagacgacactttttatgtgctgctgctgatgccgtgactgcaatccctttttggaatttttagatattctaacgtcacttccattagcgacattcggcacatatttttggccaaactctgagaaattgcccggagcaccgcaatctttttaactataaaagcaactctttcttccccactgttccacaaaaatcacgcgccactcaacacacttttggttgaaacaatgataagcccctgcaacaaacagcattcatcctcctcttcttcctcttcctcctcatcttcgagctacagcggcgctgcggcattcgcaacacaacaacacgaagttggagcagtagcagcaccgtccgctggttcgtcgtccgcgtgccgtgcccatgcgacgccgccgtgccctcctccatcagttgctgttgagcgggccgatgataaagcgccggtgttggtgtcgagatcaaatttggcactgacgagctgcttctcctcgccctcctgcgcttcccatttcttctcctgtccatcctcaacattccaatgtgtgttcatcgccgttctgttgttgtgctgctccgtgtcgacgagcagcggaagagtgatgggccatcatcaccaccacagtcatcagcagcaaattcagcagttattgctggatgaggacaataaagctgctgcacctccctcagaaatgatctcaatgcttagcggtcagtattaaaaaaagacatttaaatttgtcgcaaattaatcactcaattgaatcccccttattcttttggaatataataagataatttaattaaaatatattaacaattagaaaaacttataggttttattaattatttactttttttgacatttctttaattttattaaagatttgtttccaataaaataaaattggatttaagaatcacaaaaatttatatcactttaaattttgtaaatattaatgtttttaggcgaattgcttctggccccgtcatcgttgcgcaaattggaaacggacgaagcagaaaatgtttgtgcgaaaagcagcgatcgggaggcgacaattgtccaatcattgagtgagtgggccataacacttttttcgctgatcatcactgatccaaccagaaatttaatttatcttt

SEQ ID NO: 16956 - DNA, 3574 bp, Heterodera glycines
  unsure (1)..(3574): unsure at all n locations
tcgccgattttgtttaaaattatttaatttatttaattgccttctacttgagcgctcagggggggggtggctttatttcaagagatacggtaaagtgcttgatttgattggcttgggctaaatttgagatttcacaaatccccccgccctttttttctaacgtcctcctcctgctcgaggcccatttggcgtttcatgcccctgaatttgagttggtccaatgccatgtttccctcctcgtcgtcgttgtccgtcggctgctccaacttccgacgaatttccttccgtttcagcgcacttttctgcaccctttcgatggtttgttgccatctgtcggatgccaaaaattgggccaaattaattaattaatttaattaattaaaattcattttttaattaaaatccttttaaattttgaatttcccacggcttcacgtccttccgctgcttgcccttcacccgcaacacttcggccatcatcagtttggccacgcttcccagcggactgagccgcgcctgggaaggactgtgaagctgaaacatttcagaaaaactgttgaaagtctttaattgggtcctaattaacgctaacctcgtaatagttcttcttcactatcgatgtgtgccgacgttcgcggcggtgtgccgcgtaggcattggccaattcgaggcccaagggacgaggagggcccagggaattattcttaattttcgaaatagactttggcttctctgcgctgaaaagggctgacctaaattttaaaaatgaaattccatatgccaaattttcaaaaacaaacccacaaatttgggacttttttttcaattttccccattttagctgatatttttggctttttatctgttaatcctacctcccattttctatggagtaggcttttcgatttatcggttgcccttccctgtgctttggttgatcaaaattgaaatttcaatagaattttcggatcggaaaaaccggccttaataatttgttctatgtgctatggcattttcccacttgtcccccactttctgtcctccgaatgtgctctttttgctcagccaaacaagtcgcttttgcctccgttccgttttccgtcggctctctctgatctgtgccctctttttcatacggtaacggtcgaaacggtaggatttggcaaaggcctaaaacatttgtctgggcaaggaaattttgagtaaatattccctcaatttgttatttcccaattcactttcgcataaatttttcgtccatcaaatcctgcgcgcaacagacgcgacacacagcgggcgtgccgtggcaccgaattggcgacgtttgaacactcgccgaattcgtcctgggcaggtcttggcagcgatttcatcctgaaaatgccataatttgaaatttgtttttcaatttgggtcttcggacgagtgcactttttgttggccaccgcggcgagcagtccggacagagcctggtcaatccctaaacaagcagggcaatttgatcagataaaatggtcacattttggtacaaaaagggtcataaaattgattttaaaaaatggtttgttcatcaacggacagtgctggtacagctccatggtctgctccgtgccgatcggaatgttgttgacgcgggcaaaaaattccttccgcttcttctcatcaattgagttgtcctcttccgcagcaatcgtcgcagctttcggtggaaggcgatcttcttaaatcaaaaagtatttttctgtctgatcggagggttcgttttggatccgtgccgtatttgccgaaaattcggtgtgattcagttatcatgatcagtatttagtttgactgtctttagaagttggcatttcgccatcgttcacataacatttgccttttttccatccttttcggcactcaccgtttttggcactgtccattttaattttaattttttcaccttttccgtttaattctccgcttctgctgctgctaaaatttgcctcggcttttcctttcgccggcatttgccgaatcatttgccgcttttcttgtgacgaagacaaattaatcaaaaatgggaggaggaagagacagcaaagcagcgatggggaaggaagatgaaaaaagagaaaaaacatcggacggagggggaagggtactgtaggcaatttggcaatcaaaagcggggtacggtaacctgaaaaatatatttttaaaaaattaaaatgatactgagttgatcacttggagtttgattggaaacattaacctcaacagttgaactgattcaactgatcagtcattgtccatttgccgatttggagacgaactcggcaactgatcaattcttttgataattagtctttttgtttgtttgatccttttttgatagaattttgctccattagcattatccttatgataagcgacacttaaattatttgttgttcactcgcgcgcataacgaattaatcagtcggaggagcaaaatgagtttttgtgaaaatgaaaagcgaaatgaaacaacaaaaaaaaacaaattcttttgttgtgccgatggctttaataggcaaaaaatggcgcgagaataaaagcgattcattttttatttttgccgttggaattatttcggctgatcaaagagttgcgaaaaagacaaggcaagtaaaagcagcaaaatgatcaccaaacaaagggcgattgagtgatgtctttggtgtcaactcattcaccgtacccggcacatggcgaattattggacattaaaaattgtacaccgcaaaactgggcactttgtaaattgggtaaaactggcacattgaaaagtaggaaagaataggaaataatttttgtattgactggtctttctgtcctaaaaattgtggcttttatgctgatcagtcttgatggctctggtcctcccttttttggaagaatcccgaaaaattaagcactgaaacaaaaaaagggggaggggtcattagagaaaatcccatttaaaattttaatcattggcatggcacggcatacgccacaaaatatgaagtgagaagcacccgcaaaagggcagcagcgggggatggtttccgtgttgaattgttttttgttgcctctttttttggctgcaattcgttcggttaatttgtggcggcgtcggtgcccaatgaccggacagaaaatgcgaagagcgactgatcagaaaatttgatcaaaaccagcaaatggatgaacatgcgttcttttgctgctcgcagcacattgttccttcccaccaccgcaaagaccacccaaaaggacaacagaaaaaagtggcggaatggagcaacagttccgcctgcaccaatcagccgctgctgctgttgatcactgaccgtactgaactgatctgatcatttgccgatgatcaatgcggaacaaacaatgaggaagtgcgaaatatcaaaaataccaaaatttaatattactttcgttttataaaaagttttagggttcacagcaggggctgtgcagcagcgaagtaacggaagtccaagttccgacaatttattgcatcagaaantatgtgtccggtgtaccactgtgaatgggg

SEQ ID NO: 16957 - DNA, 768 bp, Heterodera glycines
aaaaaattttgttattttttaatgcgatttgttatcagaaatttgtaaaaaaaaatgaccaattgattaagtttggggtttttaggatgcttaaaatgaaagaaaaaaagttggaatattttttaaaattaaaattttaattaaaataatggtaaagaaaatgtgaggaatattctatccaagtggggaattgaacccaggcgaaaaattatgaaagatagaaagtttaaccactacaccacatgtgcatgtgtgtaatcccatgactaaatgaaataaaatttaattttttctcaaaaatttctccttcttcaccaatttcctactcttttctcgaccagacccccattcttaccagtgcaaatttttaccggcggtaccggtactagacaaaccggtaacggtaatttcatttttgaaaaaaccggtaccggtaccggtaccaaaaaaccggtaattaccggccagtaccggtaccggtaccggtaccgctcaaccctacttcgaaattaaggaattattggcgctatttgcaaagagtacccttttgaattctatcaaaaacaaaaggggggacccttttgttttgcaaaatttttttaagataaaaatccatgaaaatttgttatccgagggttttagaggtcgctgatcacgaatctgacatctaattcgaggtcttggacccaaagaaccccagggaataatttttcatgactaaatattaaaaaattttgcaaataaaaggatccccccccccttttgttt

SEQ ID NO: 16958 - DNA, 1230 bp, Heterodera glycines
attggaaatcgattgggtggtgcaaaaagtggtaatttgtatgacataatcgaccgatgaataatgaaatgaatccaaaagtaaagccccgcataaaatgttggaaaatgtttgctttgctgaccaataaataacattaatatttattcacgggagaagatcataagaaaaatgcccaattggaataatgagtcagcatctccattatcagaatcagcagcagattatttggccattcttcgaccaccaccaaatcgcaaatgttttcatgcatttttggtttttacatttttgaaaaaatcgaatttcgtttgtcttctttcggttaaacaaatccgggccatattgatgataattgatattttaaagtgagtgactgagagtgaaatctaattgaatcgggccaagaaaaccgggaaattcaagttttaataaggcaaaatcaagagtcacgacttcggcaacgattaaaatgacaaggaaatgtcggctctaatcgatagtatggtgtcagaatgtgtgccgttcttaccagtcgcggctttcgcatcacttccacggggacgccgcgaaaagcggccaactatttaacatttttgaaaaaaaaaactcgaatttcgtttatttctggggccctaccctactgatgctaatttacgagtccaaactcaaattttcgctatccgaagaactgattcctacatatttgaacaaaaaaatcacaaaatttcaggagggctttctctgtacacattgaaaaacgaaaccattagtcttacatttgtttattcacacacacatacatatacatacattcaaacatgcaaataattgaaatgacaacagttttttggggattgatcatgtgaatgggggtttacaatacaatacaacaatgggggtcagacgatccgatttctccacacgcatcgttcttcgggcagttccaccatccttctgtgtgcagttagtgtgtgtgtgcgcgttctgtccgttcgtctcgtcgtcctcaagccggcgggaagcgcgtgattgtgtggctcaggtccggcgcgatcagcagcgtggcgcccgtgttgttattgccggtgtagcggggggccgagaacagggtgatcaggtggcgatccgcgaagtattccacgccgcccgtgacgagctggaaaaaatgggggaaattattagtgtgcgagagtgaatgaaaagccaaaaaaaaactcacttgatgcg

SEQ ID NO: 16959 - DNA, 264 bp, Heterodera glycines
cggacatctacatttttgaattgaaaaaaaattggtaattactctttctttttctccatattgaccatcatactcatactccccccaccctttctcctccttcattttttttttcctttccttctccaaccctctcctccctctcttgatagtttaaactgaaggcgggaaacgacaatctgatccccatcaagctagcttctgcaggtcctgctcgagcggccgcccggggatcgatccccgatctagtaacatgagacaccg

SEQ ID NO: 16960 - DNA, 3013 bp, Heterodera glycines
  unsure (1)..(3013): unsure at all n locations
ggataatggggtttcaacgatttgaaacggttgcttttgcccattatgctgggaggttcgattcnccactttgtcttgtccgagctaacgaagaaggaaatcgcaaaggggagcagcttagggtgtattgcgaaaacgacgtggaaattctgatggcggcaattttgaagtttcggcagttatttttggggataacaggagatttggatgtgatgaaggacagcgtgacaatcgctggtgttgtgatgaagatattcagggcaaaatttttgaaggacaggcatattccaatcatgccagagggagggtatgagagagcagagaaccagagtaaaatagcggtgaaatattttgagtggcttgcccaaaaaaaaagagtaaaagtgcggcatgcgtgtaacggaggagaagtgcaatttggggggctgaaggtggactgtgtgattggggcagagaaaaaaataattgagtttcaggtaaaagaaaaattatttcctttttaaacaatacttaaggggtgtgcatttcacgggtgtccgagatgtttttttccttggactatagcgccaaacggacggacaatggaagagaataaaagtagaaccgaaattcgcatggaaattttgagggaaaagtgcaaaaatttttcaatcggagaagtttgggtagaataaaacatttagaaatatttattaattgttagttttaggagtgtgatgtcagagaggaattgaagaaaaataaggagatgaaaaagttctttgaaagtgtgccggacaagggaccgatcaatttgagggatgcttatgccggggggagaacgatgcccttttgtttgtacgcaaaggctacggaagaagttgagatatcaatgttcgacatcattagtttgtatccctttgtcaattatggtaaaaatctacagagtttttataattttttccgcgcttaagacactccataccccgttggggtcccaaaaattgtagtgagcagggattttaatgtgaattggacagtgcccgacgatattccttatgatggactgctgaaagtgaaggtcgtccccccgaaaaatctgttacatcccctcctccccgtgcacatcgatgaaatgctcctcttccctaattgttggtcttgtgcaagaagggccaagaatgaatttgtgatgacaaaagatgtgaaaaaatgtaaccatcgtccagcgcagagagcatttttggggacattcacatcaattgagttgcggaaggctttagagctaggatatagaattgtgggattctatcgagcgtatcattttgaacagtttgacagtcaactgttcaaaggatatgtgcggatgtttttgaagataaaggtggaagcgtcggggtggccggcggaggtgaaaagtgaagatgaaaaaagagcattcatcgaaatgtacaaggcaaagtatgacatcggtttggattatgataagattgggtttaatcccggactaagaatgattacaaaattggtgagaaattataaaaaatctttaaaaaatgttcgaatttaagggtttaaacagtttgtggggaaaattttcgatgcgcaacaccctttcaagtacggaaattgtggccagtatggaacgttggatggaattggggagagacaatacaattgagtttgggcgcccagtaaaaataagcgaagagatatcaagagtcgtgtaccggaaaaaggaggagttcatcagggagcataaagtgtcgaatattgttttgtcattgtggaccacgagtgctgcgaggctaaagctgtacgagtacatggagcaggtctacaagaaggaggggtgtaaactgctctattgtgacacaggtgaaaaggaataaaaagaaaataaacaccaaaaatttagattctctagcttttgctcatcggaaggggcgctgtccgttggtggaggggaaatttttggggtaaaacataaattttgaaacgcatttaaattgtggttttaagggaaatgactcgagagtatgcggacagcgaaattttggagtttgtgtccgcgggcccgaaacagtacgccttaaaactcagaagaaagaaggatggtgtgatttggcacaaaaccaaaatcagagggatgacactggatagacgaaacgaatttaaatatgaattgttcaaagagatggtgttggactacaaagaaggggtcaagaaagtttttcactacccggagaagatcgggccgacaaacgacttccgggttctctcaaaagatgtacaaaaagaatatacgccggtgcagaaaaaaggaattattgatcatcactttaatgttttgccttttggatattattaatattttttttggataattttgtctcatgtttatagcatttaatattttaaattaatcaaatttgtttcctatttttagaatgtcaaagaaaaatttccaagaaacttcaaaagaattccgccgctcgaaaaatacaaaaaattatttcaaaaacagtcctaatttggaaaaatgtttcgaagaaatggagagtcacataaaggaaaataaaaaatttgggataaaagagcacgtgacaactttctattttaagtgccccgaaaatgaagatcccgaaaaaatgtttaaaaacatcctgaaaaaattaatgggggatgcaatgatccgtgaagctgagcctggctggaaaattgagaaaatttcagtggacctttattgcagcgccctgtcggaccccgtgatcctccctgcccgccccttccaacattcgaacccagacattgttttcaatgagttcatcacagacagcaatcatttggggaagtgaatttgttagaccagagaatttcaataattattgccacttattctttccctgttaaataaattttttaatttttttgatttctttatttttttgtttattacaattaattatttatttcgaccttttttttctttaataatttttcagttatggacctcctttaaaaaatattttga

SEQ ID NO: 16961 - DNA, 943 bp, Heterodera glycines
caaacgctaatttttgtctaacattcaccagaactcttaattttcaattcacaagcatttttctcatttaattattttttcattttctattgcaatctaaaaaagctggagtaataaaatttctcaatatttgtgtcactcataaattggacttttatataaattgcttaaaatggtatgacaactctcgatgaaattaattatggaccaaatttcagcctgttaagcgttggaaagagtttgatgagccttgctttttaagtcttgtggtgtcgggcaatttgctatgctgttttgccgaactgaatttgcgggattaattcggcaaattccacaatttctcccacgccgctctcaataaatcatttgggtttttataatttcaaaaagcatttttaatattttgggttttttgatgctttaccttttttcaatttggtcgtgtatttctttgattgtacccgtgctgtactggtgcgatgtttatgataatcttattttcggtcatttttgccgctgtttgagctttggcctcccaacgacaattccgggtggataaaaaagtccaacttttgtgtcttatcagtgatcacacaaaattagggcgagtttggtttactcccgcattttcctcgataaaaaaagatatcttaacaagtgctactcgagagtctcgcctcgagtcccggttcccaaatccaaattaagtgttaatttacatgataatctacctattttccttcaaatttagcgtgccatcatttgggcattctttcatacaagatcggccgctttttcctctcgtttcaattgcgcttttcatcccattcatttgacggaacttattgttaaaagtttaatttattcactatttgttttttatgtgcctcgtgccttcattttatgcatattcaaaatcttatttttttgccattttatgttg

SEQ ID NO: 16962 - DNA, 917 bp, Heterodera glycines
tttttcatcattgcagaaatgatatttgtatcacatatatttacattattttttattcctttttaattccattaaattcttttttgagatgtccatttatttccaaaccatgtaaattgcataaggaattacatttaattaattaaaaacattaaaaattggatcctattgtacagtgttgtacatttgtcaggtggcaattatagatttaaatggaatttcggccctagcggaaaagtggttgatttttttgaccagtttttatctgcctaaaactcgagaaaacaggtcgataatttgaattttctaacaaaatgcccctagagatcggtaaaattaaatttgctaatgcggttttgccgaacgggatttgctaaattaattcgataaaatttcgtaacccaaaaattccgtcgtttctcccacaccgatctcaaattccctcatttggttttaattattttaaaaatcgaccacttttccgatagcgctttattttcaattttttggtttttttgtgctttacctttttcaattttggtcatacagtggtggaaaaagtcgactcaaaagtgataaaatttgtaaattttaaaattttgcactttatttgacttatttattccgagattaaaaaccaccttatagttctttaaaaatatgaaataattcatgcttgtttaacttttgttgcggatcaaaaaaatcttttgcacaaattttatcagatcggctgagaaaatttttctggaaatttttgatggctcattgaaaagatcacaaaattctctaccgaattgcctttttatgctaaggttaccatttgaaaacattaaaaagcatcttgagtcaagatttttttccaccactgtatcttttcaatctttttgtgtcatattttctttgtttgaaacaaa

SEQ ID NO: 16963 - DNA, 988 bp, Heterodera glycines
ctagtgaaaattcccacacaaagcatacatagtcgaaagccataaaatatccaagccatgaaaacctctattagactacaaatttgaaaatttcgtttttcaaaaattatgtacagaacgaagtccaaaaattggttttctaacggattcgctcagataggccctagcgtttttggactacaacttttttctttgtcaacaaaatctaacattgttggttggtatcattcggaagttcttcacatgcttattgccttacaaaaagcaaaagattttctagcctgcaaaaagttattaagaaaaaacttgaaaaattttcgactttgcaattttcattttgctgggtattaataatttctttttatattaactcgtaaaatatgtattcatcaaaattttaaatgtgcatattaattttctaaatataggacaagactctcaaaatttcttctaattcgttattaggtaataatttttggaaaaaatcaaataaataggtaccttttgagataaatttaccatttttcagaaacaatattatgtatatatctcttaaaaatttcaggggttaaagagccgaattatattacgtaggggtcacgttttaattgaaaaaagaaaaaatattatctttagttgcgaacaaaagttgaggcttttttaagtgtaattttttgcatttacagagaactttacggttatctgtagggccgcaacttttagtgaagaaaaatcccaaaatagttaactaaaatagtgagtaaaaatcccaaaatagtgaagaaatagtgacaaaaagtccaaaatagtgacgaatagtgacataattttcagccaaaaatgagcaaaaataatttttattcactgggttgcagttgcaaatgagtagggccccaacttttagtgaaaaaactttttttttgctcaatttgtttgaagaaaggagctcaaaaaacgcatttccgctgtaaaaatgtttcatttggac

SEQ ID NO: 16964 - DNA, 1888 bp, Heterodera glycines
ttgtgaggcaaaagacgtttggacactcgcagttcgatatgttcctttgttagcagataagctcagcggtgcggaggcgtcgccggtaaaaaaggaaatacaatccattgtatgcgaaatgggtaaaatacctatggatttttaaatgaaaaagagcaattgaaaacttttcattatgccaaattagaaaaaaattcaaaaattaattaattcctaaattaaaaaactaattttgaaaaccaacaaaaaactcatttttttaaataaccaaaaaaaacttgcttcatttttttgccgaacttattcatttcgaatgtaactttgctgacgaagttgcaacggcatttggctgtcacaacacaggcgaaacgtcgcgattctctttcttcctttcgtttcagttcaatttgattagcctccctaatcattggctgacaagggaaaagttgcgtctctttcatgttgttcataaggactaaacaattatcataaaacaactttattaagacctgtgaattgggctgggattttaaagtttcactaaaatttttgtgggttatttcattttcagttaatattagcagttagccgccgctcaaattgaactccggtagggcgaaaacatgtgcaaggcgtacgccagctgaaactcacaccatacatgtgcaagtggtcgtgtcaaactttggaatcccacggattaccgggctttgtttattgcaaaattttttttccgttttgtgctaatatttattcaatgcttagccggcacaacagggaccacgccttccctcattaatcttttgaaatttgcctaaaacctcccgcctaaaaatgactattttgctgcagatttgttgacggtccactttgaaaagtcaatcttttttccagcttcccccctcccccctggttacgggcctacacccacgtccactggccaatcttacgcgtacgaggatgactctgtccgaccacttgcacatttatttaccgacttttttattttattttacaccttttttttgcggcgttactgtctgacgtacttcttgcacacatcgtttatgggtggggtcggtcgttttatattcaatgaattaccaaaatcccagccctacaaaacattacttttcttataaaatatccttgaccatttttggcaattaaagaacataacatcataatgtccttttccttccatatcactgaattgttcttccaccgtgcgatacgaaattgataaattgtccattgttacaagttccataaagcgacggtacattccgaaactaatgttgaaaatttttcgtcgctaagggcgtagccaaacaaggctgatcgggctatagttataccccgaagcgaaaataaaaaaattttcgagaaaaatgagcaacaaaaatgtcgtcgagtgggtccggttgagccccttctcccgcagccaggagtctggatacgcccttgttcatatcaacgtattatattattactttgcgactttatcacttgagttgaactcataagttttccaaaatgtctttgcacagcttgtgcatacaattgtcactttcaccgcgtggtgacgcagtaatttgcttggttccgttttgaacaccctgtgagacgttattttggccttttttatgatccaattcgtgttcaagtcggtacaggccggcgtgacaagccacccgctgagtgcgagtgtatttggccgagaactgtccgacatcgagtgagatgacatgttgcaaacaagtaaacaacaaggtgagaacgttaattgcgaaatggacaagaatttaatgattggaacctaataccaagaaaatgacaaatgacccaatccctacgtatgcattaaaattttttattacctttcaaa

SEQ ID NO: 16965 - DNA, 851 bp, Heterodera glycines
attttatatttacctaataatgtgaaaatgatttaatttaaaaaaaacttaattaattattttattttataaaaactaaaactcggaccccgaaaataagattttttaaaaactaatgtagcgcgaaggaattcgagatccaaaaatacacggttttaaataaaattcaacagaaaagataattgggttcttcaggaaaatcccactttttgcaagtgataataaaaaataaaggatttaatataaaaagccaacaaatattagcataaaatataattatataatatcagacacaaaattacaacattctacgcagagaattccaagacattccgtgaagtctctgttggagatgattggtggggaaaaccatgagtaaatttaaaaaataaataaaatttgatttggacgataaaaattgtttaaaaacataaaataaaatgatggaaatattaatgaataaagttgcaaaagaaaataaaatgataaaatagttaaatatttatacataataagtagggttgatcacgaccgattattgattatgccgattttgaacccccggggttttttttttgatttcagttaatgaaaaaaatttttagtacaaatcttaacccaattttttaccaaaaaatttaatcaggtatgtatcagggatgtgcctaggtttcgcttttcgcatttcgcttttatttttcaatttggcccatccctggtatgtatgtcatcgaaacgctttgagatcagaatttcgagctgaaaaaaaatcagagaatttttgcaaaagaatattatttttactatttatccaattaaaaaattcaaatattattttttcaccctcccat

SEQ ID NO: 16966 - DNA, 1229 bp, Heterodera glycines
tggacaaaaaaaagcaaacaatgatttgtggtggatgctcaatgtcgttattattcaaaaaccattataattaataggcgttatttgaaaaaccaccaaaataaaaaaaattttgcttataactttctctaagcaaataaatttttaattcttgctttcgtgttcacttctgatttatgagtatgccaagaatgatggcacaaacaacgaaagtggcacatttagtgttccatccgtccttccccccactttttcactgtcaaaatgaccgccaaaagcagcgaccaattctcaaattaatagccgaaaagcctggcaaaagatttctttcttttctgtccggcttaattgtgttctctccccgcccccgggggacttttttgctttatttatttgaatttgctgccatttgaacgtccctcccccgcccaacggccattagcaatttggcccaactgcgtttgctatggctttgggttgtccgtcgtacccgtcccgtcgtacaccccccccgccctcccctggagcggtataaatcaaagatcgcaccgaaaattcctccccgccccacacacccatcgcccgcgatcgttttgttaaatgcttatatttatgtcagaaaaagcaaagtttccgacaaggaaattttccggggatttttggccttggccagcattcatcgtgctacgatttttcctaaattcagcaacataagagcgtttcctaaatccaccgcgcggattttgaggcaaatggctattttctgctaactcctatgaataaaatgcaaaaaaacaacgaaaaagcacacttaagttgtttttaaatgcgtccagaaatttgtaaaatttataaaaattcatagcctaaaatggaaaatattgatcatagtccacaaactcaaaaatgcataaaaacggtcagaatcgatgtaaaaaaggttagaaattggccggaaaaatagaattgagggcgcgcttgccctttttcaggccgaaaaagtgccgaaattagagtgccaaactcagctgggactcaaatgaccgcactataaaaagtactaaaaagacattttaattaattttctagggtaatttgtggcgctgatcacgaatatgacctttattttgcaaaattccgaaccccgaaccctaattcgaacaaaatttaaaatttataaattaaaagaaaaaaaaaattttttatgggttttcgaggttgctgaacac

SEQ ID NO: 16967 - DNA, 4321 bp, Heterodera glycines
tttttttaattttttggattttcacaggctcaaccaacacgcgctgaacatgacattcagctttctgtgtaacactgcaatgtttcctggagttcatgagcgtttcatttgtgcgtcattttaaaaatttagaaaattttaaaaatttataataatttatttaaaaattcaatttttttttttaaattgccccccccccccaattttaagtcgtcactttggacgacaaagcgcgcgatgcgctgcacgagcattggccaaatgtgcgcgtttttcattggccaacaccgagcctttacgtaaagccacaaaaaaatttaaaaattttaaaaaattttttttctaaaattcagaagcagttcagttttgccgagggagcctatcagacggtaaaaatttaattgttttttttaaaattaattctgaacagcattgataggcggaaatttttttttttaaattaaaaaaatgattttttccgactaaaaatgggaacaaattacaataaccccgattacagtacgctaatgggtgctaccgtatgttttttacgttgtttctatgagaatttgataaaaacatcggcacattcaaatagcccgccagtgttccaaaataaacgccgctggggaaaaattaaaaattttaagcgatttttttggcattattttcaattaaaagaacaaaaaatttgcataaaaatttcagagatgtggaattttagagataagcccatttgagagcaatggagaatatgagctaaaattattataaatcccaaaacttaaaagatataaaaaatcaccaaaaataataatcaggactttttattaatttaaaaaataataataaattaaaaataaaataaaaaatcgatccaaattattactgttcataatccatggatgaagagagaccattgttctccgtaaacactttcaaattggcgcaaattgccttcgccgggaaatgcaagtgcttggaaagtgtgtccaatttgcgtcgcaattcggcacaaaatgccaacaatgtgtgttcaaccgaaaggcattcatattcgtcggatgatatcatcaaatccatgctgtcgtgccgttgttgttgttgtttttggacttgttggattgtacactgaaaacgaagagttgtgggaggacgggagttttgatgacattttggcacagttaaaaaaatatttgatggcattttttatgccgccatgaaaactcgagacaatttttacggcatttttctgtcgccataaaaacccgagactgattgctgccataaaaactcgagagcgagtcgatgacattctggcataattaagaaaatatttgatggcatttttttgtgccgtcacgaaaactcgagacagaaaaagcccaagatcaaacagttcatctaaatttgatttacattcatttttgttggcacaacaacgtccctgagcacactttgctgcccgtgcagctcttcaatgctgaactgcagttgcacactgttgtcacgtcggtggtgcacaatttgaaaacggcattcactgtcgaggacggcatttttggcgtttcgcaccgttttgagaaagttggcagagagttggcgcaattgttctggcgttgacagcagttggcacagtcggtgactgaactgcttgagaaagacgaaggacagctcgggctcggagctcacccaatcgatgataacccaaaaatgtggggaaattaagatttaaaattgctttaaaatttgaatttttaaagaaaattccgaaagggtaagaatttttaaaaattattcgggtttcttttctatggaactgctaatcagttagggctgggatttatttacaacaaaaaaaaatcccgaaatatttagacaaatatttaaaaaaaataccaaaaattggagaaatattgatcaaaaatgagaaatttagagcaactaaaaattgaaatttctcttctaattgaaattaaaagaaatatttatcaaaaatgattaaaattaaatttaaaaatatttttatacatattttatttatgaaaacccaaaagatttttttatttttatgactaattgccgttaaaacgaaacatttttggctaaaatgatgattttttcttgtatttctcattaaaataaaactgcaggaaaaaataaatataaatcccagcctctcggatcattctgatcaccccaaatgattaaatgatcggagggtatttatacttttttaatttaattattttgaaattgtaaaaaaatttcaatttttggcaccccaccagcgggtcaaaatgaattttgtgcagcagcgaaagtgccaaaatgtccggcgatgcaagcaatgttggcacattgttgttggtgttgctcaataatgccataatgttgctgttgcttccgctgctttccgacgcaaaaattcgttgaatggcagccattgtctgcagacagcgttcatcattttcaagcagtgcatccatgaatgcattcgacgatccggcatacatttcgttcaaattggcgacaaattggcgtagcgtttcaaatggcacaatttctgcttggcggaggggggggggggaatttgatgttaattttccgataaaaatagggtaattagcgataaagtactggcaaaaaaacgacagtctctctagtcaaagcgtttcccgcccccagtcggcttccattaattaaccgccgctaattaatagttaattaattctggcccttccccgctcgggaagattaaaagggtcactcactaccataggttttgatggtcccgggagatttactaccgaccctcaattttctcgtaaaatccaatcaaagtgagccctaaggcgaaatacagggcactgttttggcgcatttgcgttcgatcctcgcccccagcaacaatattggaagatgatgatggtgaagcatttaaattggtcgctgctgacaaatcggcggtcgtaaatgtttgggtgcgcgaaacgccgccaaaccaaaccctgtctttaaaaatttagatgtcattttaatgaaaatatgtactagggttcgaattggaccaggacaccaacgcctggatttttcctgaatttttcaggtccatgccatttttcggcaaaattggtttttcctggacttgaattttcatggccctggattttcccgagtttttcctgggcctggattttcatctgactggattttgccaggccgcgatttcccatggtttttcccaggcctgggttttgctggattttggcccagaaaatatagatccaggcggcttttttaaaatttctaattctcgtaaatacatttgtttttaaatttttataaattggaaaatgggaccagaaatttaatgccaagatccgtgtggccaagaaaaatagaggggacttggcactcgaatatagattttgagaagggtgccaagattatcaccacaccgtttgtgaagatggcattgcgcatgtcaatgaaaatgaatgccgaaatgcgtgaggccaatgggaggtggccaatgcgtttgaactgatgccgaagcaaatccaattggacaaaacgccacaacgatgccaacagcgagcgccgatgtggcgaatcgtcgtcactgattggtaagcagaagccctgctgttgttgttgatctgtgcattgatcgaaaattggtaatgatcagatcaggatgaaaagtgcgatttaaaattgaaatgatcagagcaggatgaaaaagtgatcgattggataccatcagtagggtaaaaagtgatcgattggatgatcagtagggtgaaaagtgatcaaaatttcggaatgtcatttggcttactgttgtccaatgaggccaacagtgtgccaaggcgatccgccaaaatgccaaagtcggcatctgacggtggaacggcacaattagaaagcgactttctcagctggtataagtcagacagagaaggcattgttgatgaattctaaatgatttaaaagcgattaaaatttaattaaaaagaaacgcaaattttattattacattttatttttagcatttttttcgccaagaaatgaccaagttatgcactttggatcagataatgcaaattttagcgaaatttgttaagaaaattgaatatagaaattttcaaaaaatgcaaagatcaagcaaatgttaattatatcagattaatcagaccaattcaattacatcgacaaaaaatctatcaaaaaaaaatcgctagaaaaaatttttaaattaaatttctgttttaaatattgttttttaattttttcccaggggaactgatccggggaa

SEQ ID NO: 16968 - DNA, 1421 bp, Heterodera glycines
  unsure (1)..(1421): unsure at all n locations
aaaaattttcggaagtcgganctcggaattccgaggccccaaaaattttcgggaagtcggaactcgaaattccgaggccccaaaaattttcggaagtcggaactcgaaattccgaggccccaaaaattttcggaagtcggaactccgacccaaaaaaggtcggaagtcggaatttttgaaaaattttacagaaattttaaaatatttcataagttaactttaaagttataaatcaaaattactaaatataaatgtatttatgtattaaaaaattaatattaaaaattaataatcaaattcaacaattgataaattggactgcaaaaaaatcaatttcctaacattgtctcccttaatccggtttcgcaaatccgtacaaatgagcccggctttagaaaacaatctttcgctttcaactgatccacaaggtgcgctcagaaattttcgggcaacacgacaaagaagaggccattttccatgttcttctttcaacttccagtaatagaaaatacaaacagaaattaaaaacagaaattaaaaattctcaagaaaattaagtttttttgagtccggcggtgccgataggtgccgtcggaaaaaaattgaaaatttctatgcaatttattaacataaattgtacaaaaattgctaattttttgaaaaaaaaactcaaaaaaattccgaaaaattccgacttttcatcaaaaatttcggaagtcggaattccgaggccccaaaaatgtcggaagtcggaactcggaagtcggaattccgtgccatccctgatatccaccacgagatagaagaatttttccgcgatttgttttagtctctgcgaatcggagaagagccatgaaccaatgaatttggaaaaggaatagagggaaaaacagcaaatgatgaacaccagcaattacaactcgagaatgaccatcagcattcgggaatgccaaaacaattcctctccaaattctcttatcaaaatgacctcccaagaaaattgaccacccgagataaactgaacgaccggccttatcactatccaacggccaaagtaccactgaattttaccacattgaaaataagagaaagatgcgttatttttactacacacatatatcaattttcattaagcatagtgattttttaaataaaaatgactttttgggtcagtttgaccctgaggcagtttgcttcgggcaaaccgtggattccggctggttcatgtgaatacataataataataaaataataatttaattctctgtcgaaatctgtcactgtcgaaatcagccactgtcgggaatgtcggaaaacagtaaaataaatgaaaatagttcactgtcgaaatcagtcactgtcgaaatccactgtcgaaatccactgtcgaaatcggtcactgtcgaaatcagccactgtcg

SEQ ID NO: 16969 - DNA, 1071 bp, Heterodera glycines
acaaaccctatctttttggtatcattcgaaagcgcacagtctaacgaagctaaaatatataaaaccgcagcgttcaggcaattaccaaaaaagatttgattaattaagtaattgctgattattttcgtttgtaactttcttgaaatgttagaattctcttgttttctcgtattattacattattcagactttgcgctttcgaatgatacaaaaaaggtagggtttgtcaacatgaacaaagttattgtataaaaacccgggattgtcaattgattggactcataaagtgcattagagccgaaagtttttccttgtaaaacatagtcccgctggtcgccgccacgattatatacatatgacactcattttgccaaattcgaacaaatcccatcgaaaatttacttcttccgatacttacttattggagttccacataactgttttaaacatgcgaaaatttgtccaaaaacttaaaattaattccaaaaaaacgcatgattctaataagcaataattttttgttattttttacagtgtcgtcaagagttcaaaatgccggcattgtacgtgatggactccattcttcgtcaggccaaaaaacaatacaaacacaaaggtttttcatatttttcatatattttattttttttatttatttaattttttctcagatgtttttgccccacgatttgccaccaatttgacgaataccattcaaaatgtgctcacctgcgagtcggctgacagagtttgttcaacttattaatgaaaattttaacggaaatttttatttttggtttttaagtgcccgtttatggctcataaatctccgtttttctacttatttttgaaaaatttatttttagctaaaagttgttcgggtggtgaatttgtggcaagcgcaccaagtcttcaccgaagacgcgcttgagcctgtgctgcaacatttccgggcgatgggactcggttggcatttttgttttaattggaattttataggattcaaataaaaaaacaataataataaattaccaaccgggcagcatatggaaaatttttctaatgggattt

SEQ ID NO: 16970 - DNA, 2756 bp, Heterodera glycines
acagaaaaagtataactacttttaaatgaaaataattttaagtgatgaaaattttaaaataacttcgtagtatccgctagtcaaatctattttgcattaaactcattattttgagcaggagggagtccgagatagaattacacaaaatatgtgaatatgttcttgtgtttaattaaggcctttaagcgaatcttttaaccctttaataatataagcgagttgaaaacagtctcactataaatatgtgcttattttaaaattatgaatacctcttttgaaaaatgcaagtatattttaattggtgagtaattttcaaaattattagctaatcaagaaaggccaaaaattgtcctctattagtgaaaagaaaaaattcctatttttactccgcagtattcaaagtcaaacagctgcagacagaaaaagtataactacttttaaatgaaaataattttaagagatgaaaattttaaaataacttcgtagtatccgctagtcaaatctattttgcattaaactcattattttgagcagtagggagtccgagatagaattacacaaaatatgtgaataggttcttgtgtttaattaaggcctttaagcgaatcttttaaccctttaataatataagcgagttgaaaacagtctcactataaatatgtgcttattttaaaattatgaatacctcttttgaaaaatgcaagtatattttaattggtgagtaattttcaaaattattagctaatcaagaaaggccaaaaattgtcttctattagtgaaaagaaaaaattcctatttttactccgcagtattcaaagtcaaacagctgcagacagaaaaagtataactacttttaaatgaaaataattttaagaggaaacatcctcaacaaaaagggagaggatccggcaaattggacaacaacaaaattccgggacgtgcttaacgaagcagtccgcaaagaagtccaaatccaagaagtgatgggcgaatatggacatcactacgttcaaccaaaggcagaagttgtctcagcagcacacgtccaatcgcccataacagcaaacaaaaggtcacgaaggcctaatcaaccaagcacacaacggcatgagtcattcatcgcctcaacactggatgagagtctaaggcagcaaggctataagaagcaacaggacatgcaactagcaaacagtcggcatccacaagcgcgagaccaagcacaaagcatcaacaggattccgccctatccttgcacgttctgcaacggcaatcattggcacgacgagtgccaaaaagtgaacacactcaacgaacggatcggcatcgtcagagaaaagaagttgtgcttcaaatgcctgaaggcaaaccatcaagcatcgaactgctctcgaccgtccaagtgctaccattgcaaacgtcggcatcccacagcactctgcagagatcagtgcaggtctgagaatgacatcaatatgccaagcaactcgtacagtgaaaagaagccaaacgaccagaacggcaggcgatcaacagcgatcgaacaacagcagatgtgcaatgccgtccaaagcagggacaccagagcattgctaatgacagcaagggccacgattttcaatccggcacaaccaggcctcagcatgatggcaacagtgttcattgacccgggaagccaccgatcgttcatctcaagcagtgcagccaagcagttggagctgaccaaccttggaacggaagaatgtttcctcacaagctttggcgaaagagagccaaagagatacttaagcgaccgcgtcgcaatcggcattctttgtcctgacaacgacagattcatcttcaacctgaacgcgttgaagttcctgttgaacgaaatgcccgtactacaactgaatgcgctggaccacgatgggcttcagcagaagaagcttaacctgccaaatgcgccacggcaaccagacatcttgcttggaatggatgtttggcacgagctaaagattcaaccaattgaacaattgccaagcggcttcacaatttgtcaatcaaaaattggcaatattatcagcggaaagggtcgaatcgaactcagccaaccatccaacgtctctttcgtgatgatggtcaccaacaaggaatcgacaggcagtaaaccgacacacatgcagaaagccaaacaacatcgagagagtaaaacattgagaaggcatcaaatcaacaagctcttgtccagcgctgcaacgttacgatcaagacgcaagcgagaatcggtgcccaacagcacaacaccaatcgtgattgatctttcttccgacagcgaaagaaactcatccgatgtcgagatcatacaagacccagtcgcgggtcaacaaatcagctcatcgaacaaacattcaactgctccattacccaaggcactgcgaaggccaacagcaacaaagcagagttcatcaattgccaaacgaccagcatcattccgcaagcaaacacgaaaagcagctccttccgcaggaataaaccgaacacacgaactcagcagtcaaatgaaagccctgccgccaacagcaaaagaaaagagcgtaaaccaacaatgcatcatggccctgaccagaagtgccgatccaacgacgagtcaggatgactggaagttagcgaaatttcccaagcatttgctcgacaacaatcaataacacccaaccaaacaccaagcttcgaaaagacattaaactagaaaagcaaacaacacatgtccgcaatgacgt

SEQ ID NO: 16971 - DNA, 2272 bp, Heterodera glycines
gaaacttataaataaactcgaattgtaagatttttctttatacgttctccaacttcggtttttaaaattttttgggtgtgggggaaaaaccgtgtcccgacatttgcgcctttgtccaaaatctggttcaaaactaagttttttcaatcactgatcgcataaattgctttaaataaacgattaaaagtgattgtacccgatcatttgatcttcaaaaaatttttgaaaaaataataaaattttcaaacaaaaaattattaatcataatgaaccataaaaccgtgttttcttaattttaatgcttattaggctatcaggggttgaaaaaattcaactttgagtccgattttggacataggcgcaaatgccggggccgcaaatgtcggggctccggaaaaacaatacggcggtgaacggggtgggggaagcgaggtgcttcttcccaaaacggaatttattccaactttgtttgtattatactagtaaaagtttggtgccacaaactgtacaaccttggggaaatcaacatggcgttggtttacaaagacaaattgtcggtcagcactgctccgcccatggcgcgccaagcagctgctcacgtagccggatagccttgaaaaattggggggaatgatcagcagcagtgatcagacccagtcaagcccgaaaacagcagaaaaataatttagaggggagaattcgaagacttttttccaatttgacccctaaaaaaattgtgcaatttttcaaaattttagagtcaggcagaaagaaaaaaaattactttttagtaggttttcgacaaaaaaataacccattctgcattcttgagtcaaattttgaaatcctaaatttttgcagcaaattttaacaaaaaaattttcagtttcaggaggaaggcctggacaagaaatcacaccgaatttccgcaaaaattttctcccgctgttccgtcgttgtcgtcggcactccgtacaattggaggcactcatcgcgtggcaccccaaccgtctcgtccaacgacaacatttgaccgccgccattgcttttgccattagcagcagaagcggtgccgacgccgccagtgccaaaaagactgtccaacacctgtggcaaacgagtggatggaccgccgggtgtgcacagaacggttgaccgcttcctgaacagcacgaaaaccgcgattaatatgcttttttcaatgaaaaaaaatcgccgagaattgagagacaacacaaaattcggctctctacagtttagtctcccaaaattttttagttttttttaatttcatttttaacaatttttagagccattgatcaccacaaatccagaaaatccatttcaacccatttgaaacaccgattcttcgaacaggagatgcgagtgaaaataaatgaatgggccatcagtaaaatttaatcggtattgaaccagcagaatataattttgaagaaaaaatacagtgattttttgttcgggttaagcattcgaagatgggtcgaattggatgccggattcatggtcagagcagcccagaaatctttacactggtatttaaattttgaaatggaaaaaaaactatttgtggacgaacccggaaaaattttacgacgactttacgtcgttgttttgtccgttacagtgaaaattctttttttatttatttaaatgcacgaggcaattcgccagtggcgccattgtttgttttttctcgcactcacccgccactggcgctgtttgtgcaagtgaagcggcaccagggccgcgcaatggcaaatgcctgcacacactcgacaaggcgcagaaactcgcggcgcgcctgtcgttggaattccgcacgacggaccggcaacggcttgaacagatgcgcaacacggacagttgtgccttgctggaaaattttttttgtgtcattttaactatccgatggcacaaaattttaaatggacgaaaaattgggtaaaatatgaaacgattacgggtctggagcattgttcggtggccaactgttccccgttacggccaaatgtgagccgagttgcacagcgcgagtgcacatcacgggttgtaatttgtacgtcactgaaaaaaaagaaaaaaaagataaatgaatattttttaatattcccatgaacgggagcagcttttactctgtatgtatggtttcctctaagttttttaaatttacttaaataaattttttgaaaaaaaattctgcgttttcctttgtcctgtaaaacttcgaaaattggattgggtttcacaaaaa

SEQ ID NO: 16972 - DNA, 3662 bp, Heterodera glycines
  unsure (1)..(3662): unsure at all n locations
attttantctcatatcatttgaaaattttaattttgtacaaattttgaatgaatttaccattttaaggcttggtctgtgtgattctgggcaattttgcgtccggttttgccggcgtttacgtggagaaaatgttgaagagtcggagttcggtgtccatttggatccaaaatgtgcagttggccgcgttggcaatgccaatttcgttggcaatggtcgcatttcaagattggcacaaagtttggcacaacggcggactcaaccagggatttgacctggtcgtgtggggagtggtggcaactcaaagtaaaactccaatagtaaattttattcaatattattgcttttttagccatgagtggcctttgcattgcggtaaatttaattaattaactcattcatataagcaatagtcccatttggatgtgtttttttttgttattttaaaggcttttgttgtgcttttaaaaaaacaaataaacgcaaaaaaatctattaaaattttacataattttatgcaaaaattagccattttcatttctatattttctttgctttaggtggtgatcaaatatgcagacaacattttaaagacgtttgccaattccttctccatcattgtgatcagcatcgcctcaatttgggtgtttgccagcatgccgaagccgttgttcattgttggcgctgcgttgatcatcaccgccgcgctgatctatgccaaattcccgtatcgggccaagcccaaggctgatcagcgatcgaacagcaactcagcaacggacagcggcagtgctgactcggacagcagcaacatgagcaattgtggcacggcaccacccaccggccgaggaggcgacagaatgccaaaggaggaggacaaagtgtcacggctgaccaaactgttcaggatgggcagatcgccaaccatggccaaactgacgccgggccaattggacgccaatggagacggaaatggcgtgcagaaattttagagagagaaatattttatcaataattattattaattaatttttatttttgtgcattttatatcaaattttgctcctctcttctctgtgtacatctttttaataagtgtgaagagcatttgacaaaaagttatcatcaatcaatgggtcattttttgttaagtgataacttcgattttgaccatttgtgcgatcgatgtgccatcattttgatggtgacaaataaatccatgtgttttgagtggagaataaaaatttgtttatttttgatttttaagcgttactttcggatagttcggtacagaacacttttttaatcccaaatattttcggataacagaattatttattaaattaaaataaatatatatgctaaaagtcacttaatgatcagttttatttttcatagaccattatttaaattttattctagcttaatttttaaaaactcaaacttttatttatttttttaattttccccgttctgttagaaagaggtctcggctagagcccggaaatttcaaatttgcggatcccgctgcgggactggaactcaaaattttttgcgggacgggatcccgcgggattaatcccgcaaatcccgcaatcccgcaaatcccgcatttaaaatttgcgggatcccgtacgggattgcgggattttggaaaattcgaaaaaatttcaattaaattcaaaaaatttccaaaaatcaaaaaatgctgaaaataaattttaggggctgtcgggatgcattaaaaggggctgatgggtcgactaagatttttcgattggatccgacggtaaaaagttgatcggaaatcaaattattaacggttcataaatttgactttttttttcttttcaaaaccacttttttgcggtgcaagaaatcggaaatttttcaaaaaatgcgggattgcggactggatcccgcaaaatcccgcgccggtctctattttctagagaccaaccaacccttttcgataaataaatataattaactttttgagcaatatattttgtaaatttttatacttcttagaatattcacggtttttgagtcgatttaaaaaataaaggaaattttccagaagctgtagcgaaattattgattgatcaactggcgtttgccattgatcgatcaaccgatcgattgggtaaaatactgacatttccaaactcacatacatacatattgtgcaattaattcccttctcattccctgtctttgaccaaaacgttggcattgtcccataagcaattttgatcaggaaaattgcgtacaatttttgatcagtcctttcttaattgtttctctgatcatgagcaatttaatgctgatcattttcttatcttttatcacatttttttctatcccagaatttgtttaatttttaaaaatccaattatccaagtgccattattctgtgttgcgaaattgtgccataaaataaattaaataaatttttcttcaatgccttccaacattggttaattggttatagacacacaacgtgtcaccgaattggcctaatgacggcttttatgaattgacatggaatatatattcgatggggtgacccttttgtaaatttgccctcataaaatttcaaaaaaaagtttttctattttatgataaacaaaataccaaaagaaaatgcattataaatggttagccgacttttgcgccgcgacacttgcgccgctcagcaaaaaagactcttgcgccgcggacatttgcgccgtgccatttgcgccgcgacatttgcgccgtacagcgaaaaaagacatttgcgctctgattaaaataaatttatgtgctttatagaataagaattgatagatattcattattaattcctttttcgaagcctttcatgtcaattccatattgaagtgcacgtaatgattgatcaaatcttgatcattttggttttcattgggaccatatgcgataacaagccttcgtattgcctgatcattaagcggcggattttaagcgaaaaaaaataggtaaataaataagggcataaaaattgcgaaataatgcgaaaaatggtaaaataggagcgaaaatttgaaaatcagtgcgttttttcaatgaaattaaattaaaatcgatgaaaataacttattgagaaaattaattatcgaagcaaaaaaataattggggtttctacagaaaattctttttttcagttttttgttagtttgcattcttaatcattttttcatatctttgatgaacctattcaatgttaagattttaatggttaaaaattgaatgtcaatctttgtgactagtaattttttcgaattttcaattagttatttttgtcgatggcttatagttttagtaaaacctattgataatagtggaatttttatgaatataatatttttgacagcgcggcgcaaaagtccatttttgctgtgcggagcaaatggcgcggcgcaaatgtctcatcacgttataaatagggtgaagaagatggcagttagtactagctcagccacagtttccaatcagacgcgggttcgggcccgctaacacgcaaatgtttttccgacttccgacttccgaaaatttttggggcctcggaatcccgacttccgacttccgaaaatttttggggcatcggaattccaacttccgacttccgaaaatttttagt

SEQ ID NO: 16973 - DNA, 1525 bp, Heterodera glycines
acaagtcgatgtaaaaaattcattaggacgcataaaccgtacttgagccgaaaataaattaggcaaacaagaatatcgtgacttttcaaaaacgcattaccgtcggtccattttcgtggcaattagcacaatttgccgagttccgtccgaatcgatgtcacacaacaaagagcagaataattaattgcgttggaaactttatttttatataatgagagacaaagtgaaaaaaaaacatttttatagtcaagaaaatcccattttaataatttacagaataacattttgatcgtatttttagacacttaattttataaatggtacttaaaataggcataaaaacacgaaaaaaagtcacaaaaatggatgttagaagcttcaaacaaggtttagaacactttttaatttgttctgatttcttaaaatattttcttaaaaattagctcaaaatcacaaaatttggacaaatctgttagcaaatcgcattaaaaattaccaaatttttcttcggcggcgcctagcggcaccgccggcccctaaaaatcctttattttcttaaaaatgactcaaaatcacaaaatttatacaatttttgggcaaaatctgttaaaattatacaaattttctaaatttttcccggcggcgcctaccgacaccgccggccttccgccccgcttgttccccaaaaagtctgaaaaatgcgccacaaaaaaaaattcttaaaaatctgataacacactttttggcaaaacatacaattacaaaaattccgaaacttttccaaattcatccgacatttatacaccgactcactgtacaatcagagatatttggaacatattacagacaaatcggatcaaatgggaatgatgagcataataaatacaatacaactagtgatcaattaatgtcttccgaagaaatccatccgccgcttttggccattgattcgctctctctgtgctgtcacatctgctgttgatcgttttgctgtctgaaaatggaaaaaacaattattattgatcaaattccaaattttttacccatcggtgccctccgccgcgtcccgcccattgtccgtcgcggttgcacgaaaaatgtccaccatttcggcatttccgctctcttccgccaattcccgcgcacttttgcctgaaatgggcgaataaaacgctcgctagcacaacaatttggccacttccgctgctgctcaccttccatgttccgttggtgaatgcccgcgccgatggccaccaaatgccgcgccacttccgtcttccctttgatcactgcccacatcaaagcgttgtgtccctccacgtcaacatgctgaaggtcggctccatgttcgatgaggaaattcactgaaaattagggggagggggtagattttttgttttaaattctcgggggtttctagtgagaatacgcgtcccattgacttttacgcgtcccaaggatttttttaatgttgagaatattttcttttctttctttcagtagaaaagtacaatggacgtgagat

SEQ ID NO: 16974 - DNA, 1597 bp, Heterodera glycines
tggtttgttggttgacttctgcggcccactcctccaccaccagacggcacacctccaaactgccgccaacggctgcgtcaaataagcggaaaagtatcctgaaaatttgagaccaaaatttgtggcatggtatttttgggtactgtaacagtaatcccccaccttcgaaaatccgtttgctcgacatttgcaccatgtgacggcaacaagcgcacaatgtccacctgaattcgaaatggaaaaaatgttggaaatcatttcgccgaatggaaatttttccctacatttcccttgtaacacgcgtacgatcgagtgctgttacaccgtcaccagtctgcagattgatgttggcaccattctcgacgaagaaatgtgactgtgggggaaaaaatgacgggaaaaaattacgcattttttcaaattttcgtctctctaccaatttccgtttgcgatctgtcacaagcgatcatcagcggtgttacggcagagtccgtgcccaagtcaacgttggcaccacgcgcgaccagaagacggcacagcggcaaattgacatggaggacagcagagtaaagaggcgtcaaatctgcacaaatggggaaaacaaaaatattatgtccaaacaaattgatcgccggaatccgtatttcgaccaattccgaatgctggataaaaattcgaaaaaaaaatccaaatttcattttcgagaaaaagaattcgaaattggtcgaaatggtgccggatttgttaacacagtgacactcgaaaatccatgctaaaacattcatcaacaacactcactcgttctgtgatcgtgcgcttcgaaaatgatcggctcattcggatctgcgcccttctccaactgaaaatgccatacaaaattagtgatttaaaccagaaaaaatgatcagtcactaccaagagatcaacaatttcgaagtgtcgtcgaaagaaggcacaccaaagtgctgatcttgttcgggtgacgcgctccaccggatcaaccgtccaccgcagcaaagtgttcagctcgtcggcgtccagcgaatcgatcagcacacgaagttgttggatgttgccatcgttgatcaggtcgaagaagcggagagtgcgcgtctcaaagttgtccacaacagcatcagccggagcatcagcagcagcgggaggttcagcatctgccttaattgtggggaaaaaatcagtttttgaaaaaaggaaaaatctgatgcagaatttgtgcaaaatatttttcagggggtgggcttcctgaacaatagtaaaaagtgactttgaaaacccggtggaatgatggacttcttaaaaaaactctaaaatgggaggggggggggggaattgaactttaaaagcatggcgttgcaatcacaaataaaacaaagatgttaaaaggatttacatgaaaaatattgcccatgcgaatcagcgcagttgaacagagacgacgaatgtgcaatggcaataatagtgaaaatggaagacgaagacgcaatgaaatggcggaaaatgataatgtcgcatgcttttatatgccaaatcactccctttttggcgtttcgagtctttttgtctaacatttggcttg

SEQ ID NO: 16975 - DNA, 4115 bp, Heterodera glycines
catggaaagagcagctcgagctctacagagggtatgaaagaaaaaatagtatttctgggacttttcagaaatcagaattattctccaatgtggcccaaattttaggcccccagccacagccctttgcttctcccagttttaagtcttggatttgtcaaataaattcaagacttcaaattaataatcaaaaattctcttaaaatttttttgaacccaattcaaaaaaggaaaaaaaattgcagtcaaaaaattattcgaatttctccaattttgtttccataatttccgaaagttattcggtatcataatgccaaaacaaaacgaaatcgttttaaaatattcctttctggacttgacttggtttcttgatatcgaagctgttttctacgctatttctaaaacggttataccaaaccccagatttttgaatccggttttcagaaaaaatgccttgtggtgaaaacaatatttcacatttcactccataactttgtgagttcggcacggatcgagaccgggataagaccattggaaagagcagctcgagctctacaagaaggtatggaaagaaaaaatagttatttctgggactttttcagaaatcagaattaattctccaatgtggcccaaattttaggcccccagccacagccccttgcttctcccagttttaagtcttggatttgtcaaataaattcaagacttcaaattaataatcaaaaattctcttaaaatttttttgaacccaattcaaaaaaggaaaaaaatttgcagtcaaaaaattattcgaatttctccaattttgagtagataatattcccaatcaaattatcgattgattttcgatcgataatttgagtgtgtctactttttttctctgacatccccttccacaaattcaaacctattggatggtctcctcgagagagagagagtacattctatgatttctctgactaatgaaatcgactttaatttaatttgtttttttaaatttattaatcgataattttatttgacccccccccccatacctattggatgatctttgatcccttcaaccgaaacctattggatggacttgtgcgcgagaatttaattaatttaaattttaattaattaatttaaacgagcgagagctgcgcgactatttccgataaattgtggaaaatcaaaaacatggtcgcggtctcgaaccgttgagagtggaagcgaggagcttaaccacttggccacaggggcagttgaaaggtatgggataattgttgactttatgatgaaaattccgttaaaatttattaatcgataattttatttgagcccccccccccaaaaaaaaaaggcaaaacatattgtaaggactgtacacaaataatcaataaacccaagcctattgcatatatcatatccgaagcagtaagtaaattagcaaaaaacccttttcttccggctgggctcgaacccataccaacttactgtgctaaccaattggccattttatgccactgggaaagcaaaatccaattcattaaattgtaaaaaaatgacgtcatcatgaaagtaaaaaatactccgccccttttcttgttggtcacgcccattggtttttgttttgctttgctaagaatacgactccaccttttggctttttagtttcttttttccgcctccattttttttgctatttaaccacagtttttctaaataaaaatcattcgtgttccattttttaaaaaattccatcctccttcgttttttccgatcttcctgcaatgaattctcttaaacgctttcaactcccggagcaaggaacacgacagcaagaggagttggattcagttgaaccgaaacacatcagcgatgtggtcaacttcaattcggccggcgttttttatgttttgggaaaagtgacaaatatgcagtaccgtgtttacaaagtccaaattaattaattaattaaattattaatttttctgtttttaggcatgcccattccgttccaaggggctcatttgtcgccgaaaattgtccgatgataacatgtgtgaggcttgcggccaaaaagcgattgcccccatccacacggtgtttgtccgtcttctgctgcaggatgttgaacaagcagacattgctcaacgtgtcaccatgttttcgagtgttgccgaagagtttttgggaatgaaagctgctgaattgctcgccaaggagaaggagccggagagccttgcgaaacatttggacgatttgattgctgtgaagataattgcgaaagtcaacattaaggttgtttttttttgcaatttattacatatttgacaaaccacaacataggcgaacagtcagacttacactggatttgattggattgtcaatttgttcaagaagtgccctggaaaaaatgacagtgatgtgccaaaagaaaaagatgatgatgatgatgacgttgatgagattgctaccaaaaaaacaaagaaaaattgagagagagagagagagagataacggattcattttgttgtgagcttcaaaaaaaaaaggatttaatgtgtcctttacttttttaaaaatccattaaaaatgcattttattgttgaagatgatgagacacaaactccaaaatggtcttgatgtgattgcaattttgttttttcttcgtgaattcaccatgagacaggattgcacgttgacaatttttcgtaatgagcacagagagatttgcagttggctctctatccgagtggtggatcgtcaactctccttataacaatccaattaacgttgttggaaaagcttggcccatatgcgtttgtcacgtaaccctaatttttcaaaagaaggaaaagcactcctaaatttagttttgatcttcatcaaggctgaaaggggatcatgtgaaaaaaattgaatatttgtgcgttaatcatttctttattgataaacttggaaaaataattgatgaattttttggtaattgataatttcgcaaatcatccatcatctcattggcatcacgctgagaaatatgtcctcttctcttaagaaaatttatcaaagaataccagcataaaatgaaaacgggaaaagcaatgagatagtgggcaagcaatagaagttgcacgaggaggttagaatgaacgcttttgttttcaaatgttagtacttgtatctctggctttaaactggcgttgactgtagtgtttaagaaggccatttttatggtggcattttttcgcattatgcaacttatttatacagttcattaactaagctttgaatcggaaacaatgtggcggttgtagtctatcattatcatttggtcaaattcacccagcactatcatttcaactccgccctcaggaattgcactattaaatgttgcgcgaatgctagttgtcccgcttcttaagagttcataccctgtgctatcgtcgagcgtcgatgtgagtggaattacgaaaaaggtccaaccagatttgaattgctcttttgtgatgtcgaaagaacgctctgaattagccatgccaagtgcctcatacatgtcaacaaaaggacggacaaaaatatctttggcaaagtcaagtttgtatggaacaattgggtaaatcatgcctccagcgtacactgcaatgtctcgaatgtcaaacggtttaaaattaaatggagagagagcataatttccgttaaatgccccgtttgcgacaagtgcgattgtcatacgtcgaggaattgttgcactgaatacattgtagtcaatttcaaacctaccttcacttataaagcatgatttgatttcagtttttcgcactgcatatgtggcgggttgtttttcaagcgttttgtagatgcttaaattcaaagatgactgaacatcaatcatttaagcatacagttttacgtcatggactctaacgcggtatttggtagtattgtttgctttcaatgtctgcatgatgaatgtgtcacgagctttgtaaattgtaaataaaagatccaaattgttcaacaaataaagttcttggtttcccaggtcaaagtccagacgtgaaagaaattgggctcgcttcccaccctcaaaaattttttaccgagctttaaagccctcatcagcgacgctg

SEQ ID NO: 16976 - DNA, 3317 bp, Heterodera glycines
aatttgatgtccagcggtgggtttatttgttttcattttctttttctctgatgaattgtcattttgaagatgttgaccgtgttggcggccttatggtcgcatttcacggtttgtgacaaattaattggccaataaaattcgtttcagctttttggagtatgccgataaattttgcgattgcgctttatttgcttaaccgcgaggcaagtggcaaaaaaggccgagggttttcagtcataagggactggaatcgaacacagaacaaaacgaagcgaggctcaaaagcatatttaaaaataattttacgcttaattacattagtgatgctcgagaccaaaaatttcccgagactcgagaccgagacaaaaaatccgagacttttctcgagtcgagaccgagactctcgagcattactaaattacatacgtaaattcttcggcatttgattttacaaaaccaaataattaatttgtgcctttgtcatttccgccttttctcctccttacaaattaggtcggaatggcttttctcgccggtgttctcgtctctcttctgctgatccctctgaacaaatacatcgcctccaaagtcggccaattctccaacaaaatgatgcaaatgaaggatgccagggtcaaactctgtactgcttccccccccccaatgtttttaatttccttttttgaatacagtaaccgaattgtcccggtcaatgcgtacggtcaaactgaacaattggacggcctttttcgaagccaaaattggccacctcaggtcacgtgaattggctaatttgaagggaatgaaatacctcgacgccgtctgtgtgtacctttgggttggtgctgccgtgggttggctgttaccgtatgttccaccgtaggcatccgcccctaccgtaatcatggtgctgatgctcgtcacttattccgtcgttttgggcgaattgctcaccgctgccaaagtgttcacgaccctttccctgatcagcattctgatcatgccttgtgagctttgtctttgtttcggtcgatcactttccttcctgagttcccttcagtgaacgccttcccgtgggtgctcagtgcgattatcaacggaatggtcagcaaacgacgctttgacgcattcttcgccatccgttgcggtgaccagcgccaaaatattgtcacccaagcggagggagggggtgagcggtcattccgttgctgaacactgaccaatgccatgccaatgtttaagtactgctcggacttgatggcaattcttttgcgtggaacgaaactaaaagcgctgtctccaatgtccattttaacgggaaaaaggtacaaaaaatgaatccaattggatttgtttattttccccgttaagggaatgctaatcggcgtcattgggccggtcggttgcggaaagacgagccttttgatgggtttgctgggcgagacaattgcgaccgaaccgtacgtgcgggtcagtggcgaagtgttcgacgagggatttgcctttgttggccaagacgtgtggctgagagaggggacgatcagagagaacgttttatgcgaaaggccatttgatcagaaaatgttccaattggcggttgattcgtgcgcactgtcctttgacattcaagtgaatgaaaagcctattgatcagtgacgggcaaatgaatgaatcaaattccttcagggaatgcccggcaaagaaaattatcgaatcagcggcgatgggatcactctgagcggaggtgactgactcttgggggggggggggggggtaattaaatttgcaaatactaatgacccttaatctggtcctagggcagaagctccgtttggctttggcgcgtgcggtttacgcggaaaagcgcgtcattttgttggacgaccctttcgccgcattggacagaaccgtcgcagaatttgtccataaaaactgtctgttaaagctgaaggaggcgggcaaattgatcattctgtgcacacaccatgaacgatttttgagcgacgccgacttagtgatcagactgaacggaagaggggagcctgatcagatcggtgggtggtgaggggcgagacgaaaagcaaatgactaagggggagggggtaattagtctaatgggggtaattggcttaaggaagccctgatgaggtgttgaccgcatctcctgccgatgcacaatctgctgatgggggaactctgaatgtaattggcaaaagggatgaggaagagaatgcggcgccaatggacgcgacggaatttgtgggggtggaggaaacagaggaggaaaaggaggtgaaccaatccatctaaattgcgcaattggttgtattattttgaaattcggggcttttttgtcgaagaagaatggtcttttttaattggggtcgcattaagtccatccaattcgtattgtcctaaattgtggcatttttcaggtcggtgcggtcaaaatccgagtttacgtcagttacgtgcgttccattggggtggcactgagtgtgttaattattctgtcccttttcggttcgtttgccaatttctaattttacattttttgaccctttccctgcccccttagcaatgcaaatgtccaaaattgggtccgacatttggcttagccgttgggcttccgccgtttcaccgctgcccaatgggtccgagttcactttccctgcggctgattggaggtgcatctccaatcgctttttccttcgcttgatgatctgaatcatttccttcccttttagttttcctcttttctcgcgtcccattcaaaaaatggtcccattaacgaatgctcagcaggaggaaaccaatttttatcttttcgtatacattggaatcgctgctctgaacaccatttgcactctgatcagggcctttttgtatgccttcggttgcattttggcagctaagcaaatgcacgaacgaattctccaccgaatacttaatgtatttaattgactaattagttgtccctatcaaaacatccccacaggccacgctgacttggtgggaccggacgccctgtggccgtgtgaccaatcggtgcgttttcggcatttcgcttcccaatcagtcagtcatttttgtccttttttcgactgtccaccgacgtgaaccgtgttgacgatgcgttacccttccaactgaacattctgctcgcctccctcttccccctcgtctcctcccttttggtcacggtcgttgctcttccgctgctcagtccctttgtgctgcttctgaccgttgcttatttcttcctccaggcacattcaaagacatccaatcattcccatttgtgctgtttagcgata

SEQ ID NO: 16977 - DNA, 1351 bp, Heterodera glycines
ttttaaagttttttccacaaattacgaatcaaacttattccaatttgcgaaaaccctgaagaatgggagtttttttgcaagtatgattgctgattatatgccatcgccaaatccatggcatttttgtgccgttttcattgaaaaaatcattaaccaaaatgttaatgtgtgctaaaacacaatgaaaatgccattttcatttgccgtgatgccatggcatttgtgcgccgctgctgtccactgaaatgaatggaaaatttaatatttattagggaaaaaaaatccaatttttgttttcaatggctcagagagaagattaggcagtggatcattggggagagtgaagccaaaaatggaggaccaacggataatccatccaaaaatgacccaaaactccacccctccccgtcgcgctttattataatcatcgccatcataattcaaatttgtgccaaatctcattaaaatggaatgttggaaaaaatgcatacccaaaaagcgaaaagtcgcggcggcacagccatttggcactgtttttatggtccaattgttggtctcggcacacaaaattctggtccaagttggcacatacatgcaatttatttgaaacaatattttaaaagtgatgccaacaaaataaagccgtttagcggattcatttagtcgaaataccaacaaatcctctcaaattcaatcaattttttcgacatttgcaagccaaaattccgaaacagatcgagcgtgttggaaaatttcgtaaaaatttaaagtaaatataagttttggcacttcgaataaagcaaccccaaatcgaattaaattttgaacagttggaatttcgctttgttgcaccaaaaaaacatttgtcagcacccaacaataatcatttgtcgtcaaaatcaccaaatggaagtacaataaaatgtttgtacatgacaaaaaaaactttcggccaaaaagacaattaatccaatgagatgtaaaaagtaattaaaataatttatacgcatcgcaaaacggtggatgagggaggatgtgatgataaagctgcatggccgcactgtcgaagaattggaaaacaaaaaacaaaacagagagaggaggaggaggagcatcatcaaatgtgttggccggcccattcatccagacagttaaaacacgctgaaaatgggcaacaaaaataagcgaaatgccatgggtaaacggcagagaccggacggaatcttttctccggcgacgaccttttttttgttgctttttgctattcaaagtacctttttttgcggcgtggttttaaaaaactttttggggggacagggggttcagcgatgaaaaagaacagaaagggtaa

SEQ ID NO: 16978 - DNA, 2225 bp, Heterodera glycines
  unsure (1)..(2225): unsure at all n locations
tttcagaatcaaaaactgtccnaacaccacgtacgccttgtcgaaaccctgaaaaaaaaacaaaaattaacaattggaggcacttttacttttttgggacccgaaaaaatccaaaaagggatggaccctttttcagggatttgaattggttgaaaattcgagattaacgatcccgaaaactccgtgaatttttttactttgtcctccaactttttgccataaaccgggccgattccggcgacagcggtgatttccttgtcgcccatcggttcacccacaaaatccctgtgcttcagtgatgtggacataatcaaaaatatgcaaaaatttcaaattgttgaagagtaagcaagcctagaaaatttaaaaaaattaaggcgaaattgggtaaaattcttaagagaaaaagaaaaagatttcgaaatattgaaatcatcctatgtatcctcttttatccacaaaacaacgcaaaataatacctaatacaacgaatgttacaccgcgagggaaaaatgaaagcgaaagtttttgttcgtattttttgaattttttttttggcaaaatgtttgtttaaatacaagaaaataaaattgttttgtagagacccgacaggaacaaagaactttttacaggaaccctggtcctgaacctgcctatattttgaggagaagtttgcaaaaacaggaacccaacaaatccgctgatttactatccagcgtgatttccaaatcttgccctgttcctgtactttttcaaaattccggtctccaattttttgtccctgtgtctaaggtggaaaaagttattgcctatatgttcatcgactggacgcgtaaaagtcgattgggcgcataacctgcagtagagccgatttgtccttatctgcaacgtcctaatcttacaaaatcaacgtcaaatccaaaagacaattaagtcgatcatttttgccaaacttcggcgggattttctgcctggaaatttggcatttcttcttactgatattttaattttagttaaataattaaatattcattttaaataaaataatttgcgcaaatgaacatcagacaggcgaccagcgaagatctgatcaaagttcaggactgcaatttgctctgtttgcctgagaattaccaggtcaattattgcatcaatcaatcaactttaatcatttaattgacatatcatttcagatcaagtactacatgtaccactttgtgagttttttggcatttttatggatggcatggaccgaatttgcattttttggacttgaaaaccatgtaaaaatacgaaattttcaacttttattcgaattctgaattgtacatccatttggtttgaagccgacctcgaattcatagacccaaaaaaaaccttaaaattttacggatttcccaaaatggcttaattgttgatccatcatcctatattacctatctataaaataccaatttttcaatttatttacacttttttttcagctttcatggcctcatctttcatatatcgcggaagacacaaaggcaaaaataaattaattaaaatttttcattttttttgccaaaaattttcagggcaatattgttggctatgttttggccaaaatggaagaagaaatggaagacgacgagccccatggacacatcacttcgttggctgtcaagcgaacctttcgtcgactcggcttggcccaaaaattgatgaaccaaacggcacggtcgatggtcgaagtgtaagtgtgcaaattcaaaatttgtgaaattattgccacttttttttgaaattttgtcacacattttgccgcatttttgtattttgatctgaattgaattggtacaatgaatgagaaaggttgaccgagaaatttttgaattggctaaaagtcagaggggttttcttcggtcgatgcctggaaatttcttttgggaattttttcgaattttgaaaaaaatgcttggacctggacctggttccatatttgaccagggcatgcattacaagggccaaaattcaagaaaattcaacaattttttcctgcttttccagttacaacgcgcgttatgtgtcgctgcatgtgcggaagagcaaccgcgcggcgttgaacctgtacgcgcacacgttgaaattcgacatttgcgacatggagcccaaatactatgcggacggcgaagacgcatacatgatgaagcgccgattggtaaccgtttgtgaattggccgaat

SEQ ID NO: 16979 - DNA, 1352 bp, Heterodera glycines
  unsure (1)..(1352): unsure at all n locations
actcacctgaccaatgacagtaaatttttaaaaaatttctccacccaactcattcggctcccggaaaatgcgtcagtaaaattttgatttcatcaaataaacaagttccttaggttttcggaatcattgatcacgagcccggtatccattttgatcaaattccgaaccccggtcccgaattcgaacaaaaagttgaaagtccaaatttttgtatttatcattgtatcactgacgcattttccggtcacgactcattctagtgttattttcaatgtttttgtttaaaaataagtgaccataaaaccgtcagcggtaattcgtcattaaaaaatgcatcagtatttcttggttaatgagatacgatagtagtaatgtgattttgtaaattacttacagtaagtcaattacaatatgtctactttttttgattttatcgaagttttattgcgtctaaaacagaattagattccaatctaacgcaaaaaccatccaacaatttgaccaattattctacaatacgctatgccataaattttattttttaaatactgtatcactgaccgattttccggttaagaaaatataattcacctttttcgttcaccaattgcgtcaacaaatttgaccggttgccgaaaacgatagaaaagtcatttccgcacacaaacggataacttcggagggataatttgattttatttataatatattattttatttttcaattacaccttttgtttgtaatggataattccagcagaaactctttgcgcgcacttttcggtctgctcactcgaatgccgtgccattcactgcttcgacggcacattaatttgtcacccttttggtctccttggcactcctcctgtcgcttcgcagcacatttcttggccacttcgttctgccagaaatttttattcaagttgaaaacactttgcttagtcataggttcattagaagggaatatcgtacatcgggaaatttcgttttaatattcactaatgcccctctttttacctctgcctgattttccacccgaaatttgaaaaacactttgtgagtgaggagccccgatatttgcgcctatgtccaaaatcggattcaaagttgaattttttcaagccctgatagcttaaacagcattaaaattaagaaaacactattgtcttctagtttattaggaacattaatttttaattgtgttgtttgaaaattttattatttttcaaaaatttattggtgatcaaatgatcggatacaatcattttcaatcgcttttttanagctatttaggcgatcatggattgaaaaacttaagtttgaacccgattttggataaaggcgcaaatgtc

SEQ ID NO: 16980 - DNA, 2079 bp, Heterodera glycines
  unsure (1)..(2079): unsure at all n locations
caaagccggcattccccattagttttcgctcaaaagcttcccccagctcgttgatatatttcaagaaaattaatttgcttaaattttctaacttnggcgagctaagaagcattattgaaaaagataaaacttttgtctgttcattaaaaagaacaattgagcccggtttgcattttgatgctcatttttcaaagccagaatcaggaaattgactatgaagtaaaccagaggcagcagcagaacttggagcaaattcaacaggccacgggccgattcaacaaatttaagtttatttgtttttgctcaatttgcctgattttattacttttcctattgttaatgagtagggctggcaaaaatatgcacatgcatatttttttcctggactgtgggaggcctgaaacgcacgaaaaccatgtttttagcttgttttgaagcttctaggatgactttccatatgcatattttgcatatttgtgcatatttcgcgatttatgtgcatatttgcatatttgtgcatattttggcatttcgtgcatattttgatattttcacaatttttaagagaaattaatcgctttttgagttttacttgatttagcttaacaattactttagacgacattggaatttacttctgccgattcggccaatgccaccaaaaaaaacaaaatcagcttggattcgtgattggattaccagaattgatggaaatgccatttacacaacggatggacgcgccgtattttgtgaagcatgccaacaacaggtcatcttgcgacaaaagacaacaaaaaatttatattcaatacaccaggctccttctgaccgattttaccagctgaaccagcacaaccaaacggacaaacacttgaagaatgctcagcgactcaaggaaaagcaaaaccggcaaaaacaacaattgatccgaatgacgcggcttgtatcgaggactgtcaagagtgttttactgattctgtgtggcaggacttggcatacagtcaatcaaattttggtcgtttgagtcaggcaatcacaaaactggagacgcagggccttaccattcaagagtcgttggaaatttttgcgggcgtacaaaatgaaatggacaatgcaattggtgaaaaggcagaaagaatccgtgaaaaatttgcttttattgtcaaaaacaacgccggtcttgaaacgatttctcaattttgtcaaatactttcgggtaaaaacacccaatgtgaagtggcaccaaatcttgttccctattacaaatttgctccccttacctctgttgatgttgaacgttccttttccatttataagtcaacccttgccgataatcgaatgcgtttttcaccccaaaatttggaaatgtatctcatatgcaatttcaaccaataaatttgaataaatttagagaaattatacccccaaattggaaaaatttatatgcatatttttcagtttttatgtgcatatttttgccaaccctattaatgagttttagggattgctttttttattcttactctttttattcacatatcattttctttatacatatagtgagtgatgtgcgtcatggctgatcaataaaactcaataatgccctctttgttcgctaattttcgtggctttctttccttgcctttctcttccctattttttatattttcatttttcttaatttattatttttttaatatttcgatattcctccctcctaattagtaaaatgattgccattttcccgcatttcctcgcgctccttccgcttgccctgcttctaattgtgccgagtgtgtgtctttgtgccaaattggtgctgctttcgccctcccaaattggcttcccattgcccaatttgtcgtccgtccattcccattttatttcggcaattggcggcaaaaaaattttcgtcaaatttcggagcgaaattcggcccctttttgtcgcttttgcaacgctcgaggcgccttatttgtacgtggaccaatcggaaaacatccgatcagttgagcatgcggtcgttgaagaatttataagagagaaactgaaaatggatgcgaggaattttaaccgtca

SEQ ID NO: 16981 - DNA, 1517 bp, Heterodera glycines
attttgtattattttcaattgaaataaatttaaatttaaattttttttataaattttttaggatttttaaaatttcccggcccggtcccggtcccgtggcactctactattatgaattgggccttagtccttgaatatgacacggctttatattttcacaaactccccaacatcggggtgttcagccttaatttgttttattatttattgacttttcttctgtaaattcgagactgattgaggagcttaaaagcacaagttcataacttttccattattttggtcaaaaaatacaacaaactatcacaattagtttgttgaatgcatttgggccaatgtcttgtctccctcattaacagtaacaccaagcaaattcacgtgttttccccgtgaatttgggccaaaaatgattggcgacgatggcacaaatgttgccgccacacttattacatcatcagcacacccaaatacaaacattacgcatcttaaatgccaaaaacatttccggttggctgcgctgatcggccgctcgctgccaatgtgtgcaactgcaaagggaggggggcggagggcagacgaacgccggcgcgtgccattgggcgctgctgctgctgaaggatgagatggatggcattagcctttgcattagcaatcggccaaccatttttttgtttgtttgcatcagctggagcgatggatggatggcatctgtcagctgaatggcatgtgccgactccctcccccatattaatgggcattattaattaatcccttcccaaattttcttcctcttcctcctcatttgcaatttttgtttcaacttgcgcacatgatggaactgttgctgaatcaatgttgttttcgtgccgttcacgtgtttttctgttttgtttggcccgttgtgccagccggtgccattcacgtgcacacggcgcgcaaaaatgccactcccagcagcagtcagtcagcgccccgggggcgaacaaacaaacacatgaaccctccccccccccccccggaccctttatattcatccgatttcatttagttccttcattttccactgcttctgctgctcggttcaacagcatcgccaaacggactttgcgtccgatgggcgatttttttcaaatttcattttttaagttaacaatttgcaccttttaatatattatttgttgcataagacaaacaacatttagtgcgtcaatcatacggtagcaaacgaatttaatcagtgattttagctgggaaatggtcaatgatggctcagctcgagaattcactgcttatccgcaaaaaatcggattttcttgcacatttggattatcccctcgggcaattctcaaaaatattctcggtatttggtgactcttataagaagtgaaaacacacacgcatacaataattgtacacacgcacaacattattaatattttaagtatcatatggtcgctggaatcaaagtccaatggaggcggagcaaagggagaagagagagagagagagggggggga

SEQ ID NO: 16982 - DNA, 706 bp, Heterodera glycines
ccccgagcggcggggcgcgggaagtgcatgtgaatgggacagggattgccccttcccctcccccgctgctgtgcccaccacccacgagtcaggcggtgcagcagcacatcacccccccccccccccccccgcccaattccgtcgttgtcgtgtgactgtcccccccccacccgccgttttatgttgtcgacgattttcgcgtgttggggttgtgagtgagtgattcctccccccatccccgcgcctgttctgtccccgcaaaattacacacgcaggcggacagaatttttgagcggggtgacgcggggctaacaccgaccaaacgacggacgaggaaagaaagaaagaatcaaccaaacaaatgggggatgggcatgtgaatgtggtggatgggatggtgttggacaaaaataaaatgtgcgcaacgtatgatttttgaggagggagagaatttggaggggggggggggagaatttgcaaaatgatgataaaagattaaaaaatggttgccgtttcgaatgctggcatttatttgctggcattgaattttaaatttgaaaaaggggggatttgcaaaagattcatttttaagcagacataagcattaaaataacacaaataaaatttaacgaatttccattttcaagggcagcgcacaatgaattggagaagaatcggcgtgccaaccttcgcgggcacctcgagg

SEQ ID NO: 16983 - DNA, 3355 bp, Heterodera glycines
aactaaaaatatttttagttattttttgtttagtttttatttatttaattattttatttgcaatttttataattatttcgtaaattgtcgtaaagctgagttgtctgatagtgagctgtccccagagctgactggtcctgacgcgattataaaaatatttttgttttttcatttaatttaaataatctattctattctaattttgcatgggtttgccctttcagtggggaatggccatttgcacaatcgatggccaacagttttctttgggcgattcgctggcaccgttctgttttcagtccgtctcaaaggtgacagagacttgtaaaaggcaattaacaaaatgacagtttaatcaaaagagaaatgcatgaaatgttgtcaattttcggcactttttccatttggtcgactcaatttgggcttaaattcaaaaataaaatgcgataaaccctcgaagagattccggcaaaatgaattatttcgccagaattagccgttattttctacgaccctcgagcttctatcattttgtaaggcgttcaattacgccatcgttgcctccgatttgggtgattatgtgcactctttcgtcggccacgaaccgtccggtcgattgttcaacgaaatttgtttggacccaaacggtaaaaaacggcatataattaatgaaaaattatgccaattttgtttggcatttattttgcccatttgccccaaggaaaaccgcacaatccaatgataaattcgggtgcaattattgtcacttcactgctgaaaaagggcgtcgcaatggccgaccgatacgattttgtgagagactttatattggtggtgatgatttggaacactttccattttaaaggctttcaaggagtacaaaaagcttgccgggggcggttacatcggttttaacaatgccacgtaaatattttttaattgttgaatatttttaaattaatgattaaattttaatttatttgtaatcaaatgccccaatttggcacaatttggaattgctgatcacttttgattgattgggcttttgccccactttttgattgcattcccttctccagctttttgtctgaaaagaagacggctgatcggaattacgctttgtcctattatatgaaggtcagtcggtgccgaccgatgctttaaattggtcataaattcgcattttggcacgcgaaacaaaacaatcaaaacatttttgcacaggagaacaaatgttttccgcccgactgcgcgacacttcgcgaggaattggacttttatttccaactttgctcattggagacgcactgcgaatcggccgccgttatggcggcgacaatggccaacggcggtgggtaaaaagaggggggggggcagtaaaagaggtgaaaagggggtgccatttgcatgaaaaatttggcaaaaatggagaactattggagcgattcttacagcaggacaaattaccgtaatcctctaattgaatccatttgccatcctaatactgtagccgtctcacatagatgcaggtgtttgtccgttgacggaagaacgctgcattcagagtcgaccttgtcgagacgtactttcactgatgtattcgtgtgggtaagaaaattagaaaaattgaaaattgttgcaaaaaccgacaaaatcaaatggcaaatttgcgcagaatgtacgactattcgggtcaattcgcatttgatgttggtctcccggccaagtcgggcgtgtccggcggaatggtcgttgtggtgcctaatttgatgggcatttgtctgttctcgccacggctcgacagaatgggcaattcgacgaggcacgcgaaaattggggaaattttaaatttatttttttaatattttattgttagaggcgtcttgttctgccagaagctgatcgacactttcaacttccataattacgattcgctgttgcacgccgactccaaaaagatcgatccccggcgacggctgggcaataccgagactgacttggtggaacagagcatttaaagctaattaacgaaaattgatcagggattttggggcttgactctgatcagcacagagcccgagacccgccccgactttctcttttttatccgatcacggattcctgaatttaaactgttttttcagattgtcaatttgctttacgcgtccaaaaacggtgatttggaaaccgtaagaaggtaaaactaatttattccttgtaattagacttcctctggcttttttgaccactttcccattcccattccccaggttgtatttgcagggcgtcaatttgaacatttgcgactacgacgggcgcacgcctttgcatttggccgcgtgtgagggccatgcgctgctgctgaagtttttgttgaacatcgcccgcgtcgactacacaattaaagtgggacggggatgaaatgccgagcagaaatgccaaagtctaatactgaaaaatcaaacatccaacctaattggaccataatccaataaaatgcaaaaacaaaaagttatggtccaaaaaatcgctggcgacgtttcggcctgtttattttgtcctcctccgatactattcgagaacgaattcatagcgaaagaatttaattttaaaaataattttctcctctaattttggtcttgcccagtctcgagttcctttctgggtttcggtctcgaaatggtcttttcctcctctgccgttcttcaaacggttcaatgcttctcattttgaggaccgctggggccgttcggcgttggacgacgcgcggacctttcaccgcaccacttgcgttgcgctgctgttaaagacggcacagcgacggcgccgctcatacgaacagcgacagcagccgcagcaatgcgattcgccgtacaccgacgaattttccattggcgggttcgttggcggacggtgggcggaacaaagggcaccccgcggggaagaatgggcacaaagcgcaccgaaattggcatttaagcgaagcaatcaaatcgatgcgagacagaggctaattagaccaattaagaaattattggatcgacttttacccgtacattttttcttgggtttcgtaaaacttatcatcattagagatcgacctggaccaaatccaggcctggatttttgtccaggaaataacacgaaaaacctggatttcctggaaaaaattttagaattaattattttaagtgaccaatgtttttttcaacttatcaaaaatgattaaaaacttgtgggggcaaaaaggaaaagcgagcgcacaacctttgcgtcaccgaacagcacaaagtggtgcaattgattattcaatttattgggataaaaaaagtttggcacgtcataactcggcacc

SEQ ID NO: 16984 - DNA, 2467 bp, Heterodera glycines
  unsure (1)..(2467): unsure at all n locations
tgtgagggatttaccaatgcacttgaaaacgaatttgtatttcgaaatgaaaacaaaaatcaactgctttttccgtgaaggcaaaaataaattataattcatcgaacaaatgagaatcaaattaacaaattgtcgtcctccggccgatttactgctccgtctcgtcattcgccgccgtggtgcgcagtttctccaattcttcgacaaattttttgaaacgctcctccaactgacggagtcgctcaaccgaagccccaacacggcccacgatatcttcgcccttctcttcgtcgttcgcctgatgcgctatctctttgaccttttcattgaacaactgccaattcttatgatactccgcgactcgagcctggttcttctgaaaaaaatggaaatataatcaaatagcaatgtgtctggtggtatttttatgttaaacccgggaaaccgacggcaatttccatttccaaatcatttttggaaaaaaattggcaacattagaggcggtaatatttagtgccaagattttcagaccaaacaatcagaatttttgattcccaaaaagatattaaatttcttatttatccggaaatttattagcattgacatcaatcggtgaccgtccacttcccagctgaccttggaacgcgccatgagtgcgtcaatctcgtcaatatgcttcttctcaccgtgtttcaacaaagtgccaatgagatctgcatcttcgtctctttcttcgatccattccctcaccccaagaacttctttgtcaatgatttgcaaagagtttttggagtgatgttgaattgaggatttgttaaagcacagctctcgttcgatcgcggccacctgagattcacagcggttcatatgattgaaatttcttttttttaaatagtcttaaattaagacttaatgctctttgctaaaacggaaaacacaagttgaaaacagatttacgattttcctaaatgcagctaaactgaggaacgtcaatttatgcaacaaaacacataaactcctcacataacgctatcaatttccgcttaccttcacttcaatctgtcgcttccgttcaagactcagtggacgaatgatcctctgacctgactccttcaattttgcaaagtttccagtttcgaaacgcgcgaccgaggcagacaatcgggcaacagcatcagcgtcacaagtctccagtttagccaccgcatttctcagagaatcgacctgttgttcggccaattcgctgctgctgtgccacttatcaaacgcaacaacctgaaccatacgctaataaagaaatataattaaaaggttgccctttggttagttcgtaaatcgggcagaaaatgcaaaaagtgccaaaatccgaaatttttgtatgagttttgaatttgatgcattcctaatcaaccacgaatcgaactacaacatattttttattaccattgacttttcaaacgcttcgatgttgcggctcaggtcatcgaacatcttaaaaggaataanagaattagctaaatctctatttcctaccacaaaataagattttctccatttgacgacgcggggaagcataaagaaacggacaacccaagaggagtacaaatattagtgaaatcataattagggtttgtaaaatggaccatttcaaaaagaagttcagtggggagtggtttaggggtcattagagcaaaatcagtcgtgggatggactttgatttgggttagaatgagtcagggaatgtgaataccgttgttttatacggcaaatggagggacgcgccttcccacggagcttttacggtgtttctgttttgcccacgttaaccttcccaccccactcaaacgccggggcaatgtgatgacagaaccatctccgcaaaacgtaaatgggaagggcggatttggatttttgaaaaaccaaaaacttcgaaaaaagaaccaatgaccacgtcttacacaacttttctatacagtgaccatgcccaaaaagacgacaccaagaaaacccattaaaacagctattatagtcagcaaatttacccattaacccttcaaattgacaaaatgataaataatagtgacctgctggttttcctcctgtccatcagtcattttgttccttttttatatggaaataaataattcaatgtgtgaagctaaaaaatggattgcattaacaatcaaacaaatcaaacaccaagacattttaagacaatgaagattcgaatgggtcaaagaaacaaacaaagattcataggaaaatgacaagaaagaacaaaactaacaagttcaaatttagaaaaaaaatgttttatggatttgcagtagagtccggcgggaaaacacgggaatcccgttcccgtcttttttgcctgatgggatttttacgggaacgggaaataggcgggagtcccgttcgtggatccagccccgttttttcgctttcccgttcccgtaaatttttt

SEQ ID NO: 16985 - DNA, 1432 bp, Heterodera glycines
  unsure (1)..(1432): unsure at all n locations
attacatcacaaacaagaatagatatanttttgaaataatcacttcaaaaagatatacaaatcaaaaaatatatttttaaataaatatttaaaaatacattaactatttttgatattaaaaatattggaaaggttatgaatttcaaaaatccccgaaatcccaagagtaaaaacaatcaaaaggatctattttaaatattatacgtaattgaagaaaaaatatatgtattataaatcaaaatttaataaaatactttaaaaacacgagggataattttcaggaaaagaaaaaaaaattaaatccatctttatataaaaaattcacaaaaggaaaaacatataaaaaccgaagaagatgacttcattttgtataaaaaaataattatgtttttattatcagtttcgtacccataatcataaaatgaataaaattttaacaatttgttgccgcaaattcataacaggagagcatgtgcgcaataattgaattttaaaagaaaagcatacaaactttttgctttgttaaaggatcctatctattaataagaaaggttctttaatctaattgtaaaaaactttaatcaagtattgctgatatgattttaatgtgtgtaaatcatattgattaataattaaatagaattacattttattttataaatactgatgagattcatttagttttcattttaaaaattaaattcaataataaaatattgcttatttatatacaactaaaaaaatttttgttaattaaatacttatttttgtcaacagcatttgcttttctggtaaattaaaagtaatgcaaataaataaatattcaataagcaaataattactttaaagtttaaaccaactaagagattgctggtaaagagagaagtcacaccaaaaatcactttaaaaattttaattacaatcataattatacaataatgcatccaaaattttttttattataaaacagtgtcctttggtaatatttacatgaaacataaatatgtaaaagcgatttttctaaatacaaacaagaatattaaacgtttcttggaaatctggagcctctcttagcccatgtgacaagttacgtttagaaaacccagaataaaactaaaccaatacgaaaacatcagagaaaatataaagcaattcttttaccaagtgattaaacaaaacaaaaaagtacacctatttatatgcaaatatatttatgtaatagtaatttcaaatgaatgaacaattaaatttaatatttaagcaccagtaaaaaataaagcgtttcctatcataattgttggagcctaaatattttctaatttcattagaaatatgctaatatccaaaattagtttttaaacgagaaaaaagattactgaaaaaggtaaattttggtaatgaaatatataaatataataagaataaaattttc

SEQ ID NO: 16986 - DNA, 1834 bp, Heterodera glycines
caaaacttgttttttttaattttttgttttaagtcgctttttttggtggcgctgttttttcaaaaaaattttttggaacattgggtgcggggtccggcggtgccgatagacgccgccggaaaaattctaaaattttgagtgtaatatattaacagaacttgtcaaaaaatgatcaaagttttggttaaatttgcagttttaggctgtttaaaaaaagaaaaaataataatttttaaattgaaatattttttattaattaaaatttaaattgaaaaataatttaaagaaattattaaaaaaattctgtaccgttggggaattgaacccaagagaaaaataatgaaaggcagaaggtttagccagcagaccatatttgaattggagatatccaaaaatagagaaaacattaaggaaggaaagaaagagagatttttttttcgcgtaaatttgaaaatttttctggctgctcaaaagttcaatctttaggggtgtattttcaactctcgcctctcgtcccaaaaaacgagaggcgagagacgagaggtgagagtaccaaaaatggcgagagttggcgtgaggcgagagacgagaggcgagagttgtcccacccctgatatatatatatatatgatattataaacaaatataaagaaaagtaaataaatgaggaaatatttgtggcttagaatacatttaaacacgaaaggaaataaaatttttattcaagcaattataattaattttgcacgaatgttaagtacagtatgtgtataattatatatcagtactgtgatataataacaataacaggtataataaagtacataaatgttcaaataaaagctaaataaacttttgataaactataaaattttacttatgaaaaagaaaaaaaaattgagtcgaaaaatatgtaaatattattaaattaattaatgttctattctaacattgtgaaaagttaccatatcagtttttcattttttgtatatggaatacaataactaatttttagaatttgtttatcaaattttcaataaatataccttaatcaaataattgttaaatttaattatgcttactaattcttcattcaattttgtaattaaattcactttatttaatgcaccggtttagtcgtaatctattattttcgtaagataaaaataggtgtttaatcattttagttttaattacttgcaaaacaattaacaattcaataaagattatataataataaatttttaatttttgattcatttaaaaaattaattattttaataatcaaaacataaatataaaagttcaatgatttattttatgtttaataaaataatagcacgattaaattcatgtttgataaaacgttatacttttcaacttattttacaaaactcaaaaattaagtgaaaattaacagaacgatgcacaaatttttgtaataaaatacaaaaactcaccaaaattataataaaattcgttaattcaaaaactattaatttcccagaaatgtcttattaatttaaatgttattttcaaataaatcgtttttccagtataaagcaacgatcaaatctgtattagatttcatacaaaaatgtttagagtaactatttttcattaaattttatggaaatagatcctaaattacaacaaacgtagcgaatgcggttgtgcgattatttgattataaatagaagaatatgtgaaataaatattatctatttttatattaagtttggcaaaacggaattttaatgtgcgaccaaaacgagatttattataaaaaagattaacaaacttataaaaacactaaaaaaaattataatattag

SEQ ID NO: 16987 - DNA, 1003 bp, Heterodera glycines
gcagggatggcattccgaggccccaaaaattttcggaaatcgaattccgtgccatccctggtctcatggtattatagttgtcctaataactaagagaaaaacttttttttgttaggtattcaataaactttttaatttttaactataaatttcgttgttaaacctaaggttatcatgacaactcatacacaggcaactcgaacaatggcttattgttagactaggcctaagtttaggcttttgtaatttttttttcttatattagttgaatttctgttgacatcaataagtgtgcttagagttgcttttgcacttctcttttatatgcaaccacgcgaaaacggccacgcgaaaacggccctcacgcgaaaatggccacgcgaaaacggccacgcgaaaacgtcctggcccgcccaaacgcgtgggtcccagttgacccatagtgagcattaagcataaaacaaaatgccaactatgtacataaattttaaaattttagtggagaataatttgctttgccaaattttttggattccttcaaatttggaaaagggttcggaattgattgaaagtattatccgcgaaaaattgttacatttcaagaaaaaaattatgaaaatttcgctcaatttggaaaattttaatgcagtttttgagtataattggaagcatataaacattaaaaaaaagtgctaaacagttaaatctaaaaaattaatgctcaaaatcctttatttttctcaaaaaaatattttaatcgacgatcaattcaccgaagatactttaattaaaacagtgcaagagcattgattggaaacgcgataacaaacgaatactcaattcacaaccatcttaatgtttgtccacgtgaaagaaaaaagatacaaaggaaaaaatggttccaccataaaaaggctatctaatttaagtctacccggccaaacattctcccaaaatttaaaatatttaaagatttttaatttctaataaacttaattttgaa

SEQ ID NO: 16988 - DNA, 1285 bp, Heterodera glycines
tttgacttctcgtcaaattgttttgatttgattggttgtaattttaatttaaacagcgaatgccattgaaaaacgacggaatgactggcgaaggccaagcgaaggacgccactccgaccggcagggggacatttgctgatcgaattggccgatcagacaaacgcattcaatgcattgggtacggaagtgatgcgacgagtcgtgtcgatgggttcgattgaagacattgaggtctttcaatacaaaagaaggcacattatttgttggttggcatattttgccctaattgaagaaggtgggcccttcgctcgtccccggcctccgtctgtccgcccgcctggcgattcgtctgcgccaccaactgagtcccattcgccttggcgaccccctcttcgaagtacttcaatttctcccgagaaaaacgctcttggactgcgtgcaattggtcaatcggcggatgcatgccattgttcgccaaagggacgcgctttggccgcgttttattttccatcggttgcaaatggtcggcggatgggcggaggggcatttcgactgtttggccttatgcttccatttttcagttcggtgacgacgaactcaaaaggaccgccaaaatgtttctgttcaaaaatgccattcaattgaaagcgccgccggcggaactttcctccattttcacttcgcttccttttgtccttttcatttgcgttttgaaatattttttggcattcagaaaatcaaattcgactcttccgaccaaaatttgttggttcagtccgtccaattggtcgcccatcactcgggaaattccgaaaatggaagccctgcaaatgtctatttttttatcgatgtcgacgaatttgatgaagacgaggaggaaaaggatgcggacgatgagaagcgaagggatcgcagccgcaacggcacaaaattcttttttcgtcttccaaatccgttgcgaacgaaaatggcattgtccaactgcgtgtggttattccgcgagttttccaaagtgattagttaattaaaataaatgaaaaacgagggatgtaagcgaaagagaaaaagagaggaaggagagcgagagatacacaaatgagggagagatagagagggacagagtcaacagaacagagtcgtcaagaattttatactaattgtaagtattattttctataacgattttcattaaggcacacttcgaaagtgtcctctttgaactttaccgcccttccgatgcgcttcgtctcctcctttcccaattcgaccactttcgtcccaaaat

SEQ ID NO: 16989 - DNA, 2680 bp, Heterodera glycines
aaaattatttctgaccccccccccttcccacgagtatgtttccttgtgacaattttcaaatgcgtattttgagggacaagacgaacggctgaccatcgacgggcttctctgcttatgcgatggacaatggttgaacgcggacatcattgactgctatttggacctcatctgccgctgctcgccccgtgctcatttcatcccaacgtacgccattttgagctacgggcgcaagggcacagtgccgtcggaatggtactggcagctggccgagacggacaccattttcgcacctgcccatctctacaacaatcactgggccatggccattttggacatgagggagcggacgttgaggctgatggactccatgaaccacggatatacagacacggaaaaaaaagagtttatggagacaattatgtgagaccgatgactaaccattctcgagtttgtttatattcccttttcaggaatattctccgggacgtcgccatattacaaaaggtggacatcggtgacagaagcgcgtgggacgtgcaggagcggttgtcagtcccccagcagagaaacggaactgactgcggcatttttgcgctgcttttcgcacaatattcgctggagaggcgccaattggaattcggacagtgccatattccgtactttcgacgacggatatgccacgacataatctctgtgattctccatgatcaaaagtctccggttaacagaagcgacgaaactgtcgtacagtgcccatttgctttgtgaattttttgctcaaatgcctttattattgttccatctttgcatctcaactttattatttcgtgcttttacatgatgtataataattgcttttcagtaaaacgattcttaacatttgtttacagtgtcttttcttctgctaataatgccggtgtccccctcccttttcgaattttttgtcaaaaaagtcatttttcgtatttatcaaattgtgaaaaatttgattttatatatattcaaaaacaattaatatatcaacattccaaaatttccgtgtagaatttcgtgcactttctaatgagaaaataatttccgccttattttttggtctgtctataaatttgttttaaatttaaatggttcattttttgttggtttgtttgtcttttttcctcttttttttacctgaaattgcatctttttttctgtttgctttttcaaattcagcttcttccatttcgaaatgactgttctcagtttgtcagagatgttcaaagtgattcgtcgactttatgagttcgaattgtacgacgatttgctattattagcagaattaacatttccctctgagcccacaaaaacgttcaaccaaattggcgatgggaacggacttttggaggaggaccagcggggactgttcttctgctatttggccgacgcgtactttcaaaagggccaaacgaaccgggccataaaagtgagttttggatgagcaaacggaggacgggagaatttaagtcatgagatttagggctttgcgtaaaaagcagggctatgtttttttggctcttgcagtttaaactgttataaattaatttgacaacttaaatgtaccgcaattttttcaagaagcatatttggtagtccaaagggtcggtcctctattagcctgcaaatttcgaagaatttcgttatgttcaaaaaaatggccagtttaactttaaaaattattttcatcgccatttttgaccataaatctttgaatcttgggtgaatttttgtttaaacctttatatatggactcttggggctatcaaaggataccaagaatatttcattaatatgttttctacaaaaatttatggtgtttaaaagttgtcaaattattttattgtcgtgtcttttttacgttagcgtaaactgcaaaagagcccttttctaccattggattaattaaattagtagggaatctattctaagcaaaaaaaaatttggatataaaatttttgggcatactttaattctaactttgattagaattatgagatggcccttcgctgcgctttgctcatcaaacaaaaacggttaaaaaaccgttatgagtccattctgaacatggccgaaattcactttcaaatggcaaaggcattcatacaaaaccgacaagaggaagaggtaaccgaacgaacagtcattttctgaagtcaaagcaaatttcaaatttaaacccttaggcattgcgttgcctcgaggaagtgccacaaacggagataacgcccaaaatattgttcacaatggcacgactcagccacaatttgtccattgcactgctgcagagcggcagaacacagctgagcaaaaggaacaacaacgacggaccaagccaacggaccatcaaacacacaaagtaacgcaaaatggggggggggtggttaaggacttgagaaaccgggaaggtcaacggcttaaggggggaacggtaacgcccttcttttaccgtatatgctctaattatagcccagtctctattaatcccccagtctctaattatccccccttttctgaggaggttgaaaaataatcccccatgagctataattagagcaatacggtattcccccaccccacccgaatttttttaaagaatattacaagaccaatttcttttagtttaaagtttttttgtttttgtttt

SEQ ID NO: 16990 - DNA, 1531 bp, Heterodera glycines
  unsure (1)..(1531): unsure at all n locations
accgaacgaaccagtcatnttctgaagtcaagcaaaattcaaatttnaacccttaggcattgcgtgccctcgaggaagtgccacaaacggagataacgcncaaaatatgtttcacaatggcacgactcagccacaatttgtccattgcactgctgcagagcggcagaacacagctgagcaaaaggaacaacaacgacggaccaagccaacggaccatcaaacacacaaagtaacgcaaaacgggggggggggtggttaaggacttgagaaagcgggaaggtcaacggcttgaggggggaacggtaaagccccttcttttaccgtatatgctctaattatagcccagtctctattaatcccgcagtctccaattatcccccagtctacgaggtgttttgaaaaataatccctctatcataatcccccagtctctaattatccccccttttctgaggaggttgaaaaataatcccccatgagctataatttgagcaatacggtattcccccaccccacccgaatttttttaaagaatatttcaagaccaatttcttttagtttaaagttgtttttgtttttgttttttctcaaatgtttatgatgaattacttagttttttcaaatttatccaaacaaaatcgctgtgaaaattttctaaaaatttttttgaaaaattcctaattgtggatagggcttgtctaaatcttctgtgtaatgttaagaaaactatcgtttcagggcgctgatcaaagaagtgcctgaagcgatattttgccgaagttttctcctctccaatggctcgctgaaaattgcttcttcaattctgaacgcaaaaaaggccgtttctgcttcttctgatgatgatccgtccttcatttcggagttcgttttgtgcggcgaggcgccgcgcctttgggcaaaagtgaaacaattggagggccaaaaacgctttttggaggcggcgcaacttttggacggtgtcgaagtggagaatttgcggttgatccatcaattcttggccaatcaaatgacagattccctcagacttctactggaccaagcccgtctctaccgaattgcgggaaacacaaaaaaggcgttgagctgttaccaacgagcgcacactttggactgcacaaatgccgaaggaatggacgcatttgcggcacttctcggcacagttagcgaaagttaaggagacgaaatcgaaaaaaggtttggaacagcaacaacagctcaacgaacggcagacgcagcgcgagttggacggattggcacacgcaatggcacagcacaacccgcgccgggccgagtcgttcattgtttttggatgggccgcccgacagtgccatcggacgcaggaggcgaagcaattcgcgcaaagggccgaacaattggcacaatggcgggggcgagaacgagcggaggcacttttgttgaaggtaacgaaccgccaaccaaggaaaatcaaaagagtggataataagaaaaaatttacttgtctaacctaatttaaacatgttttctggaa

SEQ ID NO: 16991 - DNA, 412 bp, Heterodera glycines
cgcggtgatgtgaacatttgctcgggcagttgccccttttttctttcgtcgacccgcgccaatcgaagggcgccgaaagtgaagcgaatgccaacggaaatgaaccagcggtggccgtgttcgcccaatgctgccgaatggtcgaagcacaaatggtcagtcattagagtcatcagcagtaactcatgaaataatagggggagggcgggggagatgggagagttggaggagagaggggagagtgaggggatcggagagaatggagaggtatgatagcggggagatatttgagattaattagaaacgaactagataacctaaaaatgcacataagtattttgttacaccgaccggattcaaactttgccccccccccaaaaaatgatgcctaagaatccccattcacacaggg

SEQ ID NO: 16992 - DNA, 418 bp, Heterodera glycines
agagcaaagagagaatggagagaggagatagaggagagaggggagagatcggagagagtggagagaggagagaggaaagagatgagagagagtggagatgggggagagatgggagagaaaggagagcagagagaagggaggggtaggagagaagggagagaggggatcggagagagattggagagaatggagagaggggagagggaggggatcggagagaatggagagaggggatcggagagaatggagagaggggagagggaggggatcggagagaatggagagaggggagagggaggggatcggagagaatggagagaggggagagggaggggatcggagagaatggagagggaggagagaggggagagtgaggggatcagaaagaatgagagggggcggactctagaggtccccg

SEQ ID NO: 16993 - DNA, 2533 bp, Heterodera glycines
tccgccttttttgcttttagtttcttttgtcccgccccttttttttgctatttaatcacagtttttctacataaaaaaatcattcgtccattttaaaaaaattccatccacgttcgttttttctgttcttcctgcaatgaattctctaaacgctttcaactcccggagcaagggacacgacagcaagaggagttggattccgttgaaccaaaaaacatcagcgatgtggtcaacttcaattcggccggcgttttttatgttttgggaaaagtgacaaatatgcagtaccgtgtttacaaagtccaaattaaattaattaattaaattattaattttttctagtttaggcatgcccatttcgttccaaggggctcatttgccgccgaaaattgtccgatgataacatgtgtgaggcttgcggccaaaaagcgattgctcccatccacacggtgtttgttcgtcttctgctacaggatgttgaacaagcagacattgctcaacgtgtcaccatgttttcgagtgttgctgaagagtttttgggaatgaaagctgccgaattgctagccaaggagaaggagccggaaagccttgcgaaacacttggacgatttgattgctgtgaatctgatcgcaaaagttaacattaaggttttttttgttgctatttattttgtatttgacaaaccacgccctaggcgaacaatcagacgtacactggatttgattggattgtcaaccttttcaagaagtgcccagggaatgatgacagtgatgtgccaaaagaaaaaaatgatgttgatgagattgcaaccaagaaggccaagaaaaattgatagagagagagagagagagaaaaatgattcatttgttgtgagctttaaaaaaaagattgagcatgtcctttactttttttttaaatccattaaaaatgcattttattgttgaagatgatgagacacaaactccaaaatggccttgatgtgattgcaattttgttttttcttcgtgaattcaccatgagacaggattgcacgttgacaatttttcgtaatgagcacagagagatttgcagttggctctatccgagtggtggatcgtcaactctcctcataacaatccaattaacgttgttggaaaagattggcccatacgcgtttgtcacgtaaccttaatttttcaaaagaacgaaaagcactcctaaatttagttttgatcttcatcacggctgaaaggggatcatgtgaaaaaaattgaatatttgtgcgttaatcatttctttattgataaacttggaaaaataactgatgaattttttggtaattggtaatttcgcaaatcatccatcatctcattggcatcacgctgagaaatatgtcctcttctcttaagaaaatttatcaaagaataccagcataaaatgaaaacgggaaaagcaatgagataatgggcaagcaatagaagttgcacgaggaggttaggatgaacgcttttgttttcaaatgttagtacttgtatctctggctttaaactggcgttgactgtagtgtttaagaaggccatttttatggtggcattttttcgcattatgcatcttatttatacagttcattaactaagctttgaatcggaaacaatgtgacggttgtagtctatcattatcatttggtcaaattcacccagcactatcatttcaactccgccctcaggaattgcactattaaatgttgcgcgaatgctagttgtcccgcttcttaagagttcataccctgtgctatcgtcgagcgtcgatgtgagtggaattacgaaaaaggtccaaccagatttgaattgctcttttgtgatgtcgaaagaacgctctgaattagccatgccaagtgcctcatacatgtcaacaaaaggacggacaaaaatatctttggcaaagtcaagcttgtatggaacaattgggtaaatcatgcctccagcgtacactgcaatgtctcgaatgtcaaacggtttaaaattaaatggagagagagcataatttccgttaaatgccccgtttgcaacaagtgcgattgtcatacgtcgaggaattgttgcactgaatacattgtagtcaatttcaaacctaccttcacttataaagcatgatttgatttcagtttttcgcactgcatatgtggctggttgtttttcaagcgttttgtagatacttaaattcaaagatgactgaacatcaatcattttggcatacagttttacgtcatggactctaacgcggtatttggtagtatcgtttgctttcaatgtctgcatgatgaaagtgtcacgagctttgtaaattgtaaataaaagatccaaattgttcaacaaataaagttcttggtttcccaggtcaaagtccagacgtgaaagaaattgggctcgcttcccaccctcaaaaattttacaccgagctttaaagccctcgtcagcgacgctgtcgtgtgtgcgtgtcgcatagtgaccagaagaagcgaggaagctttttttgacgttcatcggaaacgaaa

SEQ ID NO: 16994 - DNA, 969 bp, Heterodera glycines
  unsure (1)..(969): unsure at all n locations
aggtccaggtccaacatggaatccaggtccaggtccaacatggatccaggtncaggtccaacatggaatccaggtccaggtccaacatggaatccaggtccaggtccaacatggaatccaggtccaggtccaacatggaatccaggtccaggtccaacatggaatccaggtccaggtccaacatggaatccaggtccaggtccaacatggaatccaggtccaggtccaacatggaatccaggtccaggtccaacatggaatccaggtccaggtccaacatggaatccaggtccaggtccaacatggaatccaggtccaggtccaacatggaatccaggtccaggtccaacatggaatccaggtccaggtccaacatggaatccaggtccaggtccaacatggaatccaggtccaggtccaacatggaatccaggtccaggtccaacatggaatccaggtccaggtccaacatggaatccaggtccaggtccaacatggaatccaggtccaggtccaacatggaatccaggtccaggtccaacatggaatccaggtccaggtccaacatggaatccaggtccaggtccaacatggaatccaggtccaggtccaacatggaatccaggtccaggtccaacatggaatccaggtccaggtccaacatggaatccaggtccaggtccaacatggaatccaggtccaggtccaacatggaatccaggtccaggtccaacatggaatccaggtccaggtccaacatggaatccaggtccaggtccaacatggaatccaggtccaggtccaacatggaatccaggtccaggtccaacatggaatccaggtccaggtccaacatggaatccaggtccaggtccaacatggaatccaggtccaggtccaacatgtaaatccaggtccaggtccaacatggaatccaggtccaggtccaacatggaatccaggtccagg

SEQ ID NO: 16995 - DNA, 1403 bp, Heterodera glycines
cgaacgcctcgaatgtctttgaccattttgtttcgttagcagcgcgtgcgaaatcgccgcagcgcccaacgcaacgttttggtggctgcggaaaaatcaaaagactgatcggaatgaaactcagtttcaagaaccgtaattttaatcggggatatcaacggcagcacgaattccaaccaatttttcgtgatcggcagcccggatttcaaccaaataatggaccgatcagacaagacaatccaagttttggagcaaaaactgtagaagtgttccaattataatgaagtcgggcacatttcgcggacctgtccaaggcccaaacaatttgaggcaaacgcccataataagacccaagcccaccccgtaaacgtttcgagcaaaacttttgaaaattcaaatagaaatttaggttctacggagccaaattctttcatttctctttgacaaactttcatagtcgaacaacaagaaacaaaaacagcgattctcttccttctcaaattccctattaatccagaaatcctcgattaaatagaaaggcgattttgcgctcctgaaaatatcacacttcaatgcccattttgagaggtcaaaattctctcaaccagagcagatagccatggcatctggcatcacctctaaatgtaaaaatcctaagagaaataatatgtcgatagtgcacatccctccgtctcatgcgcaagcgctttagtgaggtataaaatttctcaaaaaaacagatatccatttttttgggatagagtataaacttagtaatagcataataaaactactaaggtatctccagggggggggggcaaggggaagaaaagccgtcacaatgcgtcaccaggggggggggatgttttttcggtgggacaaacctttgaaaaacatgggccaaaataatgcattgaattagacaatcataaaatacttttttgagctttatttgctaatgttaattttcaacaaaaaacattaaaaaagtgttcaaaggagaccgctattctattagacgaattgaatcttatctgtgagcaaaggaggaaacgaattcgtagttatggccaacaattaacccaaattccaattcttaccagtatacttttggacccgtacttacagggtcgggcaccgggtattggattttcataaaatcgggcccgccggtcctggtcttgaaaaacagggcattcgggtccccggccaaccctacttctacaattagattgactttttagcaattaactaatttgttgatttgtgtttcatattgagtgttgcaacgttatcaaacggggttttcgaacccgcattttcagaattccgagctctaattattaatctcctcttaggaaatggccaagtaaatctcagataatttttattcataaaaatat

SEQ ID NO: 16996 - DNA, 2765 bp, Heterodera glycines
tgcataaatgaaccaagaacaagacaatatcccaactttcaagcttgtgttggttggtgacggtggtaccggaaagaccacttttgtgaaacgccatttgactggagaattcgagaagaaatatatcggtgtgtcaaaataataaccgcgattctttaattttgtcgtttagctacgcttggtgttgaggtccatcccctcacttttcacacttcgcgaggtcaaatccgattcaacgtttgggacacagccggccaggagaagtttggtggacttcgtgatgggtattatatccaaggttaatgaattaggaatcacttttttttactcaaacatcatatattcttaggccaatgtgctattgtcatgttcgacgtgaccgccagagtcacatacaaaaatgtgccgaattggcaccgcgatttggtccgagtttgtgagaacatcccaattgtgctggtggggaacaaagtgagaagttcaacggttctactttacttaaccatcaataaatctcgcctccttttaggtggatgtcaaagataggaaagtcaaggcgaaaagcatcacttttcaccgcaagaaaaatctccaggttcgttttttgtctatatatattcataaagcagtaccatctttgtagtattacgacatttccgcaaagagcaactacaatttcgagaagcccttcctttatctggcacgaaagctgatcggcgaccccaacctcgaattcgtggcgatgccggcactcgctccgcccgaagtacaaatggatcccgctttggctgccaaatacgagcaagaagtggccgaggcagcaagcgctgaactcccggacgatgatgaggacatttgaagagatggaaggacggctgggacagattcctgggacagcaatttccgagcagacaaagttatgtccattgttttaactgattgtttgatgagtaaaggaaagcgaatgaattgggatagaattttgtaatttgactaaattttcctagaacatattacctcaggaaatgacaaaccgtacaaaaattaaaagaaaatctaaaaaaatttcttcgctgggcttaccctaagaatattttctttcgctatttcaacgacgatctgcaataaataataatatgaaaagtgcgatcggcagaaagatgatgtaattcttcattctcttcttcctctcttcctgttcccttttctgcttgtctctttgcagttcgtcaaacatgggaattgtcgcgcttcgccttcgtctctccatgacttcgtcgtgcattttcttctccaagttctctctttccaacgctagcgggcttttatatgatttcgaagattggtgagatgaccagtaaaattcggattttgtattcgcccgggcccagtctttgaacgtctgccggctcctaaaatgaagcaaaattcaatgcttgaaccaacaattttaccggttttctcgttggaagtgctcgaaatctctgaaatcgatgtccaaatcggtccaatctttatgccctcctgcaggtcccatgtttatatggttggaacgagtccgtctgaaatttggcgttctgccgaaatgggcttgcggtttcggagcagtgagcgtatcgtaaatttgtcttttctcttcggaaccaagcacttcgtatgcatcagttatctaaggaaagacgattttaaaacaatataatagaattaaatttctaaacaaaaacgctttcctgacaaagcactatcatttgattaaaaatgtaatcgtataattcttacattttgaaacgcctcggctgctttcgttttatccgtagggttcatgtcaggatggtgtttctgtacgacaaaataacaagtttttaagctgacattttaagggttcgcccacactttggtcagctcaaaaaatgccgttttgatatcctttgcgctcgcatcacgagacactcccaaagtttggtaatgatttttgtgggcagcaacatcattgtggcggttatttgaagttgaatgagagaatgacaagcaccggtggatgtacagtccaataagacaatgggtgcacttttcagggtaaaaactgaaggggagggacggaacgcgcacattggacatctccaacaaacgggctgaaaagatagaaaaagaacggattgatcacggattaatcaaaggaataaatagcacatgaaaattaaggcaaaacactttcaatggctaacaaaaccaaggcttttatttgttggtaaatttatgtcgtaaataaaacaaatgtaaaggcgaggagtgtcattattcaaaatggatcacatcaatacaatctccgtcctccaacccaagcgaattaggcgtttcatcatcagcgatcatttctgaaaaaatgatcttgaattctaacttaaaaattttattgataattaatccttctatatttaataagttttggattttgttccgatttaccaattgaacccaaaaggaagcgcgtcttggcaggatccaacgcatggtcagtgcaaaatagctccttcagtgaagcgaatgttgcatccttagaattaatttttgctttaaaatacctctccctcgtgaacttctctttaaatttaccggcaaaacgcgtacgatggtcggcctctgtcccttcgtttggtatttaagtgcgagccttttcccttcattctcttcgaggtcctcaaatgcgtccaattcaatttcatcacatttttccgatagtcccaatgtcctcggcgtgtccttcg

SEQ ID NO: 16997 - DNA, 1625 bp, Heterodera glycines
agtctttaataaactcctgcttacaatgtgcgaaaagagaaaaataataaaaaacaattatttcgtttaaaaaatattgaacgactcgacaaaaggctggattttattaaacgagaaattaaataatttaaatataataagaactaatttggcagctgtgccaattgtgcgtgcaagccgcctcgaagttgatctcaagaattgaaatttttaagaaaatgacgttgaaaataaactgcaaactttttaaattccaaatagtaaatatttagttaatttaaagttagaaaactgtacaagctataaaaaaagcggaaaaaattcttaaagcataaattttaaaaaataaggctaaatattcagaaaaaaaacatttcaagggaggatattgcgaatgaactctatgtgccatttgtataaaaaaatcgagaatatttaaaaaataaaaatatagaaaaggttaaaaaggagaaatgttaatatttaaaacaaaatttaaaattaatgattttaacaaaaaacgagaaattaattaaaatttcaatctatttcagaccttcacactaagaatttatgaatgagggaaacaagaataaaattaaaaaaaatcatagctaaaaataaataaaacttttggtaacaaaataaaataataattgacaaaattatagttctaataaatttccaattttaattcgtaaatcacaacgagaaaattgtatatggcctatttatgctaatgagttggtgatatttgtttttggttagtaacaaattcagaaaaatgatgcaaatacatattaaaacactaaacaaaaataaactaaaaatccaaaaatgcacaaacaaaaatgttttcttttcgttaatttttgcacttctatatactttcgcgttgttaagaatgagagtctaatttgtgagtgaaaattgcaaagaaatcagatgaaagaaaaatttaaaaatgccaaatttaaacttttctttcattatttaatttaattaatggttatttgttggaaaaaaattattcgtaaaaagtaaatagacacaaaatgtcataaaaaactcaaatatttataaaaatatgttcatatgtaatatgtagaaaaatcccaaaatatgtataaaaaaaagtctcaacttttgttcgcagacacaaaaaagaaaatattttcgttctctttaggctatagagaatccaggaaaaaacatgtatttacataaaaaatgaaccctgacaattatcaatgtttggatttagaattgagcttgtttcaaaccccaataataattgttacaaatttcacttaaatatgtataaggaattcttatttttccccataatttggcttaaatttttaaatctttaaaattgaaaaaagttaaaaatttattattttataaaaaattcttcctaaatgaaaatttattagctgaacttaagcctttgatatctgaaatcattaaaagtaatgcaaaagatgttttagtattttcttttaatcaaatataaatttaaaaaggttttagaagctgttgatgcaaagtataacaaattttaaaaaatgttaaaatcaaaaataccttaatgcgaattttatttttccgaccgtttccaacta

SEQ ID NO: 16998 - DNA, 1308 bp, Heterodera glycines
taaataattaaaaaactagaaagctaaatcatagacataaattaacagtaataaatatgggacaaaacaaataaaaataaactaataaaagtttatatatggaatacacatttttcccagattttattgagtaataaagtatgaatattgaaaaaacaacaaatttaaaataatattgtaaaactaaaataaacaaagagaaaaaacattattacacgcataatctaaaggttgcaagttttttttctaataaaaccttaataaacattggcagaactccctccagtgagagtacaccgtaacaagaggtaagtcatattgcagctaatgatataaaaattgaaaaaatgtatcatgaaatattaattttataaatataagttaaatagattcttttaattaataatatcgccatattatacgaatagaaaaaatgaaaatttaattaaaggacaaagcaatacaaggaatgatattctaaacacaaaaatatacgaatagaaaaaatgaaaatttaattaaaggacaaagcaatacaaggaatgatattctaaacacaaaaagttaaattaatagatgctcattgatcagatagtttatatagggttcagccccaagcttttgaggagcaaaatgtcggggaaaggggagtaaattccccgaaataatttgtcggggatggctgtagaaatttaaaaaatgtcggggagcaacaccttcgtcggggaggaaattttcataaaaagtctaaaaaaacaaaaataaaaaatccagaacaaaaaagtcttaaaaactcatttaaagatacttccatcttatttcaagtgcaatttacgactttcgtaatttcatttcccgaaacatgtcggggctgaaccctagtttataatatcaaataaattttattaaaatttttatctttttggtctttctgccgataggtgcaacggaaattttttttggaaattaatgcaataaaaatattttacgactttaagctttagcaaaattagtaaaaatactattataaaattcattgtcatcccttttgaaaaaaatgttgaaaaaatattaatatttccctaaaaaaattaaagttataaataatgatttaattttatattttattacaaaaaatctcataaaaaattcattaggaatttatagcgtaaaatatataaaaaatataaataatattattgtaaaagtaaaataaactaagagaaaaccgaaaattacatggataatcaattcaaataatttaaaatcttatggtaatgaaaataaataaataacttttgagaattt

SEQ ID NO: 16999 - DNA, 1711 bp, Heterodera glycines
  unsure (1)..(1711): unsure at all n locations
cggggaacaattgccaaggacgaatctgtcgaaatccatgttttgaaagacaaggaaaacatttgtgccaattcggacttgcgcttgccgtccaaacgcaaatacaacgaacaattggaggagagcgatgggtgtttgatgtgttccggttgatggattgtttttccatttatttgattgtatttttgggcatttttttatttggctttaaccattggttttcgttaacatatgataaattgatattttgcttgtttaaaacattcccttctcttttggtgtatattgttaatacataaacatatttttaaaaattaccctttcgctttcaaagtttataaatgaataagtaagtgtaacatctctgcacctttttgatttattccgcctactatggaaggtgaacagcttgaaaatgatgaaaacgtttctccgagtcgcgtttcccccaccaatgcctttggtgttcaaaagagtggccatttgctgcacaattttgctgagcctggaccactgacgacaaaggttttgttgaccattgtgaaattcttttttgattgctttgctcattttcagatttattattacgtcgatgaccaacaaattccgttctccaccgaaattgccatccctccgtccaaaattacgctggcggacttcaaaaagtgtatcacgcgcaggaactaccgatattattgcaaagtgatggacccggcacttaacgcgtgagaagcgcaaagaagggaaacaaacccaaaaaaattaatcactcgtttattcagcgaggtgaagacggacattcgcgacgaaaacgccgtgctaaagccaaattcgaagaatggacgctttgaactgtttttgctgtccgagacacaacagacgcactcgtccgcctccactctccccatccaaaagctacaggttttgtcattttacgaataaaagatttaaattgaagcaataaccactttagcatgtcgatgccatccgtgcctctctcatggaaaaacggacaacggccaataattacattcttgacgggaggccaaaattcattgatgacagtcagtaaaactgattatttttgataaacttcactcctatttttgtaggcagtagcagccccgaggaagacagcaccaatttgcgtttgtttggcgagtcaaattttgagggcattacggggagcatcgacgacagcgactctcagtcagtgcaaatgattccaaatagcatgctgtttataaatgcctctcgttttgcaggtacaccaccgactttacgagtgtttctcagcagaatccacacgtgccgaagcgcaaatttgccatggcggagcgatggtgcggggaaagttgtgacgatggcaaacatgggcatggccaacaacaacaaagccaccgccatcgtctcgcctttgtgagtacgaacaaacgctacgacagcaacaacaaaccgtgttggacgcgcgagaagcggacgcgccgcaggtcattcacggcactttccagcacattcgaggacaccacggaagcatcaatgtccttggaaatgatcacggtgaaaagcctctgccttacatgatttacaagggaacattccaaactgtcactgctcagatcgctttaaaaccacttttatcgtgtagagcatagatgatttggtattgacaattttcggcttttttggctatggagccanaaaatgatca

SEQ ID NO: 17000 - DNA, 967 bp, Heterodera glycines
cgttaggccgtgctggccgatttcgacgattattctgccgtatttcagtggcacgtcggatgagttggccaatgaggtcgagcacaaagtgatcggccaattgatcagcgaaagacaaagaacgaaactcgcaattggggcccaaagagtggcacaactgttcaccctaaatgctaatttaagggattatcgctccaaaatcgttttgcttttctctaatccgttcccccattcattctccgccgactttttcctttccgattggacatcgtccgccttcgcgtgcttctcggattcgctccatcgaatgctgtctccccgttggcgttgtgctcctccttttcggcactgtctgtggtggcatttctctgtccgacggcgaccctccgcccgagttggtgccgtatccgtcgtcagcagtgtccgtttcgtgtccgtcctcgaagccctcctccgccaattggtcctcgttgcacagcagcagagtggcgggctgatgcccaatttatgaattagcaaatgccttggcttttcgtctccccccattcaccggttttccattgaatgtttgaaagtcctctgtgacggactccaaggcgagaaatgagccgggattgaaagcggagtagcagagaatgatcgcgtctgatctgtatttcaattgctcagagtcagtcaaccaattagttaattaattgccctcatttcccacttttgttggatggccatttggcgttcgcccgttttctccttttaaaataattaattttttctccaattttcttttctcactgtgcctgggtcggttatttccaccacaacctaaaaagaataattctcaatttgtttttttgttttttgttcatttattttttaccggctcttcgctgtctttgaattgaaacgttaaataccaaatgtccgcgtattgaatgtgctgttcaaacttttgtgctgctgaacacat

SEQ ID NO: 17001 - DNA, 1189 bp, Heterodera glycines
tgtccacttttcggtgtccaattttctggtgtccaattttccggtgtccaatttaccgggagccctctcggtctacctctctctctctctcttctctctttgtctctctagcttttctctctgtttctctctcctctccccccttccctctctgtctctctctctctttcccttttttctcggtctaccttctctctctctcgctctctctctagcttttatctctttctctctgtttctctctcctcttcccccccccttctctctctgtccctctctcttcaaccaccctctctctctgctttctcggtatacctctctctctctatctctccctctctctcttcctggacaaaattgtccattttttccaaaattctgatctcataaaagaacaaaaatacgctcaaaaaatcgaacttttagaatgcatcactaaaatgcaagactttcaaagaactcctaaaatttaatttagattaaaaagtttggtctttggtttgaaatcattctttttgatatgcaatttacacaatattataataataatgcgttaaatcagtgttttgttgataaaatgttatcagaagaattgccgtgggggcggtcgttcggtcttttgtttgtgcttcggatagctcaacgaaggcgccgtctaaaaatgggaagtttgtgggaaattaaatttaaattgcaattaactaatcttaaaataatagtaaatttacaaaaatttaaaattatttttataaatatttttccaatatttcccatcaattttgctcatttcattttaatttcccctcctccttctccacctgataagggatgatcattttgcacttcgcttcctcctcatagctcatccgatatccgcccgtcgattcgctgatcagcggtcggaaggcgccgaattcggcgccgctccgtgtgcaaatttcgtcggttgaaaaaatgcgcgggacaatgccatcggagagacgggacggcttcatctcgccaacgccctggggcgagaaaaagcattagcgagcaatgaatgataattaagtaattagtcaattaattgacaggaaaagtcttcagagttgattgtgatcaacgtaaacgaggaagaaatttatgttgttaaaaatgaattttgctgtgaaaagtgtgtcaatgtattttaagtaaaatatttctgcca

SEQ ID NO: 17002 - DNA, 1096 bp, Heterodera glycines
cctggaatgaaagggaattgatgtccggcaccgggaagatttttaaatgacacttaatatctgaagctttctatatttattttttctttttgtatattaattgcactctttatggcttcatctgtttgtcgacattttgtcccactgcgggacattttgtcaaaagtgtttttacctgcgattggagcagtgggcacgactcccatggcagatcgttcggaagttcgactaaatcggcggacgatctccgccgcgcgtacattttgacgggccgcgctccgtgccgcaccgcctcacgcccaatatcccaccaaaaacgatgcaaataaataattataaaaagttctaaattcattattatacatacaagtggcgctcatccggcggcatttcaatgacttccggcggagggcgcggcggtggcacccaacagcgccgttcagcgggctgctaaaacctcattttattatttattcgttttccaactttgctctggaaactgatcagttctaagtgccaaaagtcgatttttgcccgtttgtccctttccattttaaattgtcaatttccacctttttctttctccgccccttccgccgtttctttttgcgtggctcttcctcctcctcttcatcaatttcagcttcatcctcaatgttttccttgtcttcctcgtcatcaatctcctgatattcagcatataattaatccataataaaagattaaatttaaataatattattctctcactgtttcctccccctcttcttcctcttcgtcttcttcttcctcttcgtcttcctccccctcttcttcctcttcatctacttttctctcttccgcttctcctttgttttctttcttttttgccttaatttttgtttttttaatttcaattattattttttttacattgtaccgttttgctctctttctttttctcgtcctcttccttcacttcttttgtctttttcttttcttctttcggcttctccgtttctttcactttctcttcttttcctcttttctcatcctttttctctgcaacttttttctcctatttctcctcttcttttttcttattgtcaattatctt

SEQ ID NO: 17003 - DNA, 1293 bp, Heterodera glycines
agaggatgcgcaggttcggcagtttggttcatgagcttgatcgatataactcccctccctcccccgggccaaatatcctttggattcggcacaactggtccattaaaagtgccctcggggcacaaatgtgccgagccgacgacgccgaggtgttataaataaagcgggccaaattatgtgaaagtgtgacatgggtgactccatttatttcttgcatccagaaaataaatttattttttaaatttttcaataattttcgggatgaaaaatggaaattaatttttttaaatttaattatctaataaaaataaatagctaatttttgtctttagttcaatgatcaaatttcaaatgggaacaaatgaattttcgtgggtttgttaagacaattaagaaaaatcaacaccatcttttggtgacccagcttaaatacagttttaaataaacctttttttatttattttattttgaaaatattttcaaaataatttttcgctaatattaatcatttttttcgttaatagtaattatttttttatgttgttacatgaataattgtgctctcaagcatataattaaaaaaaaactaatgacaaatgacctaaagccccttacattttggcacccaaaaaaacaaatttacaaaaaaaaatttgccgtcgacaaaatttaaaatttcaaaaattaaaaacgcattgaatcaaagcctaaaatcaaaggacaaatcttagaaataagtacacatcgtggtgtcctgaaatagcaaaatcattctttaaccgtgtgtcacagaatttacttttggcacttttttccccttggcattgtgcccttcccccatttcgtcccgagttttaattaagtgttcttctgtgccggaggggacggcacacactttttgtgcccggttcagctcctccacgcctatttgttttgtcatttattgccgatactcgggcgacgaaaatttaatttttttttgtccgtttttattttttataattgaacattatgaattcctgagatagtttatgcacttgatgaagttttttatggaccaatttaatttttttcaagggcatttcaaacatatttttgttttattgtttggcctaaatgtttatggatggcactcgtgctaaatctgaaggacaatcataaaatttggcaattcttttaaatcaaataattaataattaattattttataataattaatactgaaaaagtgataataaatttttttttccaataaaaattataaaaaataatttctgaatttttcagaaaatt

SEQ ID NO: 17004 - DNA, 1306 bp, Heterodera glycines
tttaatttaaaataaaaaaattattttttttttgtgaaattttgcaattttttcttttacaaaacaattaatgattaaattaaaactatttagttattttaaaaagttaatgttaatactcattttggaattattattattatttttgataaaaattaacttactcgtatttcgtttgaaaagcattaaaaattagaaataaatctttaaaaaaacaatcatttatttttctaatatattctaattttctaactgaataaagacattaaaaaaaatttatattctttattgcgtgataatatttattttttaagaaataagcattaataatttataaaatttacaaaaaaacaatttcataataaaaaatataaaatttataattttatttatttttaattttatttatataataataaagtttaatgaaattttatatgagaacagccaaatgtgttaacatcattataaaagtgagaatagaaaaagaattaggaattctccaactataaatacatttatcattaagaatttccaaaaaataacaatgaataaaatgttatatgtgccggattttatcagtatttttaaaaaaaattaaatttatattcaacaaagagctaaatgttcatgaaattttcttttttacaaaaaaaacaacaaatgctatcaaatatacaaacaaaaaaattgaatagttatacggaaaaattaaatattattcaacaaagtctgtatgattcatgaattaacattggactagcatgagtaaataatacaaaaacaaaatagctaagagtatttatttttaatttctctaattaaaacaccaaaaataaaaaacaataaaagattcactattttaatgatattataataaaataaaaataactagcttcctgaaaaaaactcatatggagcaaaacttcaattcattagaacataaaataataattatattatatttaggttttataaccaatctctaaaaacgataatacataataacaaagatagattaataacttttttgatgatttttgaattaagttgctatatctttttaattaaaaaatatataaaaaaggattatttttaaattaatcattgtaaaaattttaatttcataccatttttgttctaaatacattctaccattaatgtaaaatagcataaaaaatgtatatataatttgtattttgttaaattgttttttgcatatttttttgtaattcagtaacataattttaaaggctgtttattaaacaaatttttattgtatttatcctttaattcctttccatat

SEQ ID NO: 17005 - DNA, 984 bp, Heterodera glycines
ttaaattttcaaaaaatttccccggcggcgcctatccctctaaggtactctcttccctcacccatacccaaaaaatttttcggaaaaatgcgccgaaaataattgttaaaaatctgattttttgattctaaatgcactgaaattaccaattgcttatgttttccgtaaaattgttaaaatccattttcggaaaggtataaatttctcatttctaagccggaattgctcagaaaaatagttggcggcgataaatatgttgctaaggcttgattttgttgaataaaatgcgatttaaattttggaagcgtgttttaaaaatgtccttatttttgaccctaaattataatgttgccggactagaagcaaaagaattttacgatcaattatattaaatttttttttaaattttgtacatatttatatttatttgaaagatgatttttgacattaaaattccttgtttcgataccctagccacttaacgaaataacatttgcgcccgttttttaatttaaattggcacaaaaattctctgaagaaattatttatcatttactgatgaagtgcataaatttgttaacttttatatcaccaaaggtttttgtgggatttaatgaatattgtaatatttacattaattagtcttcagcaaatgagattcaatattatttggacctcatatatttgttcatagttattattttaaatttaagtttacattttaaatagtaaagaattaatttattaaataaaccttgaataatatattttttatttatttgggtaaatatatatgtttttatgaattgcacatcattatttttttgatgaattagcttatgtagaaaagattttggtttttcttgttattttctttaaaacttttcctttatacatgaatcatttttgcacttatttatcccagcacctgaggaagcgaaaaaagaaaattattcattttaaaaattattgtttttttatcat

SEQ ID NO: 17006 - DNA, 297 bp, Heterodera glycines
tataataacgctgcggacatctacatttttgaattgaaaattattggtaattactctttctttttctccatattgaccatcatactcatactccccccacccttttcttcttcccccaccctttctcctccttcattttttttttcctttccttctccaaccctctcctccctctcttgatagtttaaactgaaggcgggaaacgacaatctgatccccatcaagctagcttctgcaggtcctgctcgagcggccgcccggggatcgatccccgatctagtaacatagatgacaccg

SEQ ID NO: 17007 - DNA, 2378 bp, Heterodera glycines
  unsure (1)..(2378): unsure at all n locations
tttttcactttttatgtgcatatttcgcaatttttgatgcatattttatgcgcatattttgcgattttatgtgcatatttttggatgccctagtaataagtgaaacttcattgcacatacaggatcagcgacctaaaataagtttgtatcgcttcgtcgcaggccgtttcggcgcaagcccaagtttctggctataaattttttcattgacaaacaaatccaacaattggttctgaatttttttgtgaaaaatcgaaaatttctagaatttctggaaaaacttttttaatttagaaaaaataaataaaatttcaggttttttttctttttaagattattccattgactatttacacattatgcttaatctggcggacccatattgggaacccacctgcttaaactacagtcagtaggtatagaccggtggtctgtaacaaatacagtcgcataaattattatataaatattttccatataaaataaccaattttatttgattttggaaattattccctttggcaatagatggtcaaataaatgttttttatatttttcatctgttcaaagctcgtcttttggtgcgattggggcactcggccaccgatttggctgatcgttttgccgttggctttgtttttggcgacatgccaacggtttggcatcgcccgagtgatcagcagcgccaggcaaagacgcattggcaccgttggccatttgcacacgaattgtcggtggtttctgctgaaacatttacatgacatttgctgctggatataatcagcattaaatgaatgatagaaaagtgagtatccgataatttgattgtcattaaattatgaaaaatcattaattttacttaaacaaccgattattgttcctaataaaccagaaccccattttttcagggaccccatactccctcacattcgcccctctcatttaccctctcataagtgccattttgctgatcatttgtcggaggagatgacgtattattcatgggagcaagcggcggtgccgacaatttggagcagtacaagttgttgttgtttgaagtggtggcggaaggtgtcgtcggcatacgccgcctttgctgcagcaatggggtggcaacaaaagcactgaaacggcaagaatatgggacgaactcgttaaggagtcttattgtaaaagaggaaagctagatgaattttgaagattttcaccgagaaatttccatatttttccgataaaaatcacatgagggtaaccgcggcatttgacaaatgcgcagctggttttagaagcgagtctcggaaaattctcgaggcgagaaactctgatttttgcggtccctagctaactgatgaggctcatgcctatggtgaggttggggtggggaatttggaaattggcaaaaacccgggggtcgactgacaaatgagacagaccaatcatcatttttcggtgtcggcagagtgccgtcccggccgccgttgtgctcgtgcgacccgtccaaccgttcgcccattaccattcccatgttttgttcgtttgctgttggtccaccattcccctcattattatgttgctcatcaacatgcgcgtgcaaaacactgatcttcttctctctgtgctgctgctgaaatgtgttaacaaatttaatggttatcccaggcgaattcgaaatgattaattatttgcctaaattgtgtaataatgtcatttggtttgaatacatggcgatacggacaaattagggaggattaagttttggcacaaaatagtccatttttttaattctatactatcgattgaacaaattttgcataaatttttcaaggaggcgcctttaaaaaaggtttatcaattcctgggtttaaatcataagtttcaagtacgctttcgtgtcaaaatgttacccacaccagaccatcttggtcttcgaattttgttcaaactaaattgaactaattagtcctaattatagtcccccgaccaaccaatccattgacaactttctctcctccattccttcccatcgcaccatttttggttattcgatacgattttgccatggtgtttttgtgaagtttttcctttttttaatttttttttttattaaaacgaatcttttctctttaggcttctaccgtagtcgtcgctctcctcttcatttgatcgtaacggtcgcttctcctccgcaagttttgtcagctgctggtcaattcgttgcgcaaatccacctccatttttgtttgccttacaattttgcgctttacactgttaaaaatggagaaaaatgatcaattagacaattggtaacggacaattggcccanaaatggcagatacatattcatggggtncgattttatatttttccttcctcttttt

SEQ ID NO: 17008 - DNA, 1583 bp, Heterodera glycines
  unsure (1)..(1583): unsure at all n locations
ttcacatacgcccaaacacntttggagaattatgacatttctttaagaaaaaaaaattaatcaaaaaatattcaagaaaaaagtcgaatgggaattattttaaaatgagctttaattaggagggaaaaaatttcaagcctctaaaaaactgcacgtgattaaatcataagcaaaaatattgtattgtaattgcctaattttttcaattaatcaaaatcagtgttatttaattttttccaggcgtggaattccctggtccttttttatcaaaaaaaaaaaaaattcaaaattatgcgaaaatttcctgggagaaaaaaagaattcaaaactttgacttttccttttgacaaaattccaaaaggggcgaaattgacctttgttaccaaaaaatatccttttgagactcgagaatgaatgtctgttttgatagtgcaaaacaatgaacggacctgaagagttcgcgattgtcgagcaggtcgatgaagcggagaatggtcggaccgtcgaccaacaaacaatggcgaaactgcgcacttttgcaaaacgctgcattttcctccaattggatcggcttcatttgtccctcataatggcaatgtctgcacgcgctcactccgcaggggatgtcgttgcgcaagtaaagttcgtgaacgcgctaaaaggattgactttaccaaagtattataagaaaattggcgtggcatttttatgacttggtcccggagttttgaaactgaaccgggacagaaacagcaaaaagccagttttccgtgaccccggtttcggtcccaaatttagcttgggattaataaatttaaaattttgctacgttatcgaggttttttgatggatggagaacccgacgtagggaaatttctggtattttatgtgatgaaaggggcccggaggtgaagacaaaccgcaatagaaccaaaaataactaatattataactacaaaatattactttgttgaatttgccattgcgagttttataaaaagttgttctgaagacccgggcttctaaaattgaaaataaagggcacctggacttaaaatatcatttaattataatttatacctattccgctttgctttacgttgagttccatgggtattttaaacttctatagacttcaagctgtcaattgataccaataaataggtcttgaccaaataaaaaatgttttaataaactggggatggtcattgattgtaagcctaaaagtcaattggacgcgaaaactgaattagagccggaaattcaaagaaaaaaagcaataaaattcttacacttgtatagaaatttttcaagtgaaaatgtagtagggctgcaaatttctagtaaatattttttcatcggtaggggacggttcggtgcccgccgtttcggtgccagcccaagttttggactacaacttttttcattgttgaccaaatctaataatcttggtatcattcgaaagctttatatgtatagaagtttttctaagctattgcttagcgagaagacaattaccaataaagttatagacatgatataacaagaaagccataatcttggacgttatatcttaataactt

SEQ ID NO: 17009 - DNA, 1440 bp, Heterodera glycines
  unsure (1)..(1440): unsure at all n locations
agcttgtgaagggctttcgaatgataccaagattgttagatttggtcaacaatgaaaaaagttgtagtccaaaacttgggctggcaccgaaacgtcctgttccgttttttccttgggtttttttttgatgatctgttcaaaatagatttaaaaatagaaagcagcttttatctccattttcttcagtgcaaaattcttcaaaatattttattaaataaacatggaaaagtgtgttttctgcggtatgtttaatttgtttgatttaattaatattattttaaggttcaacacgaaaatctgcaccaaatttgcgattttttgggataccgaaagagcccggactcaaacgtattcagtggttttatgttcttggtgacagagaaattgggcccaaagaccgggtgtcgaaaagcgtttccatttggtaatttttgataaacaaatcaatttaggtctgtgcaatacatttccgcttgggaaaaccaaacagcgatccatcgcacgaaggtgggccatttgtgggtccaataaatatgtcttactccccgctatttaaaaaaaccgaatccctcgtggtgacaaaacaaaacaatttaaagaaatgatcgagttcagatttcgttccccatttgaatttgaacaatgactctcccgagtacatggattatcttgaatcattggacgattgcaaaagaccgatgggcacagagaatcgaagacgcccgataaagccactgattttgaagaagaaaagcaaaagcggacagcaacaggaagtaaatgaggaaattattcgttttcacaatggtcaggaaaatgaactatgttttcagtcccaatcagcctgtgccgcgccaaagcttttgccaattccaaaatcagtcgcagaatcagtcgatttgagagagggacaacccgtacttatcagacgatacaaaaaggaaagacgacaacaaaattgatgaacatttactttgtcattttattacctatttttttataaactgtcctttggcaatgaattggaaaacccatcgttttttttctccaatttacaattgcgattttccctaaccaaccgtgaagcgatcaaatcggtcaaaaatcaactgcaatcgaattagctccttaaaaagattagtcggaagcacaccgatttggttcgtccgttacaataaatggtctggcgttccgttcaaggttgcccccgagggcatttcagggaagggaaggggtaaatgcggataatctcataaatttctctcacacttagcgatttgcccctcgccaatgaaaatgacccaatttgccttttaatttaatcacatcatgtgaattatcagtccataaatgaacttccgttcagtgaatttgcaacattttaagcgaagggaataaaagcatttaaagattgtgattattttagcaaattgnaattta

SEQ ID NO: 17010 - DNA, 1932 bp, Heterodera glycines
aaaatgcttttcgtcataaatttgtcgttcctccttttgtttgtttgctcactttctgcatctgtttgttgttctccttcgtcttcgttcccattgttttgatgttgtacgcaattttgcgcatttcgtccctcatgacgcgaatttcttcgtcgagctgtcgtacgcgttcgtcaatttggtcggaagacatctccagcacttgggcgtcggtctgaaaaattgaaaaaatgaaatgacatagaaaaagaaaatgaaaagcaccaatcgctcaccacatctccggctgggtgcgccatcttctcgttgtgttacgcccgttagtaaaatatgagaaaaatgcatcacaacagcgacttttatacacattttggacgtttttttttgcattgtgtgcagttgcagtgcgccaaaatgtgcgagtttcctattttgaatatttttcaaattaaatcttaattcagcacgatgatacacaaaatatgagtacggctaccaacctagagttagaatgggccggcatcgtttcggctccaaagtttcggcaccaaaattttttaataaataaataaatagaaatttcctaaaaagacaaatttattgtgcagtttctgaaattttaaaacttttcatatttctcttttatcctttttgacactcatattcctcactcttttctctgtctctttctatcttctccccttaataattcaaataataaaaaatgttcgaatgtctaataagtcaatcgggtcctgatttaaaatttcgtaatcccaatgctaagccagcctaagttgaggcctaatacgatgcccaggcctaaacagctggcttctgattcaaatttttcgacactcggattatttggcaaccggacaggaagcgataatgttttatctcatttaacgtctgaatttgtgtttaatgccaaaaagtgctataataataatcacacaatgcgacataattattaaaaaaaaaaatttgcccaaaattagtcattttgatggtaaatatctgttaaaaaaggacctaaatttgttaaaaaaaaacattattttattaaaggtatcgcccataaataaaatggaattaaatgacagccaaaacagcaacggaatgccaagggaaaagcatgttgatctggtggattttaaagtgaaagaatttaagcttgaagtaattttttgagaataattgagtcaagcaaatatcataattttccacagacatttttctcaatgcacctggaagtaatgggaaagtacgacacgagggccggtacattgcgggactgtgattaaaattgaaaattttggccttgatgttgtaattttgaaaattttgagatagaaaccctgatctaactcagagtttcgatctcagttttgaaaatcctcatttcagccataaaaaatgatcatttgccactaaaatgctcgaactaaaaaattcgatttctattgttttaataaatggacaatctcttaaattagcttttaaattgctttttttgtggcgcggtttttccaaaaatttttttgcgaacattgggggggggggtccggcagtgccgataggcgctgccgggaaaaatttggaattttgagtgcgatttgttaacagattttgtcaaaacaattattttggccccctctatcgaatccctgtttattctttcgaagttatgtttttaactcgagaccggatcttctatttttacaagggaaaatcccaaaaaatatttaagtttggcgttacgattactaattaaaaataaacttatttacacttggagccaaaattgactcgccgtgatcaaaagaccacaaaaatccgcaaatcctcattttccaaaaaagcctctttgaccctctaaaagaccacaaaatgaagaaaaatcctctagatatcgcatctctgatctaa

SEQ ID NO: 17011 - DNA, 877 bp, Heterodera glycines
acggatttatggtaatctaagtgacaataaatgtcccattctattttttcgttaaaatttttcaatggtattaggggtaaaatgtttgacaatttgtgtctgatggccaccctccgtctcaactttgcgtagatggccagtccaatcagtgccgccatggaacagtgcggaatagtcggagtaaagcgcacgtcgacgaaagggtcggtcgggtcggcgctgacttggatcagttcctcctggagaacagaggaaaagtaaagggggggggcaattggtttcaatggaaatggatataaatttcaaaaaatgcggggactaaacggccgtgttaataccaagccgaaaaaacgggagcagttcgttccccctctccaatatcgtgtcgttcgccccgaataaattttaatatttttttcgaattttataataatttactaattttccaaaaattttcccaaaaatcctaaaattaagtcaaaaaaaaaacacggaatttctaactgtgccccttccccacttggacgacgttcagctgttccaacgtgtacggatgctcggggtcgttaatgtcgcggatgtgttcgaagatttcggtggcatcgatgggctcctccgtgccgtcgtccaacgccgtggccgcttccgccgccaacgcacggcgagctttggtcgcgtaaataactgaacaaaaaagggcaaatccattgacggaatgaaatgcgaaagaattaataataattaaagagtaagtgcaaccaattaattaaccattcgaaagtgatacggaagtgattaactaaagaaatccattatttatcaggatacccggcgcagcgttatcgagtcccattttgcgtcaaatcaatggctaaaa

SEQ ID NO: 17012 - DNA, 1118 bp, Heterodera glycines
aaaatggcatcgagtggacaaaagctgatccgcgttgaaaatgccaggaaacgctcgagcggagaagcgtatgccaaagtgatcgaccgggctgacatttcggcattttcctctttacaataacactttctctcagatctctctgctgcaacaaccccttcccactgatcggaaatggatccaatggctttttgccgaggaattcttcgccgacgaatggagccgaagggttcccgccgttcagcttcaaatcaccatcgtccgtcctccgccctccccaccgccacaatttgacaaaccgcggatcatactccgcctcaagtccccgctacccgcccacaaaacgctttttcgcgtgacagcaaagtgagtccaccgaataatgccaaagtccgcttatgctaacaaaaggccaaacattgagcccccaggggagggcgggctttccttctccgctcatttgcagccaaaagaataattgaattttggtctggcactcgagcagtgcgttagcctcggtcggttttggtcttcggccgccctcttccatttcaattagcgccttttggaggtcaatttaattctcttttcttcccattcaactttcgtgctgtccattcgaccgtttttaataaacaatttcgaattgaatgaatttattttgctgaaacagaagaaatttgaaccaataattttcaccgaatcttaaaaaaaatatatgactcaaaaaagcacccgaatttgtggaaaacgacaaatgagaatggtcagtgacgaatattctttaaatggcgggtatttctttcacttgtcattcgttgacaaggacaaagattaatcgagaaaaaaagaaggtcgtaatgatattgacgagtgatgatcggatggatggataatgaaggggggagaagggaggggctgactattcaaaaggtgcggaggcgtgatggatcatgacagaactgcttactgcgcgttactcggcacgtctccccacaggtttgtatttaattaaattttctccatcagggatttttttccattaggtcgaccgttatcgttctatagctctactccatttatagaaatttttgttgaaatatttgtcgtgctctgaa

SEQ ID NO: 17013 - DNA, 3110 bp, Heterodera glycines
cgcaaatgaatggcgaattttcagcgaattcctttgagcgtcgatgagaaagtgtccaaaatgaatttggaatcgggaccattgaggattcacgagaatggaagcatggaactgatcgaagcactgaactttgaacagagcgccgaatggattcaatcggtacaaattgacggaacgcataaaagtgagaaatattaaaaaatttagttaaaataatttctttattatcaagaccctttattatatgtatctttttgtggagagaataagcaaatcgaagttacttttgggaagggctcttaattagggacgaaatgaaagagaaaagatgcaattaggagaattattatagaaaaagttaagaaagggaaaaaagaggagctcaaaacgggggggggggtaaatttatggaaaagtcaggaattaagtttttaataaattattttagcacgccttcagaccattcgaattgacgtgttggatgtcgatgaaccggcagtctttataaatcgcccccggccttttctcgctgtcgtccctcccctggaaattctcccccggggcttccaagtgtttcgtttggaggccaaagacgaaaatggggaaggaagtgccgaaaaagtgactttcagactgatcaacacggagcgtaagaccaaatcgaaggcctcatttgatgagtatgccaaacattcagcaccgaattcatttactgtggacggattgagcggcgcaattcgcacagcactcacaaaatattcgcctgggggcacttacaaagttttcgtggaggcaatggacaacggaggggctgaacaaagggtaggtaaatggtggccatttatgctgtggcataatctgagagtgccttttgctaagagtcccaccggcgggcgttcctccgaaattgccgtcgtcgaagtgttcgccggggatcgtcctccccaatttctgcgtcaaaagtacgctgcgtcggtggctgaatcggtggacactgggcaaagtgtgcttcaactggagaccttctcattcccaccaattagcgaaaatgggacaccaaaagtacagaagtgccggaattcgttaactaattggatcatttagggcccaattaaatacagtcttttcgagaagggatcgaatggtgcaaaattcagccgggagacttcggattttttcggtatccacgaaagaagcggactgatttatttgaagaagcgattggacttcgatgacaaaacccagccaaggcttttttatctcttcggtctgtcggcaaaatcaaatccgaaaagcatttaaattttgaaggggttgccgaagaggacggaaaagagtcatccgttcccgtggaactttctgtcgtcgatgtgaatgacaacgccccccaatttgtccaacccgatttaatcctcttcaattcgcgaggacattcccacggggcacactatgcataagggtaatggccagagggatgctgtctcagcattttggccaccaatttccagtcgatgcaatcgacgccgactcgggactgaactcggcacttctctttgccgtcgatcacccacaattcatggtcaacggacggggcgaattgcaaagaaagccgggcactaaaccattggatgctgatcaggtgatgaagcaattagcgactctaattgacgacttccgagttcagttgcgacagggccactttctgtaccgcttcaacgtgtccgtgtccgaccagggcattcctccgctcatttcctccgctattgttcacattcaaacggaaaacgttaacgatgaagcgcctgaatttgttcctactgcgcaatatatggcgacagttaatggccaaattaaatttaaatgaaaaaaaagaatttcaggtggcagaagacgccctcgggggaacgccggtagtgcaagtgcaagcgatagacccggacagggaccaagtgaactacgcatttgtggacgaggaaggagacgaaactgtggtcaatggactgtttgaaattgaccctgacacaggttggacaaagcaaagaacggacgaaccaaccgcaaaacgatcgcctttctttttgaggactgattcggctccatctctccgttcggaatgatcagctcctttccttggactcgcccttaaatttgactgtcattgctcgagatgatggctcttgctgttctcatcggcggaagggactcgccgttcgtcacacgacaaaagcgacggtcagtgaacagacggacaaagaccgagctaattaccataataaagtaaacacgaacaaagatgattgtgccatttgtgtgaaggttcttgttggggtgctcgacttgaacaacaataagcccgagttccctcactgtgccgattattctcggatggcaatggtcgaagagggccaataccgcgtcaatgcctcgccgatccttcgtgtggaggccatcgaccacgacttgggtcgcaatgggcacgtgtcgtattctctttactacgcacgcagcgagtcgcggaagccctttctgatcgactcggacagtggcgaactccgaccttcgccttattttgtttttgatcgcgagcaaaaagtcgtcgaggaggtgaccatcaaagcgacggacaaaggcgaccgaccgttgatcggcttctgccagttcaaagtgcaggtgatcgacgtgaatgacaatgcgcccgctttcgacaagtcaatttatgagacttctatgggaagggcggcacgggtcggcaccgctgtgctgacagcggtggcggaagaccgggacgggccgcgcaacgctcacatcagctacgccttggcaccggacgagacctcgtccgcggaacacttcgaagactttcagtcgttcacccttcccgacccggaaattggcgagattatgctggccaaaaaggtgccaccagagaacgacagacttctcttctcaatcatcgcaacggacaacggatttccggtagcacaaagcaccgcggcccaagtggtggtccgagtgcacgaaaagcagcaaaacgcaccgcaatggcaagcgcatgcggagtgtccggcgaggctaaccgtgtcggaggacgtgcagaagaacaccattct

SEQ ID NO: 17014 - DNA, 892 bp, Heterodera glycines
ataggcgccgccgggaaaaatttgtgattttaatgagattcgtcaacagattttgtccagaaaattgtttaaattttgccaaaaagcttattttcttgataaaatagtgacattataccataaaatttcaaaaattatgagtttatttaagaaatcagaacaaattttggtcgctaccccaaaatcagaacatttctgacaaatcagaacatttttattttatcagatttggaccctccaaatcagaacatttctgataaatcagaacagatcgcatccctgaggaccgggacttgccgggacctgagaagccgggaccgggacctcgattttttttcgggaccgggaccgggaccgcaagaaaaaccgggaaccgggaccaaccgggaaattttaaaaattcaaaaaaattttaaaaatttaaaaaaattcaaattttaatttatatcaagtgaaaataatacaaaattatttggttttttatttaataaattaaattaatgaaaattttcaaacaaattttcttcaattatttcaaacaattaatcatttttggactaaatcatcgaatattaatagaaattcagatttgattttcacatcacttttttcggagcgctttttcaaaaaacttttggggaagaagtggtccggcggtgccgataggcgccgccgggggaaattttgaaatttgggtgcaatttgttaacagattttcaacaaaaaaaggttggtttttgggattattaagctcaattggtaggattttcatttaaaaaatgataaaatatgtatcaatttaaaaaaaactatgaggaatcatattttctttataggaaacccacgagtatacaaaaaaaaattgaaaataatctgatttatgtagagggat

SEQ ID NO: 17015 - DNA, 2129 bp, Heterodera glycines
  unsure (1)..(2129): unsure at all n locations
gataattccgcgaaagtcctcgaagaaattccaaaataatatgatggtttgggtttatgtggtaattgtgatcattatcattgttcgggttcactggaatgtaattttgcaccaaattgaagaggcgcttgttctggcgcttggtattttggcgctttctgcggcggttcgagtccagcaacaaatgacgcatacttcccatcggtgcccttctgctcacggcggagaacgtcaatgaagtgccagatcgatggatgacggcaattgaaggcgccttgaagacggtgatgttctgcctctgcgtggttgtttgtcctcgcttccccattcaatgtgcgagtgtagacgttccactgttctggtgggaatgttggctgtgaccaagttccatttggccttggttgtccgatgtaattgttgagcaacctaaaaattgcacaaattgtcgttttttcaaaaataatcagtttaaccagtcaatgagcggacgaagtgcaacgtcattccccagctccgtatctaatgcgatgacagctgtcctgatacaatcagttggtcaacgcttttaggaaccacaggtggtgcattgacttcatgtcgtgcccttttaacgatcttaacaattcattcgctgtattgtctatcattaattgaacagtacctgtcttgaactattctgtgtaacgaaaagtcccgctggagacggcacattttgaagtgcctcggaacggatcactgctggcggttcatatgtggcgagcgcacgccgttttattgccgtcttgactttttgcacctcaacgcttgatgcatttgcaggacacgtatgcggagtcgccaaacgtatgaattgatcagccaaattcgtccagattcttcccttgcacaggtccttgaattcgcatctccaaaattttgtcatcccgtccgcacttgctttatcaaaagtgtaaaggtgcccttcatgcgtgattttagacttttgccttttagtatcaatttggcgattcatttcacctaaacattaacgacaaaattatgcaagatcacaaaaaatgaacgtgaaaatggagaaattaaatttaatatagactattattttattgacttcattttttgaaacaaaacaaaattttttttactattnctgcgtttctgatttttggcgccgaaacgaccctggcgccgaaacggcggcgccgaaacgacccgttccccctatcggcgcccccaaaatttttggaataagcgcgccgtaaaaaagcgttttttaaagcgaaaaaaagtcgtcatttggcttttaattccaaaaattgggcttttttgatgaaaatctgttaacaaatcgcattaaaaatttaaaaaattttcccggcggcgcctatcgacaccgccggaccccctcccctcgctcattcaccaaaagttttttggaaaaatgcgccgcaaaaaattgttataaatctcgtttttgatcccgaatgcactgaaatttagaatttgcttatttctccccaaaaattgttaaaatcgattatgggaggtggaaaatataatattaatacatttttgatcgaataaattgtaaaaataaccgttttgacgcaatttcgcaaacgttctgattttcgaccctaaaatctgattttttgagcctgctgttctgatttagaaaaattttcaatcgcatccctgtggtatagaggatagcgttgtgatggcataatggtatgttgatattaaataaatatttattaaaacaatggttcgctaagagaaaaatgttgattttcctttctctagttattagtgcctatttccaggtttttatttttggagtctaaaaaactaagaatttttgaaaaaattattttcatctacacttcagcacctattttggatttatgcgttgcagactaagagatatctatggaaccaataaaacaatggttaccgattcccatttttggttttattctttgagctgatactagcagcaattgtctcgttttacatcggtccaagccgttttgagcagttttgagttcgagacatatgatacaaatcttcagcaattttaattaggtccctaagcttaataattaatatgtatttactaatatgagtgg

SEQ ID NO: 17016 - DNA, 1741 bp, Heterodera glycines
tgtagaaaaggctagtgtaggaatcctacgctagttcattagtcagcgtaggattcctacgctaggtttttcaaaaatgatccgaggaagcgattttccactcccttttatagactttgagctcgagtatgataactacattagcctagtgtaggaaaggctagtgtaggaatcctacgctatgtcattagtcagcgtaggattcctacgctaggtttttcaaaaatgatccgagggagcgattttccactcccttctatagactttgaaggtttattttttttatataatcaacacaagtagaaacaatacaaatgcagaatctacattctacactatagaacactctacactatagcacctgtaaaagtgactgcggatgtgcaatttcgcttgtagtgtagtgtagtgagtctctacactatagaacacacctacactctacactatagcacttgtaaaagtgacagcggatgtgcaatttcgctgcgcttatatagacgtttggagagtagtgtagagtgtagtgtagtgagtctctacactatagaacacacctacactctacactatagaacactctacactatagcacttgtaaaagtgacagcggatgtgcaatttcgctgcgcttatatagacttttggagagtagtgtagagtgtagtgtagtgagtctctacactatagaacacacctacactctacactatagaacactctacactatagcacttgtaaaagtgacagcggatgtgcaatttcgctgcgcttatatagacttttggagagtagtgtagagtgtatagaacacacctacactctacactatagaacactctacactatagcacctgtaaaagtgactgcggatgtgcaatttcgctgcgcttatatagacttttggagagtagtgtagagtgtagtgtagtgagtctctacactatagaacacacctccttgcaattttccaccttaccaaatttcgaaaaataagcactcaaagaagcgtctgtggtatcaatagataaactaaatacaaaaaaataaggaagataaagtatcataaggcaaacccgccaacgaagattttgtggtcttttccattaacggaactgctgctgccaggggctacagacaattggacatcggttggctggttgccctcggatggaatttgtttagaagacatgttgttgttgtgggtgttgtccatctgactgtgctgccctcggatggaatagaaatatgatttcgctgtcaacgaaatattttgctaaacatataaaaaaattagcacctgtaaaagtgactgcggatgtgcaatttcgctgtgcttatatagactttttgagagtagtgtagagtgtagtgtagtgagtctctacactatagaacacacctacactctacactatagaacactctacactctacactatagaacactctacactatagcacttgtaaaagtgacagcggatgtgcaatttcgctgcgcttatatagacttttggagagtagtgtagagtgtagtgtagtgagtctctacactatagaacacacctacactctacactatagaacactctacactatagcacctgtaaaagtgactgcggatgtgcaatttcgctgcgcttatatagacttttggagagtagtgtagagtgtagtgtagtgagtctctacactatagaacacacctacactctacactatagaaacactctacactata

SEQ ID NO: 17017 - DNA, 1641 bp, Heterodera glycines
agcaggaatgggcgctgcttcgggtgccaattttgcatatttactttgaaaatttgtccttggcaaaaggccgatttgactgaggccagcggtgaggtgctaactgcgcaagagcatgccaaacatggcgtggttgaggcggcgcgtttggcggaggaattgcgcgttgagcaggaacggaccaatgtggcagaacgccaacgaaaactgttggaaatgcaagtgaaggtgatgacggacgtaacacatgcatttattggatttataatattggggaggaattgccgggaaatggacgcaaaaaagggcaatttggcgcaatgggcaggggaaaatgcaacaaattgagaactcaaaagttaaatggaaaaattaatctaaaaataatattttaaggaaatgcaaatcaaaattgaagaggcggaagtgactgcgcttaaaacagggccaaagatggccgccaaattggagggacagctgaaagcggtggaaaacgaattggagggcgagcagcgaaggcaggcggacgcctccaaaagtttggccaaagcggagagacgcgcgcgggagctccaatttcaggcgggaaacagaagagtgaaattaaattgagcaattagaaacggatgatgattgatttaaggcaattatgaaaaactgtcaaggattttccttgagaaaattgaaattccgcagtttcccaaaaaataaaaattgtcccttttaggcagaagaggagcgcaaaaactacgaaaagttgtgtgacttggctgaaaagctgcaggtgaaaattcgagcgcagaagaaactgttggacgatacggtacgtaccgtaatcgaaaagggtttttcgaagtgaatgttttattcaggaagaacacgcgaatatttccctgcaaaaatatcgacaatttcaaatctctgtggacaacgcggaggagcgtgcaaataccgcggagtcatcattggcacgcatgcgttcccggtcgagactggccgtgcccagcggcagcggaccgttggccaagtcggagacatttgctctgtgatcaaaggggccgagtgtggtcgaacttgatctaatcaatcgataccatcgagcttaatctaatcaatcaataccaatcattatcgatcgattactaatcattaggactgattttgattcaaaattaattaatttttgctagtaaaatttttttaaatgcaaatgtattagtttaaaattaatacaaagattaaaacccattttgaaaaaataattcccccctgctaattttattaaattgctttaattaaaagttggtcgtcttctctgtgcaatgctttgagatattgtcagattaaatatttaaaatcagtaaattcactaatttgtaagtgatttttttctttagacttttcttttgttactaaaccacttttttaattcgcaattaattctctttcttaattggtcaattaaaacaaatttcagtcgtaatgagttttaaaaaaaattatgaatgcccctcaaatggaaaagcaatgattggcagtcaccgccgagagtggcgacgattaaggaagatatcaatcggtcagacatttttcaaaatgccgaatggcacagcaatagcggggggcggggggggggggggg

SEQ ID NO: 17018 - DNA, 1952 bp, Heterodera glycines
gtgtctcatcctttgccttcacatcatagcatgtatttctcaaatggagagagtgctaaaatcagccttaatgaccaattgagcagcatctgtctgttcaatttctgattgtagaattgaggcaagtttcatgggacgcagctgctctaaccgtgcaaattcatctactatttcgttcataaatttctcatcagttggcgaacaggcagtatatcggtattctcgtctcactgtcctgacagtcgcgcaagttgatacgtaagtagagtttgctcagtggttcgttagcgtaatcatcccatgactcacagtacatattgccgttgagcatttctttctggcgagtcctctcggtcctccttcgacactctttgtttttcctcccttccccccccctctccccaccaaaaagtaaaactatttctgtgcgttgtgcacaatggcagggccaaacggccgcgccgccatcgccgactgtgcgctatgtacgtaaagttacgtgatgatttgattcgattcgtttggtggaacggggtgtgaacgatgacaacggccgattggggagaccgaagagaaaagggaaaaatggggaaaatgggggggggggggagaatgagcagaaagaaggcacataaattgttggaatgaatgctacaaaaaggaaaaaggggaacaacgatggccaagtccaaaaagggcaaaggaaaagcgacgggaaaagcgacggacgatttgttgggggagaggggggggagggcttcttttgcttctttctgcggaaaggacggcactcgcgggggaaatcaatctaatcctcaatgataaatttataaaaaccaaattgagaatgaatctgttgccttatttatcacttctcactcttctcattctttgttgcttgttttgccattcattatgcttttcgagtttctttctgtcaatgttatgccattgccctccaacgaaaaaataaataaaactgtagaacagagaagggcactcaatccgacaatgaacgaacgaacgaatgaatgaatgaatgccctgaggcaatgtcgccggggatggccagcggcgtttgtttttttgggttttggcaaatgccctcctcggcattcgcagttatccgtcgttcacatgcctcgggcgatttttggaaaatgccatttgcacgaccccctctattcatgcattattattaccttcttatctgattcgctttaacgctgagatgaccttcactaatttcccatttttgaacccattattttatgcccaacggcactaaaatatagacaaaaattaaatggcaaattctaagaattattaatgtgttctaatttcaaaattgttaagaaaaaataatgagacccactaatttaaaatacgtttataaattcaattttggaattcgtccatgaatcttctgccaatgggcggacaccaaaaaggaattgggcgactgagggggcgggggggcggatacgaaaccggcaaaatggagcatagggggagggcaatggtacaattaggaagtttgaaaattcatgaattatttatgtaaattatttttgggtgaaattacaaaaatcgccttcccccccccccctctccttttccccctttttcctcctcacagtgtaagttcatttcattcatttccttctgctgctgatgaaaattccattcaatttttgctttttcattgtgccaatttgtctttctctcttatcaaatttcatttctctctgtctcgttgtgtctgctgctctccccaaattgcccactctctcccgccaatcgttggtccgtccattccgtgtcggcccactgactgtggcggcgaatgtgtgagaatgagctgactgacggggggggggggggggggtcgggcaccccgcgagagactgttagagccatcgcccgccgtcccattcatctgtcctcttctg

SEQ ID NO: 17019 - DNA, 1468 bp, Heterodera glycines
aagaacgaactgagggaggacggggaggctatttatgcaatagactgagtggtcaaagaagggatggggcataacaactaaatgggacggaatgccaacataataaataaatcaaataatcaggcccatcccgaacactttatatatgatctcagataggcattcagatttgagcgcgtcaaagactaccaaattcaaaaaatgacaacaacattggaaactaaattttgaatgcattggttttagtttaggagagccaacctgtctttatccatttgtctaatggccgactgcatgtttcttgcatcgtcccgtacatagcaggccattttatttagtgaaagaccatttttttccaaacactcagcaatgttctcagcaataatttctccggtatggaaaaattcatccattggaaatgcaccaagaactgcatcacagcggcagaattttctgtcaacccaatgaatggtgacactaaaatgtacagtatttgaggtaataaaaataataaatgcctttgtaactgaggtgattgggttggttttgaccagccgtcactagtatttgcaaaaaaatccgcgccgacaccagattgaatttgttgccggatttgatcagccattctgggaattactttacgccgaaaatgctcactgcctgcgaattcctaagaagataattaaagataaattagataagttttaaatacaagactgggataggccttcttgcacaattcctttaagtccgcgtcatcgaaaacataaaaagaattgttttggcgaatcattattcgtgtaatacattcttcggcctcttccaatgcgtttttttgatcaccataaaattgtcaatttgcttttgattctaaaataaataacaaacaataatatttttaattatttacaccttttccccgtccttttggctcagattttccttgtttttgagttgagaaaattcatgtttatgcttaaactccaaatgcttccacattccttttgtcgacccatcggttcgtgccgttctttttccacatagcttacaaattgctccatcggtcaaatttttgttgaaaaacttccaaatctcagacattttctgttattgataaactaaataagaaaaatttgtcgttttcctaaataatagtaaaagacaaaattagcacaaaaaataagctaggtaaagcttaaatgcgaaatttaaaagtaaaaaatgtatgaaacataaagaaaacttggcgaaatgttcatcagttcaaatatttaaatcttttttccctttgactccaattttcttcactaatttttcactcagaccccattcttaccagtgcttgtttttcccggttcccggttgccctaccgggaccgggacctgagcttttcaaaacccgggaccgggaaccgggacctcggatgaccgggaattcccggcccggtcccggtcccgtggcactcta

SEQ ID NO: 17020 - DNA, 3397 bp, Heterodera glycines
  unsure (1)..(3397): unsure at all n locations
cgctcatcaacagttcgttagatgccaattgttctagcggagagccgtacaaatcggccacgagttcaagctgtcaaaggggatgttatgagttggtcgacagttaattggaaaaacacacgcatttctgttcaatttcattgatcgtcacctttatggctattttatgttcccaatttgtctttgccgtgctatcgtcggtgatcatccgactgcccgactgattggcgccataaatcgccactccgctgatcagaacgtcccgatcggcggtaaagcaaattttgttctcacggcgcgtgcatcgcttggaggagagggcggaaaagcgctgaaattggagaaacaatttgagatttattcatatttaattttaatgataaagcgaatttattggcaaatgtcttttcacctgcacaatatgttttgagcgcgaattggcacggaaaccgcgtgccgaaaaacgacattggggacgaggacggacctaaagggaaattcgaatgaaaaatgcctttttgaaaaagcatttggcaaataccgtaagatggagaaaaacttcggcaatctcttcgcatgtaagcagagaagaacttgcagcaagaccaaattcgttgacatccatcaaagagaaactgaacaaaaaataggaagagaatgcaaatccaatttaaaatttaaataaaaaataaaataaataaaaatcaccgaattaattgcatcgttgggcccaagcatttgcgcaatgctttcccatgttcctctcggtgccgcgtcgcgcacattcggcctctgccccatgcctaaatgtttaattacgcaatttttaaaattgaatttcgttgcctttgccgcgttgaaaatgatcagttccgaagatgggtcgagctgagaacgtccgagaacgttgatcagtgtgacgcggtcaaatgtccgccacgttggccgcgtccagggccaagtcggtgttctgatcaatcacttggtagcactgaaaagccaaatttggcttaatgtttgcaatgaaatgttaggcttacatgaattttttcagattttttcttaccctatagaaaaaaatacatgtcttcaaagttttgagtttataattttggaacggagcataattaaaattaatgaagcaattaacgaaaaagcgaaaattgaaaagaataatattaaaatatatgcatattttgtcatcattttgtccattttttcacttttgccactttgccctgcaacttcccgattttcacctgttccaccgaaagtgccctcgtcgaaaaggcgcgcctgtgccaacggtgagacggcgtttgtcgcggtcagtcgcgcggtgcaatagcgcacgcattccgtgacgagcgcatcgatggcgtattttttggctgcgtaaagcgtgttcatcacattgtcatcagtcaattggccacggacggacagcgaacgcacgtcgaagtcactgtacacaaagtcaatctgagaaaggcgaaaatgggggggggattatttaaaatgacaaaattattaatttaaaattaattaaaatgccttccattaccaaaatggcaaatgccttcggctcgcagtcgggtgcacagatcacttgcagcccctgcttggccaactcggccgccagctgctgactgtcgccgatcgcctgcaccgttttgtgtcccaatttggcatggccatggaaaccgttggaaaagtgccgtttcccatcaaaaggaaactgaggctgacgctgctgctggtgatgcgagtgaacggcggcggggggaggtggaggatggtgaggcgtagtgaacacttttgggggctctaaaaggcgcggaattggcaaaataataccgcatttaaaaacatatttaaatgtattaaatttaaattaatttggaaattaaatgcaaaatgtttttcacgacgataagcaatttctcattaaatatgttcaaaattggcttcaaatcttccggaattggtcctcgttcgcctatatctgagcggccattttccgtttttttcgatcataccgcgcagcagatggtcgccctccagcgacgaggccaacgaattggagcaggacccgtccccgctgatgttctcggcctcctcctccctctcctcgccctcttcgtactcgtcctcctcatattcctcctcgtaatattcttccccctcatccgtcggctgtcaaataaaattataaattatttaaaatattatgcttttttatttccttttttctaattttcttacctgtgctgccttttggtgtcccgctgctgttgttgtggtcgattcatgcacaatttgtggcacttcgtacgcaatttgcgggatggcagtgccaacgaaggaagagcccaaaggaccgtaaaacatggcgaagaaaacggcagaactggcacccaacaccaatttgtgcgcttttaattgctgaacaattgatagtttccattctcgtattttccaatattttcaagaaataaaataaataattaattttgtgtttttacctctttttcctctccaaccacaaacgcaacgtcacaaccgacgtctttcagacggaaggcattcagtcgactcgtcagtgacacttcggcatgagaattcccttcagtggaaattccttcggcgtcatcggcggatttaaaaaaggctgaaatttaaattatgaattttatcatttgtttaccagcaaatccatttaattcattgacaaaaacacaaaaaagaatacggtgttgatcagtcaatggcgatctgttgttggtccgacgtggcgaagtgggctcgtccaacgaaaactgttgaaaactgttaaatgtcgacggggccgaagaagaaaattgngcaccggtggttgacacattggcaccgatatgtgaagccgaggaggaggaaccttcattaattagccaatacattaattgggtttcgttttcaattttcaaatatttattgcccacccccatttgaggaggtgccgttctcttttggagcagcacgaagatccatgccaaagaataaaagctaaaataaaaataaaactgaaaactcatcctttttaatatttcacaaattcttaaattgatttttggggacaaaaaatgaacaagcgaagaggggaagggagcaaaagtgagtgggtgtgatgagaagccgaacttaagccgttaaccgatgacaaaaggcaaaagggggggggggacaatctcgagtgaattttgtgatggggtcacacaaaaagcaggttaaattttgtcaacagatttatttgataaataaaaaacaatttaaatagttaatccaaaaagaaaaaatttataataaaaaattaatcttaaaatcgcatcacttttattttaattttgggcattaaaga

SEQ ID NO: 17021 - DNA, 2128 bp, Heterodera glycines
ctttctctgttgccattttcactgtttcattttgtatcaattgcacttttcgatggctttctattattactcactttatatgtctatcatgtctcgtcatttactttttttttaaattaaaaaaaaacaaataaaagataaaaaaattagagtccggttatagaccaacaattccaacttatgaattaggtatatatggacgaaatggatcaaatgctgaaacaccatcaaaaactttcacctaattactataggttcaaattttctctaaaatacccgacaaggcgaaaaatcgtttagggttagagggtaactgatgtttcaaaaattcatataaaaggcagaaatgagggaaccgaccagtggtgacgtagtctttggatccgtgaaaaattttggaatttttaatgaaatcgataaaaaaaaggtcaaatttgaccctttccttgatctagccactccctttctcgtttttccttttcatctttctttttttcgaccccctccccgtctcgtgcgttcaaaacctgccgaccccttgcacagatatgttgcttgttaataaaattgagagcatttcaacattttattacggaaaaccaataaaggaaaacaacacatttaaataaacggcacttataaatatcggaatggtcgagaaattggaaattaatggacccgaggcaaagatcaatcacatggcgactttgtcataactgtaaataatacaaatatcaatcaaaataagtctcgaaacatacgaatgaattgagtgaacgcctccctccaattgtgcgctgtgcgttcgccgttccaatttgacggcaccgcaattgactccgttccttaattcagaaattaattagtccattaaaacaaaacaaaaaacacaccagagctcggcgatggatcgaactccgatgtcctgaagtccgtgctgaatgccgcggagaatgtaagggacgaatttgaaaacacttccgcggtcgcgttgggcagcagttacgccttgggccactttgatatttccatcttcgctaaatgaaaaaagcaataaatcatttgctgacagtgaaagagcagagaccaagtgaagtatctgtcctggctgcactcgttggcttccatcgcgtccaatgagcccatgccgcggtatttcttcagtcgaacgcccgacggaccccagaaatactcaccaggcgcctgcaaaaacagccaattagcccaatggaagtaaatgggggatgacctcattagtcccagccaaaagaccgcccatcataacagtggaagcacccaatgccaacgccttggtgatgtaactaacagtcaaatgggacattgtgtaacattaggtcaattgatttaaaatagtcgggcgcacccgacgtcgcgaatgccgccatcggcgatcaccggcacaccgaaggttttggcaaagcgcgcaacattatacacagcggagccctgagcacggccaactgcacaaaccttgaattgggcaattgcataatgagaagaagttaattgaaactcgcccacctcctgagtgatgcaaatgctcccactgcccatgccaacgcgcaatgcgtcggctccgttttcaatgagcaacttcgcctgtcgcatggtcaccacattgccggcaatcacttgtggccattcgggaaattcggatttgatccagcggagcaaatccacttggaatttgctggacccatttgaagaatcctggaaactggaacaatgcgagcagtcgaacctgctgacacttgggcatgcccttggtttgtttgctatttttagtccgttgtacgcgttcatcttcctctccctctttccccctcgccctcccccccaactcacaatgaccaatacgtccacctccgcctttacgagtgctttcaccgcttcccgcgccttttcccgcgtggtaattgccgcgccaaccatcagctgtttctttgcgtcgtatgaactgcgtgggaattcgcgtgcctttttcagatcagttcgcgcgatcagagaagtcaactcgtcacgttcattcacaatcggcaatttccctgtttacaaaaacaaaaaatgctaatttagagaaatggttggaccgaatgccatttttgat

SEQ ID NO: 17022 - DNA, 1723 bp, Heterodera glycines
  unsure (1)..(1723): unsure at all n locations
tgttaatgatggtcagattatgttcaattcaaagaatcgcctgggtcgttttgaagtgngcgtggattatgccaattccgccgtttcaactgaaagtgcctntnggattgcttttgtcatcccccaaaaaaacacttacggccattgcgattgccatttctaaaacaaatttggaagtgcaaaagtgaaaacaaaactaattaatcgaggccaaaccgctttcagtgactgtgtccatcggagaagaaacaagcggcgcactgagacggattttccttgtcaaatgcgtgcccaattcgacgtcagagactgggaagtcgatgtaaccgggcaaaatgtctaaagggatgaaaattcaaaaaaaaaatttttttccttttgttactgaagtcattgtacgtgagcccggtgccttggctgaacaattcgtgaattgtcaggccatcctcatcaaaatccagcccagtgtcagcacaacctttctttagactttttgggaccttttcaaattcgaccgatccgttgggattcgaagtgacatccataacggtgactttaaaataagagaagaggtggttaataaattacaaattaaatatgaattaattgacagaggaggaaggctctttttaatttcacaaaagcatcggacagattttctcttttaagctttagtcttataaggcgtcccataaaacgcccttagcaaccaattagttgtgattattgtctgttaaagaaggtcaccgatcaatggcaccaaaagaaattattactggaaaagagtattctcataaccaatggataggatcaatagattatgaagtataattaaactcaacagacaataattggcttttgttctttgatttgcacaacagtcataatttatcaaaatataaaaaatccttctcacaatcagacacaaagcaatcgatggattaggtgaaaagttcgtagtctcttctgataagaaattctcctcttaaagaaatggctgctgaactgattgtctgtcatctcaaaatcacgcgatcactttgacgatgtaaaacgcattattgccctgcctttttatcgagtattcctatgacggaaaatggtgctgctgctcttgctggtggtgttggatgggctgttcatgttggaagtgatgttgctgaagttgctcaaagttgccatcaaattgaagctgttgctgctggtaattgggcagactcatcggccgttgaagaaggttcatctgctgctgctgttggttttgctgcattagcaactgttgttgctggttgtgctgctgttggtcacccccaacggcctctcctcccccgaccatcatcgtgctgctgaacaacagcccagtgcccatcatactctcgctcatgcccatcatcatcctctgcggttgctgctgctgttggtgatgatgactgtgttgctgttgctgcacgtgcagtgagtggtgttcttcgacagtattctggacttgttgctgttcaatttgctggtaaatattgccaatggaatgactcggcggtggtccaggagtgctcaaagaactggagagagcatattgctattttgttaaaggcagatagaagttttgctcgcctcagttccgtgtccggcgttgccggtgcggtggtgcgtctgcgcttggtgtccgactacgccctccccaacaattggcccgcctctctgcactttctgtccagtggcactc

SEQ ID NO: 17023 - DNA, 1687 bp, Heterodera glycines
  unsure (1)..(1687): unsure at all n locations
gtgcgcagcgactccgcctcgcgctgggcagcatgttgtcgaaatcgcccatctaaaaaaatggaattaaaaaacatgttnntaaattattccatttcgaatggtttgccttagggtcgctccccgagccccacagtcaggagcgaaaagtcggcgatcggggatgaaattccccgcccaaattatgctggagaaattgaaaaaatttcgggaccataacaccttctcttcggggaatctataaaaggtcgtaggtaatggaaaatttttaaacaaaatgtctcataaactcttaaaaattggaaatggaatttaaattttaaattattattttaaattttattccattttattttcaaatgatttgtctcctcacttttgttgcttcttctgctgctgttgatggttgaactgcaactgttctgtccttctcccacttttccttcccttttaaatgttacgcggcggtgacacaaaaaaaattcggccgttggaaattcgccggagggcaaacaaacgcgcgaaaaatgaaaataaaaatttaattaattgcattttcatttttaagctttgacaaagggtacagcagtgctactcaaaaactttttaaaattcttacccaaaaaaagtgaaaaggaaaaaaacaaaaatggcgtaaatagttggccaaatgagccaaaattcgcaactccgctccaacggggccgagccgttttttgggagagttgcgcggagtaaggaaaaaatggaaatgttttaaaatagtggtaaataatatattttataattaatggtaacagcaaacagacatttgcccaaaaatctaaccaaaatggaggcgaaaatggcggtaattaattttaattaatgctaacaaacatttgcccaaaaataaattgctttaaaattaattatttgaatgcatgttaattttaatttgacttgcttttgctcgatgcatgcaaatttatcaatgtcatttcttccgtagtgcgacatttgcggataactatttctcgattgaattgtcaaaaaaagaaaaaaaataaaaataaattcaatactcccaaacttgaaattaatgaaggtaggctgacacttaatctttttttgcatacttttaaaattttcttgatgagagagatttcctagagcaagatatttttagcttataattcaactgtgaaaattggcaaaaagaaatttcgctatatttaatatacataaaagtcagttcaagaattttataccaaggaaaattttttcgtgtttcattcactttcacgctttgggttaaccgagagcttaattttcatccagcctttcaaacaattaaactaacaaacaaaaaataaaaataataattctatgtttttccaaaaattgtccgtaatttgctgttattgtataaaattattgatccaaattgacccaaaattaaaaacgttcaactacagactatttttattaatggaaactaaacttcttattaataaaataggttatttcgatgttgattgcataagttgatcagattactctttaagggtggtgttcaagtcgggaaataacaaataaaactaatttggtcactcaatttttgaaaaaaattattattttttgctttttgacagtttagcccagatttagtgatccgcaaaagtcggtccgcaaatgtcggctaacc

SEQ ID NO: 17024 - DNA, 1056 bp, Heterodera glycines
  unsure (1)..(1056): unsure at all n locations
tttgcaacgtgctgcttctgttgcaaattagaaattcgctaaaaccaagaaaacatntaagggaaattaaaattaattaaacaactaattaatcaatcaacagataattaattgattaattacagtgcggcgaattcgatcattttgctgaattttgaatggccctccaattcatataatgattgtctatctcttaaataataattatgataggcttcttccatgcgagtgtgaaaagaataatgatgaggttcatcggctttgagatcattaaatgctttttcgccaacaacgaaaaattcagcaaaaatgcccattgatcggaaaataaattaaatgttttaatacgcaataaaaatctaaaagaaaatttataatttaattagtcgaattttcggataaatatttgtctttttgaaattcattttcctttattagcataaaatttgtaaaaaaaatttatgtgttcttcttaaaagtttgcaagaatttttttgaaaatgaataatcaattttttaattttgcatttgtacatttttcatgcttttctattctaatattaaaaaaaaatgttaaataatgagagagacataaagcggtgattagagagggcgagagagaaaaacgaatcatttacccctacaaatttttgagttttaacagaaaacaaaaaaaaacttatcgattggttgccgaaattttgtggaaggcgcctgatgaaatgcagaaagaaaaacattgttttatatgcatatgttttacaccactttcactgttttgtttacattttctagaaaaaaaaccaaaggcttttttaatggaaggagcagaggaggaagaatgaagcgaaccaaaatttccaaaaaaaaaaaaaaattttatcagaattgaaagagacaaagcgaactgatggccaatcgttgagaattgactgggcaagtttgcgcaaacgatggaaagaaattgttgctccactatcatttcgtcactgtaaaaatttttaaaaaattattagagtgaaagaaaatgggagagtagggaggacttttatagga

SEQ ID NO: 17025 - DNA, 1815 bp, Heterodera glycines
  unsure (1)..(1815): unsure at all n locations
agggcgctggggcccatcatgaagtcaatggcaaaggcgctggggcccatcatgaagtcaaaggccaagggcgctggggcccatcatgaagtcaaaggccaagggcgctggggcccatcatgaagtcaaaggccaagggcgctggggcccatcatgaagtcaatggccaagggcgctggggcccatcgtgaagtcaatggccaagggcgctggggcccatcatgaagtcaaaggccaagggcgctggggcccattgtgaagtcaaaggccatgggcgctggggcccatcgtgaagtcaatggccaagggcgctggggcccatcatgaagtcaaaggccaagggcgctggggcccatcatgaagtcaaaggccaagggcgctggggcccatcgtgaagtcaatggccaagggcgctggggcccatcatgaagtcaatggccaagggcgctggggcccatcgtgaagtcaatggccaagggcgctggggcccatcatgaagtcaaaggccaagggcgctggggcccattgtgaagtcaaaggccatgggcgctggggcccatcgtgaagtcaatggccaagggcgctggggcccatcatgaagtcaaaggccaagggcgctggggcccattgtgaagtcaatggccaagggcgctggggcccatcatgaagtcaatggccaagggcgctggggcccatcatgaagtcaatggccaagggcgctggggcccatcgtgaagtcaatggccaagggcgctggggcccatcatgaagtcaatggccaagggcgctggggcccatcatgaagtcaaaggccaagggcgctggggcccatcatgaagtcaatggccaagggcgctggggcccatcatgaagtcaaaggccaagggcgctggggcccatcatgaagtcaaaggccatgggcgctggggcccatcgtgaagtcaaaggccaagggcgctgggtacccaacagaagtcagaaggcccagcagcaacagcaactccatgggaagtgccaaaaagtctgccgaggatgcagacaacacacaagcgctggtcattccgccgggaatgtcgcagctcagcgagctgcgactgtccgatggtcggacagtttcaacgaaatgagctaaagatgggagagggcacaaaaaagggcaacaaacgagcaaagagcaaaaggaaaaggaggtgcagcgaatgagtccgctgattaatgagcacgtgaaggggcaaaatggagcgatcaaaaccggcaacaacaccctttcgcgcaaatgtggaccgatggaacgcaaaaagaggagcccgatcagccaatgacaactcagcgagtgcatgtgaagaaccggccgcaacagcgatgctctgacaaagaaaaggaagaaaaaacccccatacgatcaccccatttcttattaattaattgtagcccaaccaatttggatcgtatttaagccccgtaaattgtacatttcatgggctccgatcgtacaccgaataaagagaaaaacccagcaattgggtattcggtagcccctccccctctnccttcctctcctacccccaccccgaaccatggacgacgaactgtcccgttgcggcttgtgggccgagccgcaacaagtggcgaccctggcagggacaaactttggtggggtttttggagatttggtagggaagggggagtagggccccacgggttttttgtaacccgtggcgccttgcgcgtccggcccctcgggttttttttaacccgaggcgcctccctttccgcgctttccggccccttggattttttgtaacccaaggcgcc

SEQ ID NO: 17026 - DNA, 3245 bp, Heterodera glycines
  unsure (1)..(3245): unsure at all n locations
ttgaaataaataaacttttaaacttaaatgtcattacatacatttttttctcctcctttccatatgattttaaaaaatcgataaattccagacagtttatcgtaacgtgagagtcattagtgcgtgtgacacttttattataattaccaccaaaatttaaagcttttttggttgctttttattttgtgcgaaaaattgagacatttaaatgagtcagcgaattgctacttgctaatttgaaaatgtgttcattttaattcaaaaaattttagtcaaattaaattaaatttctttatctggaaagatttttgatttaattttttaaataattaaaaaacattttcaatttttgtccatcactgcacatgcataattcatatcaaaattattattttttttaatgaatctgtctgtagctttttttaattataagcttttcaagaaaaacctaattttgtacaaaataattattgcaattactcaaattatgaaccgtgaaaatgatgaattaaatcaaaagtatatcaagcccatcattaaatttatcgcccattaccatgccattgactttaactagcggaaacggcacagaaaaaaaagtaattaaaaaatataaaacacctgctgtgaagattactttaacgcttatctcgttaatgttaattgtattaatttaaaattcaatttaagctcacggaaattgcagcaattatttggtgtaaaagaaaatcatttaatttttttatcgctttattaaattccgaaaatcgaaaatgaatgggcaacaaattgaaggactcaatgaaaattattcctattatcaggtaaagtttaattggttcttcaattacgttagccaatgctttttcagctgtgggtccaatacaaagactctggccattccccaatgctcatcttcacggcatcgctgctcaatgctatcgtcgtccccggcattttgatgaacattggcatccttttgatcaccttcaaatacaggcaaaagcttactcaaaaaggctctaagccttggcataatgtttccgattacttttccccgcttattgtccctaaattacgcttaatttgatttcgtttaattatctgttccaatgtttgcattttcgcttttctgttcttgagcttggctttccctttcgcagctctcttcgtggcacttcgagctttctgttggcattgactgccctttttgagactgtccaccaatttggccatttatttttcctctgcgtttccctctccggccgcaatttcgtcccctatttcactgcgttcaaattccttgtcgttccgttggtcggctgcagtgcgagtttggcattaatcgcactgaccgggctggacagactcatccaattggcatttgaaaaatggtgccgaattgcaacattaataaattgattaaattaattaagaattggcattaaatataaaatgcaatttcaaaattaaggcatgcaaaagtgaatcgcactgtttacctcggcacttttgtgcttgtttcgctgtttttcggcactttgatgggcctcaaatacgcccaaattgccttttgccaccccaaatggccccagacaggcacaattagcgatattttcctgttcgagtttaagcccatcttcttctctttcatgctgatggccaattttatcgcaattgttttttatgtgttcatttgggtggtggtcaaatggaagaaatgcaagtttttttaaattcgaaatttgctttaattggcaattccaaattttggcatttttaatttcagtcggcagccaattgcccaccaatgccatcaaatcaaagaccaacaccaacgcgcgtttgttcaagtcactggtggtgatcatttcgatcagcatcggctgctatctgatcagtgccgtcgtccgactgttcgttttgccgccctggcacttggaccaagtcaaagtgtggtttgtggagctgtactttggcattctgttgaatgtcggcgttgcgctgaatgcgccggtgcttttcatttgcaggtggcaaaatttttcaatttttaaatatttttcgattttaaattttaacgaataattaccaatttagcaaggattaccgcaaatgctttgtgcgtgaatttgcacttctcagaagcaaattggcaaaattgcacaaaacatttctaaaaggtgcttaaattcaatcgcttcctaacattatttaatttataatgaataaaatttatattttttgattttgaatttgaatttagccgcttttttaatggtggcaaacgaaaggaaattccgttcaaaaaccgttggaagcgcacaagttgaagccggcccacaaatgaaaacgaaaaattgtggtgataagtagggcttgtaattatatgcacataaaatcttaaaatatacgcatgaaatatgcaccaaaaattgcaaaatatgcacataaaaaatgaaaaatatgcatataaatttttccaaatttaaatttcggtcattagaggtccaaatggctgctttaaaatatgcacataaatcgcgaaatttgcagaaatatgcaaaatatgcatatggaagggtgccgcgtcgttgcgcgaaacccgcaaaaatggatatttcgcgaaaaccgcaaaaatttataattaatttatttaattgttattaacagggattcttttttatgtaaatacatatttttttcctggattctccatagcctaattagtaggaaaaaaactttcttttttgtgtttgcgaacaaaagttgggacttttatttacatatttttatacatattttggactttttcgtacatatttcgcaatttttcgtacatatttttcataatttgaggaaaaagcatggatggcggtttttatgcaccaacatctttgaagaaacagaatttgctctttccgatatgattgaaactattggaattttttattaaaaaatttatgacgattgttcaaaattcatagattttttagtacccaagaggtcaaactcgcaaaaaatttactaagaagaaattctttggcgtgccataaagccgcagtccaaatggtaggtcgttaatcctagagaatcactaaaatatgtatttcactcttaacataaataaatnntgatgtaatctttnattataatcctataagtgatgncccacccatttgnaattattanctttatctttaaatgttataataagttatgttaagtattaaatagatttggat

SEQ ID NO: 17027 - DNA, 1221 bp, Heterodera glycines
  unsure (1)..(1221): unsure at all n locations
attctgagcaaattgagaggccgccgcaagtttcggcgccgcaaatgtcggccaattatcccccccccccctttttgccgatgcccaccctctctcagcatctctttgaacgtgccgttcccatcgatcagtgattttaaagtatcaaagtgccattgcccaaattgttcttgcatctctctgtccccttcgtctatttctttacacttcttttcctctttgcttttttccatctttttttcttttccctctctcttttttccttgctgttcctccccctctttatctcccagtatcagcgtcaatctctccagccattccctcccttttcgttcgcccattttccgcccattggccaatttctccaaaaatattttggtttcgacacaaaataggcgaaattttatttgcaattccaatgtctcgtggccaaactcaaagtcaaatgtttggtcatatgcaatttccgttaaaagtaaaatttctttttggtacgcccctaaaaggcgcttttcacccgccgaagcatgggacaacaggaaaaggttcttgaaagtgatgtccaaccatctcgcgaatacgaaaatgtccgtccttaaaaggccttcccattggagggtttggcacgcgccgaaaagcacgtcagaataatacgaatagagcaagttgtcatcatggaacactgaacaaaagcaacagtcaaagaacgccaattgatcaatcaatagacaatgaatgaatgatatggccaatcaatagacactgatcaggcacattgattgagaattctttacactataagaagatcagagaaggaagcgctcactggtctgttccttctgatcgctaattggtcaatcaatcgaaagtcgactgatcaggcccttatacaagcaatccaatcgttcactgacctgccgggcgaagaagtcgtcccgtgtccagcaactgtctgaacatgtcgtggtccccgtccaaatgcttccacagcttcgccttcgcccctgactcatctctgatgaatttgacaaaccaatcgctcttctccaccgtattttttatcagtacgaaattgaccttcttctgctcgcttcgcatctgtccgattgcttctctaattgccgtcccttcgctttcgtcgcattcctttgaccaccatttggcaatttccgtctcgcttntctttctgancgcattttcccgcaggaaattgcgcaaatg

SEQ ID NO: 17028 - DNA, 2136 bp, Heterodera glycines
tggcgcccaaattgtccgttcggtgttcaacgaatcggggaaagcgaacagttcgcgggcactttcttcattataccaaacgggcgacgaaatttccaatcggcgcaaattgagcaaaaatgggccattggaaaggacggacggagaagtgacggaggaaagcaaatcgaagtaagcggaggacaaagcgaaggcatcggcatctgttggatggagaagggcattgaaaaagggacaaaagtgccaaaaagaaagacgaactcaagtcaaaaaagaggggacaaatgaatgaatttgttatgagaaacaaaaacagctcaaaaaaggaaaaaaatgaattaaaaatcagtctatttacagatagaccaaagaaaagttggacattttgcccatgataaaagtgacgctttttggccattttttggtcatttgtccaattcgccgttttcattgccttttttagcttctgctaagtcctcctcagtctgttgttgttgttcaattggactgttcacttcggcggggcattccaaataatttttggtttcgctcggtttttgtccataattttctttttgttttgaattcaaaatttttatttctccgccagtgcaaataattcctatgcattgttctccagtttgttttttgtccctttaaaatatttttaaaattttaatgaattgattaatttcacatttccgccgcaactccgcgcaccgttttcacgaatttgtcgtaaatttccgtcgttttttcaaattgtttttgtaattgctctgctgatgccattaattattcccctccccctcccttttttggcattttacccgattgctccccaatttgctttatcagtttccatccgtccgattgtgcttcttcccctccgtctttttctgctgattcgttttccttccgtttgcctttttcccttccgttcactgaatttgccaattgaattaattattattaaattattttaaatgcatcattagtaattaattccttttgccttttattccttcacttttgcttctgctactctctgcgtccttttcctttgtttcttcaaatttattcactgtaaatcgcataaattcttcgatcagtttgaaatcgccctcgaataaattctcaatttttttgaacagtttggccgaattaactctttaataaattgcctgtgaatttgggccatttgcccattaaactcactttccttccctaaattttcgcataatttttagaaactgttcataattttgcatctcatttgcgaatttgcttttgaccttttctaagataaaaaagcactaatttttgaatgtgactaaaagtgtgttttttttaccaaggaacagcaaagcgtcattctgaaattttaattggaatttaaatgccaatgccaatgccaatcatcccccccccgcccaatttacaatgtcaatttctcgcttttccttttccgccaattttcgcttctcttttctttttcccatcgtttctttttcgctctcctctttttgccactgttcttcatttttattaaatccttttttttaagtgcgaattgactaattgcaatgttttctcttttttaaaaatttattaccattgaaaatgttccaaaattcgtcctcaaatattcccaaatttccctcggcgaattcgaacattttgcgcagtctctgccggacacgcgcccttcgtttgaactccgtgcggagttttgcgtcttccaccagcgaatccgtcaaaagtgccgcgtaattttccaccaaaattcgctgtctttgggtccctttttctgtgttctttttgccaatgtttttctccaaaacttccaaaaagtcgtgcattggcttcagcgaatttcgctccaatttcttttggctattttcaaaatccggcaattttttcaaatgaatcccaaatattttccacagattgtccattttttcttttaaattttcgtcctttatatgatccacaaaatacgaccaaattttcccatataaaagcgaaagttcaaaccaaagttcgcaaaacaaaaaattttgggagtccaaagaatagccgaaaagaccacttaaaagggaattcagtgaaaagttgctgatcacatctgatcga

SEQ ID NO: 17029 - DNA, 1470 bp, Heterodera glycines
tttatgacacacatactttaatgaattcttgtccaaatagaaatttgtagaaaaacatatatttaaaatgtaataatttctcacatctcattatctttttttctgtgtgatttgttagaaaatcaatacaaattgacgctgtttcgtcgaaccttttgcactgctctcatttgtcagcacaccatttggcttggcattgattgccccatccaaattggtcgttcatctactatttttcttctcatttcaatttaagaaagcttaaaaacatagctcccacatctgaggctttagccccatttgtggttttttgataggtcgatgaggctaaattatcgaaatgaggcttttaggctttttatggttttctgagaaattttgaggtttttgcggaaaatcgccagataaattgaacattcatataacatacgaacatttaaacgtgttttgaaaaaaaatgtaaaaatgaggcttttgaaaattttaatcatggagctctgcttaaaaataaatattggtaacccccccccccctcctctcctcaaataaaaatatcatgatccgaaaaaggaaaggactataaaaaaaaatcaagaaatatttctataattctaaaatccagaaaaaaccctgaccagaggtgttattttacctggaaaaccgggcatttgcccggttttgggggtctgtgcccggtttttgcctgctttttgaatttgcccggtttttggggttttgcccgggttttccaattttcttgatttcctttcattttttctagtttttatttttgctttttatgcaaagtcaattatcaaaacattatttagaaaaaaagttatttttaattttactattcattttgatacataagatacttaataaatatattatacaaaaatatctaaggattcgaacctgtgacttaaaaaagatttgacaaacgcactaccgctacaccaatagcttagtaagaaaataaaaataattatatcttttctaattataaaatgccaaaactttggcacgccatatctcggcattacaatagaaactagaggtgatatacccacccaccaagtttcatttggaaattccacggtcacttgccgcccatcctttgtgagggcctcagagcagcccgacaatagcgagcaaaaaattatatatattatcaaattatgatttattgttgctggttttagaaaattatcgtgtaaacaaacaaaaatgttttttattaaattaagatgtaaaaacataacaataaattcgaagatgcttaaaatattgatcgcttcatcaaaaattaacaagaacttaagaaaatagaatgaaaacaaatttttttttgtaaaaactataaattaatggccatataaaatggaaaatgccaggacgtatgtaatggacagaattgacactttaaaaaatagagtgataaagaacgaagatggcaaaaaaaatata

SEQ ID NO: 17030 - DNA, 1099 bp, Heterodera glycines
gggggggggcctagatacgcccttgcttacgagattacccaataataccgtctaggtcacaagtggcgtttcggagttggatcggcggcatttctttttttcgacctcattcatcaactccaggaattccttctcgagaacttcatccgccgtaatggcgttgattgaacgggaaatctcttgttgttgttcggtaagttccgctttcccatcaagaatgctttcaccgctttgtatttctcgaggctatcggccgttgcaaccacaatgctggcttttgataatttttcctggttaaaataagaaaatatatttatagacaaaattacaagtttttatcccgtctgttttagaaaaattttccagtttccaacctttcgtaattctcgaaattttcatttcccttcttcgcctaaaatctcagaattcaatttttttttaacctaaaatttcaaatctgtcttcattcttcaaaatttttaaaatttccttttcccattgaggggcaaatcgcggcagaggacgaacggagggtcgaatttcgacaatgtttgggggggggggggttggaaaaaaccgggcacccacaattataatcaaaaaatcggtgacttttttggtgggccaaatcatccaaaatcagttcctttggcacccacaactaactttgaaagagtccttttgaatgttctgctgtggatcgatgttcgtctgctgcggattgatcttcgtctgctgcggattgatcttcgtctgctgcggaatgatgttcgattgaatggtcgtctgacaaagagggcccgattgctgttcaatcccaaatgccacagacaactgacagtgttcagaatcatacgaatcgtctatgcaacctccagtaaaagtacggtttgttctacaggtgcgttaattaattggattaataattgtttcccatgggaggttatgtacctcgaactaggaaaaaaggtcgtgaaaaagccatttcggcaaatttctccgaacttttcgacgtcctttttgttgtgccgcagttcatctacttctttttcgagtctcaatatttttgcctgattttcctcattttctacagcacttt

SEQ ID NO: 17031 - DNA, 3458 bp, Heterodera glycines
  unsure (1)..(3458): unsure at all n locations
ctgactgagntttctttctcgagaatgccagtcttggcgataccatttctcgacggtcggtcaactgnatagggagattttctcaagttcaatcacgatgggccatatgccacatgaaaagttttcaatgctacaatgatggcacaatgcaaatttggacagttttctcaatcacatcaatgacggcataatgccaatttgaatttttttttctccaaatcccatcaatgatggcataatgccaatttagacagtttgctcatttttttggcattcccttctctttattggaaatctcgagactgagtttccttttctcgactcggtgacacatcatccccatgctttgttcagcatcaaccatcctcctacaacaagtacgcgctgtactggttgggccaatggcaaaacacgtacacagcactgtcaccgttggccgttctgtttctgactctggagcgctgtttcatcatcaaattggccacaacgccggcaacacgggaaaaagttgagcgacggctgttctgggccggcattggcacattgttagccgctttcatgctcagcacattgtttttcatggacgaactgccgttgaacatcacggagtgtaggattttgaggaatagtttttttttaaatttttgattcaaatttactattttttttgcaatttcctttggtcgattttcgaaatttctcgggctttcggttttggtttagggcaaagctgaacaagtcaatttgttatatagtatgtagtatctgtgattaggtccaaattaaaattggatccaggattcaaggacgccttccctgaaggcacaaaatctgttgttcacccaaaaactcaaggatttccctgaatgcgtaaaacctattcaccctaaaacaaggaattcactagtggcatgaaatccgttcacctaaattcaaggactttggcaaaaaaacctatccacccaaaactcaagcactttccgggatgaaacctggtcaccctaagggaaaaataaaaatttccaaaaaaaacaacaattttttattttgcacaaaaatagggtttaataaaaatgtcaaaatggcgcagtgatcaaatttaaaaaaaatagactaataaatatcggctcagtttcagtaaatgtgatcggttgccagtcagtgtcttgtgtgatccgcaaatggggcaacatgccacaactgggcatcaaaggaactgccggcattttgaacattttctgttgcatttatttcctttacagtttgcacaaattgcagacaagccgtgccatgatgaaaatggtaggccaaataggatcttagcaaagaagtcaacattttttgttaccatggactggtacagtaggccagggatgttgcgagaacaaaattctattaagagaaacgagaaaagcgagacaaaaatgcgagaaaagcgagaccaaaagtcaaataaaacattgactttgtgaagggatgatgagattggagatgggagaattgggtgtgatcagttgggttgacccaaattgccaaaaacctcccctgcgttcattagtgcgcacttatgtatcagaggagtactcaataaaaaaagaatgaaaaatcacataaaactaattaatgaaaatcgtgagaattttgcgtataaataataggaaaatttcaattttctaatttttttttagaaaaaccatctcgtcattgtgacaatatgcttcgcaatatgccttgactttttccccgcatttctcagcatcggcttaactattgtaagccaatttcggtcaaattagaattaaaaaatgaattaaattcaatttaaaagttctatatattattaaaaatgcaaaatggactttcgaaatgaaaaattaaatttttttcgaagaaattgatttttttttaaattagctaattttctttaacaaatttgactctaaattttccagatccaagttttcttattttttttttgccaaaatgtgtctcaatatattcaaaatttggtgaaaatggctaaaatttccgttttttcccaaggagccaaaaatttaaaaaaaaaaacactggcaaaaattttttggccggaagagcaaaaaaaaaaaagtgtccctcccgattttttttggcctgttgcaaaattacttatttagttcggctctggcttgctctcaaacgtggcatccaccagcactgtgttggactcgctgtgctgtgccatttatttttcgctagtgtttgtgccacccagctggctgaaacggggtggtgccaataatgccaatgccattggtggcacaacaaatattcaacagcaacgacaacactcgcaactgcaaccgcaacaacgcactaatcgaattgcttcaactgttagcatgatgagtccaattattgtgccagcattgaatcgccatccgccgattagccggtacagtgacggaatggtacaaattggtacggtatcggcaacagttcgtcatggaacatagggggaggggctacgtggtgaacacagaaaacaacagcaattggcacgtttgatcaaaacatacttttctatgattgatcatttcactgttcagaattttcccaattttggattcatgaattctcgttgaaatgaatggatttaattttatgaattttaaatatttttcaatttttccccaattaatttgtactgtatcttatagaaactgttaaaaataaggtaatttaatacaagaaacattttttttttgtattttaattataatctgtcttattataaaagctcttctgaaaaagctttattttttattgagcaattttttttttgaattttggaaattttttattttaaaaacatcaaaaatatttcaaatttattttcttaaattttatttttctattattatgttataaatttattttgattgatcacttttgttgtttgctgaactgaattcgctttaaaagccatcccctcagggtgatgaaaaacaatgattggaaatgataagcaatgccgatcattaaagcagctaatagtccaatgccggagcccaggaaaacgatggcaacagctgcttccaacacattggcagcgtcgggatgaaaatctaaaattaaaattaattaaaatataaataaatttattaaataatttaaaaaaatatactaatttaatgactataaaaaccattcttttacatttgaatttttttaaataaaattataaataataatatttttcaacattcatttattttattaataagttataaaaatagaaaaaaaaatcaaaattaattaaaaaataatttaaaaaataaaggtggcaataaaaaaagtaaaatattgataattttatatgtgaaaaatattacctccaattccaattgttgccatggaagtaaggcttaatgatttttttaaaaaaacttacattcaaattttacttttttaccaaa

SEQ ID NO: 17032 - DNA, 1787 bp, Heterodera glycines
aggtcatcgttggcattggcacaatatttttttgcctttttttatcgttttgccattcgagcactcatttatttttttgaatgggctcaattttaataattttgctgcaacttacagtcggacgacgacaacatcggcaacagaagcggagggagagacagacaaactcacataaatttggccataaaatatgaacaaaaagccatcaaaaaatatcggcaacaattggaagaaaatgaacgaaatgatgcggctttatgacaaatatttttttatttcttgccaaatgacatgaagcataattaaaaaataaaaaggaaaaggaaaattgaaatagaaacgtgtgaaaaaaaaataataagaaaatatttttaaaggaaataatttttgaaaatacccaagtaaagtttggtcggaattatttagctttcaaaattaaaaattgacaaggtacaaaaatggatattgccaaaactaaaataaattctgccacaatgcttaaacgatgctcagttctaaaaaaagagttgaaatttggaataaaaatttaaaaaaaaattaaattttatattttactttaaaattttaattcaccttaattttttattaaaaatgtaaatataacaaaatattattaaacatttttttcgccttttatcgaaaaattcagcaacaaaaaaataaaaccatttaaggccttttttggactttttcgcgcttaaaaatcctcaccctactaatcagtgatcatttaaattttttattttacgaatttattttaatttttttctgtctttctgtctctatctctgtgtcactcctaaagtggtgcagtctctctcctcctcccccgtttctcgtccacctgtgtgtgcctaaaagggcacatttgaatgttgtttccctggggggggtggggggggggctaaatcgattgtccccggtcgccggaggatgttctgcgcgttgtttggcgaagcgagaggaattgtgcacattttcattttcaatcccattgagctgcgcagtttccgcgtcggtcgcactgtttgggtcgctggagggggcggcggacggctcaaggacaaacggcgtggacggtggcattccctccggcgaaacaacaaaactcccctctcacctccacttctaattccttcctaattcctccgtccacgctccttcttccccttcttttctcctttcctccctttcttcctttttccctttcctctcctttcctttctattcacttcatttagttttcatttctctttttatttcttcttcctcttccttattatcattctttttccttttctcctctccctcctcctttttttctcttcacccctcattttctttttgtctctatgttcttctattttccaaatttcttttttcatttttcattcgtcactttctttttttttctccccccccccctcccttttcccccttttctctctatttttcctttttctcttccctttttctgccatttttctcattttgtatcgccctaatgcgctgctgcgattgatgttgttgacctttctgcgcatcatcatcatcaccatcacacatcgttatctgctcatattttcgtgtaaatccatccaaatctcagacggaaatgtgcgcaataatttatgattgattgcccaaggcaaataaatgcaaatgctaatcccccaatgccgagtcttcgtaattaatttcttgttttccaatctcggctattgatagagccttgacctagttgggttgtgtcacattttgctact

SEQ ID NO: 17033 - DNA, 1274 bp, Heterodera glycines
  unsure (1)..(1274): unsure at all n locations
cacccaatgcatattatttattggctcctcagtttcttccnccataccaatgccattgctttgtgccattttttcccgcgcattgtttcattcataattaattccacccacactgtcacaattcatccttggcggtttcaatatgtgtcaaaaaaatgccaaaaaaagatttcccacgtgtttcccccattttatattatttaagagcaaaacaattctcgagtctcggaaaataacgatatatctatttaaatggtcaaattgccaagtaaattctctcccccgctttttattgcccctctctccctctccctctctctctcccttcgtttcggtaccgtaatgatacagtagtctcgtttttcttcaaattttttaaaagcaaccccaatccctcgttgagttgtccaatcacacggtttgaaaacggtggtattagtccattcacttcgattgtatgcatttcacctccgccgacccctcctcgtcctctgcttacaattcgcagcagcgctttccgccggtcggcggccaattccatggccatcagccccagtcgcagcacttccggcatcaatcgcaacagaatggcgcgggggacagcggggcgggccgaagctgtcctcagctgacactcattctgatcacggtgaagagcagcattagcccgcaaacgttaattggcttaaataatacaccattcaatatactcgagactctcggctttgaaaccaaaatccgccagtttatgtaaattcggcgaaatattaatggataaattcaaaattaaatttaaaatttaacaagttgagttcatcaattttttgtttctcagttgttcatgttgttgactgcaattattctggccgtgattgctgtgatgaacccatcttggcaaactgtggacattcgcgagtttcaggcggaacaccatgtgagaatggaataaaatattattgttttttacaactttcattttcaaaaaagaggtaaaataaattaatttggaattttaaacaaatattttttttcgtaaattaaaacacaaatcaaatattataaatgttttctttcaaagtgtaatgatgcattttttgtttttaaaataaattattattttactgcttcaaaattattttcgagttttttttcattgtctttatattttttagaactgttgctgtgctatgcagtaaaactctgttcattatagctttattgtaacacacagtaacacatacttagtacagtaacaaaaattactcacctcagca

SEQ ID NO: 17034 - DNA, 2211 bp, Heterodera glycines
atcagccacattgatccccaaaatggtccgcagaaatcgatgtgtattcgttgccacggtctttccggtgattcccacggatgcaatggcactttccgctcatccggcgcctcttcttggcaaattttgcatcttttccggatcatttcgatttccttgtcaatgcctggccaccacaccttctgacgtgccagggccttcattcggaccatccctgggtgggtcgcgtgcaaaatttccaacatttttgtgcgaaattttgacggaataattgtccgatttccaaacatgatgcacccttccattaaggcgagctcatttcggatgacatgaaaactttttagtccttcttcgacttttgtggccatcctttttcgataaattctttcacttttcgaagaatttcatcctttttgacttcttttgcgatggcactgactgtgaccggcaggcatgaaatattttcggcctgaacttgctgaacttccagtccaacacagtcgatggttgtctcttccggacacggcaatcgcgacagaccgtctgcattgccaaattcttttgtagagcagtacacaacttcaaaatcgaagttcatcaatgtcagtgaccatcgatgaagtcgttttgccgcaacaatcgggagctctccttttggcccaaaaatcttttttagtggctcgtggtcagtttgaagtacgaactttcgaccgtacaagtactgcttgaatttgtcgactccgaaaatgattgccctcgcttctttttcaatttgcgagtaattgcgctccgaagaatttagcgttcgggaggaatacgcaatcacaccaacttttcctttttcatctttgtgaaaaatgaccgctccaactccatagtcggacgcgtcagcggccagaaaaagtggtttttgcgggtcataatggaccaaaacttcggttgatgtcaaaacctttttgatcccatcgaatgccttttgttggctctttgtccatgtccatttggcgtcatttcgccttaattcattgagtggttctgaaagcgttgccagggatggcacaaattttccataatagttcaccattcccagaaatgactgcaattctttcagatttttcggctccggcattttcaaaattgtctcgattttgccaggtgacgcatgcagaccttttttgtccacaatgtgtcccaaatattcgatttccggtttgaggaattcacatttttcacgcttgactcgaagtccgttctcagacaaccgtttaagaacctggtcgattcttttgacatgttgctgatcagtgctgctgtgatcagaatatcatccagataaactgccacgccatcaatgcccagcagaacttcttccattacttgctgaaaaattgcgggtgccgaagcaactccgaatggcaaccgagcgaagtggaaaagtcctttgtgcgtgcaaattgtgagacaactctttgccttttcatcaagcaaaagttgtaaatatgcgtccttcaaatcgatttttgaaaatttttcgccaccattcaagatgctgaacagctcctcggggcgtggaagagggtattgatgcacatccaaccaaggatttaccgtgactttgcagtcaaagcacagccgcagcttgccatttgcctttggcacaatgaccagcggagtggcccattcactggttgccactggctcgatgattttctccgactgccattggtccaaaaccttttcaacttcattgcgaagagaaaatggcactggtctcggcttgcatcgcttcggttggcatccctccttgaatttcagcgacgccatctttttgcatcgtccgactccgtcctggaaaacctccggatattgggccaaacatgcgtccaattcctttttgttttccacggcacgaattgccggaattccgaaggctcggttcaaatcaatttccagttccatgatcaaattgcggccacacaaatttttgtgcttaccacttatgacatgaatattggactcaatcgttctgccttcgtgcgtcactttcacctttgcctttcccaaaatgccaccgatggcttttccgccataggctaccaatccttgggatggttccaattttgggcttccgatgcatttccaatcaatctcgtcaatcactgtgacatcggcaccgctgtcaagctcaaaatcgacctttcattgtgaatg

SEQ ID NO: 17035 - DNA, 2348 bp, Heterodera glycines
cccccctccccgcgactcaccccttttgtgcccccccaattgtgccatttttccctttgcatttcccctcgcattttgtccccattgtcacaatttccccccattgtatttctcacacatttcttatgtatgggtttaattacccaagtttgagccataaacttgtggaatattttggtgcaaattcttgggcggcaaatttgggcaattggcggcagcgaaaaacggacaaatcggcgcagacccctcccccatctgcgtcaagtggcgaccctgggcacttcaacggaccgtgcgtggacaaaaagcggccgaacagacattgcgcacaggagcatttgggattagtgagtaaattggggggaagaggaaattttgagatttgggcagcgcaaaaaagggaaaaacaggggacggtaggaattgaacccggaaggttgcccttcggattttctgtaatccgtagcgcttcctttggtcccagagctgagtcccgcgaattttttgtaattcgtggcacttcccttgccaatcagcgcagccccacggattttttgtaatccgaggcgcttccctggtcccatagttcggcctcacgaattttttgtaattcgtgtcgcttgccttccccagggtttggccccacggattttttgtaatccgaggcgcttccccggtcccatagttcggccgcacgaattttttgtaattcgtgtcgcttgccttccccagggtttggcccctcggattttttgtaatccgaggcgtctttttccttgctcagttggcccctcgggtttttcgtaacccgaggcgtgttcctttctccagtgaccaacccctcgggttttttgtaacccaaggcgtcccccattgtgagcaggtcgctcctagggttttttgtgacccaaggcgcctcccgcttacacggtcggacccatcgagtttttcgtaactcgtagcgtccttcctcatacattgtaagactcttggtgggtctgaagtcaaactcactttgtccactgtttgttcaacttactgctattttgtgaccccgaaccccacacaatttgttcggaagtcgggtagcagaacccaaaagtgagcaaaaatgtcgggatttttgcgtacaaaaatcgcaatagagctaaaggctcttgagaaggcgaaaacggcaacagaattgtatgctgagccggaccaaactctgacctcattggaaaatgcaattctcctggaaagcgcggcagagagaataaagtcagaggtggaggcagtgaatgccaaaattgagcaaatttggataaccgcaagcaaatggcatgacgtcatacaaaaaatggacaaggacgaaagaaaaagtgagcagacagcgtatgaacaatttcaaacaacggagaaactgaacacaaaaatggaagcagccaacacaaagctaacagagcttaaggacctggagatgaaggtggaagcaggagcaaagctgcaacgctccaaagcggacagagacgcgcgagtggagcaaagagaacatgcaaaagcaatggcgaagtcaaatgcagaagcagacaaagggaataaccgtgcgagaggcaatgaaatgactgccgcattgtaccaattgccaacactaagaattaagccgtttgggggagacaaacgggaatggcccatgtttgaagaagcatttaaagtggctgtggaccaaaagccaggaagcaaaacggagaagctaaatttgctgaaatcgctggttgagcgagaggccgcattgctcatcggaggcctacgcctggaagagaaaaattacgaaattgccatgaagctgttaaaggacacctatggagacaaaggcgaatatgtaaggaggttgcacacggagttgtcgaacctcaagcgatgcttttcggtggaagacacaaagcatttttgcatggaattggaacgcctagcaagagaattggaagcagcggaagaagacattgaagggccgccaatttatttaatgcttgagaagaagctatacaagcctttcctgcgtgaaattctggaagagaaagcaaaaaatccagacttttgggacacgtcatccctccgaaaggccttaggaagtgcattgagcaaagagctagcaatcaaagaagtcatgagggagtatggcttcgaaggcaaagaggcaaatccagagcatggattcaaacggcaattaaggcggaacagattcggaggctcagtcaatgtagccacaacacatttcgggaaacccaatggagagcgaagaaaaatcccggaacaaaaaatgccaagtccgaggcaaggccaacgaagtttcagcagactccacaaaa

SEQ ID NO: 17036 - DNA, 3027 bp, Heterodera glycines
ttgtgatactgtagttggtttagacgcggacaatggagtcggaggctctaacactgggtgagttggtccactgctgatttttggttcttcctgctttgtagtcacatttattgatttatttgaaattggcagtggaggaataaatttttgcttaacactctgaccaggtacattcgacactggtaatggagacgaatgttttgaaactaaaggtattgacactatggcactctttacttcgtccttacttttagttgcgttaaatggtgaacttgaaactgacggtgtaggaacaagattttgtgaatctctctgattaggtaaatttttattcgcgtttgtaggttgtgaaatattctgtgttgtatttgtttcttcggtttttggctttactacttcgggttgtttttcaatttttggttgcttttctgccggtggctttgtctcatttgttaaagactgttcgatttcttcagtactttgctgtgatttttgtccagctcgtggtggagatgttggtactttaaggttaaacgtgacattagaagcggaacttggaggtgacgttggcactctcgcacttggaggcgactgtggctgagatgctgccctctttcttcgtgaaccatccttaatgagggcttcaagagaatcggcatgattctttagggctgctttaagataatccctcaaatgttcaattgttgtgtttgaagcttttgggactggaattctgacaactcttaaattctcattgtccaatccatccgtaaaatgaatgttaatccattgttcatctagtgtcccaatagtggatggccacgaataagcataatttatgctgtgtagtccgcaaacccaagagccattgaaataaattggtttcgggaggcggactcgaaatttatttggggcattatcagcatagtctgggctattacttggtaaatggacaaagaatgtgttagacattttattcaaaatataatgattcggtgctatttttacaagtatttatacaagttgtgtctcatgaatccattctctttcgggataaccgataaatttaactaatacttccatcgttccatcagcccgcttccgctttcgaaaaactcgctcaattctgtatgccgtctcagcttccttacgtacgggagtcaattcttcagggtaaaagaatcctttaaacttttctccttttgcatcacgtaacttataacgcattggtttcgtatgccgtttgacggcatcaatttcaagaatttcatcgccgtagtttggtatgtatcctttctcaaattgacctttggctatgctcattctcaccgtctggtcgggcataaattttggtctttttctgtgcttaccaaaaagtgctctgtgctggtctgcaccaaacattctttcccacactttttgagaatttttaaagttcacatcgattggtcgcatgccatgtacacgaatcggtgaattgttgattccactaacaattttgtcgattacattcacccagttgagagttttgagttgagcaaaataacgatagacacgatttttaatttgtcgaatagcacgctcggccaatgctgcctttttctcagagtgtgtgctctcatatttctcgacttcctcttcatcaaatagctttttcaactgctgatttttaaactcggtgcccttgtctaagaaaattcggtggggtttcatcggcattttggaaaaaacactcttaaagccctcaaccatgtcatcggccttctttgtgcgaagtggtgtaacaaatatttgcttagaaagcacatcaattacaaccattatgtatcgattgccgctgttgtgtcgagaaagcgattgaaaatccgccaaatccacctgacagtctgtcataaagccagcagctgttgttcgtgaacgagggaagttaatacgtcttggacgcattaaagtgtatgtgcgatgcccctccaaatagtgttttacatcctttttagaaactttatggccaagttcctttttggcttccaaccataatcggtctacgccagcgaatgcggcaggcgattttgggtcattgtagagtcgttccaacacattttctattgatttttccatttctgtggtctcaggcgttgagttttcggaggtatttgtattgttgattctggtggggccgttgttttccgcttgactcctctcgttggaaacggaagcatcagtccttcctgtgctctgcctctcggctgtccagttcctctgattttttgtgatttccggtttaattcctctctctgcgtctgtctctgccccccagtcacaacaaaaaggaacttcaagtttttagctctgaacttgagcgcccagtcacaaggaataataatttttgcgccttctggtttggttaccttcgtcggctcgacttttcagtgcctacgacttacgcacctacttcctcctttttattttggccccttgaatgatgggatatgccgtggcggccgtgatttggaataattattccaccgccaggaggagtcgaacttgaagttcctttttgttgggtcggataggagaagcttggaccaacataatatcttttgtgtttgtctaaatctccaaaccgatacgaataacaatggaaaagaccgaaatttttgaaccctggactgaatatattgtcctggctcggggaaacgaagttttcccgagtgaacaaaatttcttggtaaaaggagtgcaacaccaataccctggaattatagtgggtcgaactttggttgctccgggagaaagcaaaaacgtaattttacagctaatgaatgcggggaaagcaccagttaaaatttatgggaattcacatttggctgacttagaaacaattaaaataaatgcgttaccaggtgatgaaatctctcctaaagattatattcccgccagaggcgagatggagtaccaaacttcctactctcccaaaaccgggatcgaatcgcccctcccgcctaaaagactatggattgaggggac

SEQ ID NO: 17037 - DNA, 905 bp, Heterodera glycines
gcacaacccctgaaataagcttaaatcccgcaaaatttcataagcccaaaaatcctgtactttccaaaaatgtcgtatttagatcccgcaaaattcggcacgggattaaaaaaactaactcatatttggcttacagagccgccctaaaataaagtattaagtattaattagcccttttttgttgaaatttttgccttttgcccaaaaaaaaacttgatattaaaaaccacctgatgttgtactgctgatgtctttcttcgcttgatttttcgttgccattcaatgccaccattgtttagtgatccttctttttgttccacgctatttttggttcttggccaaatgttggcttcatctcgggtgccattttcgcgcatttgttccatataaaaagtgccatacgcggcggaattcagccggatatcagccattggcaatggtgttggcgttgtgaatgaaacggcactttcctgagattttaaattaatttaaaattacaattttatagtgtttaattttttgttattttatcaaagaaaaatctaaaatttacataaccattttttaaataaattattgaatttcttttcacataacttttgactccgaacataaacaaacaaattttttccatcgaattttcgaattattccaaaatttaataaatgatgcgcaaactttttaattaattaaaaaataagtttttttaaattttcttttactaatggcgtttgtggaatgctcattgaagtggccatgccttgttcacgctcttcaagcaaataacaacgatttcgttgtcttgaaaaataaaaattaattatttaaattaaattaatcttattttttaatttatttatttgcccaccttgagctgagccgatgaattctcgagcatcgatgca

SEQ ID NO: 17038 - DNA, 996 bp, Heterodera glycines
ccccccccccccccccgaaacccaaaaagtaaaaattttttttgaaattttaagcaattttcttaacaaaattgcattaaaatactcaaaaaattttccctgcggcgcctatcggcaacgccggaccctcattttaccatatttttgaaaaatgtagaccaaaatggcaaaaaatattaattttttgtcgaaaaacggcgaaaaattttgtaaaatacaccccataataagggattttaaaaaaccaaaaatacacccctaaaaaaaagatcggattgaagtgatcagtttttattgccgctgttcattattacctatgctatttcctttttttttgatctgttccgatccgcatatctttatttttctattaattttgtctaatgcaaaaatatgagcacgaaagcccaacttatgtaccaaaaaatcatagaattggataatttgggaagcctagatttattaattttcaaatttttaatttaaaaataaaattttgttcattttatatacctaacacggggaagtgatttcaaaatgtttccatattgaaaagtgatgctcattagtgacgagacagcaagtgtaattcgggccggaaggcttcggtggtcgagaaaaaatgggatccaactcatcgccacggcctgtaataaaaatgatttaaaaattatgatacttttaaatttaaatattttattttaaatttacggtttggacggggaaatacgatttgaaatatgtagactccatattgtcgattcaagaaaaaattgacggttaactaaaaaaaaatttcaaatataattttattatttaattaaaatttgttttataaagtttttttaatttcgaacggattttgttatgcttttttaattgtaaaatttttaaatttttttctaaaaatttaaaaaattctttttgaatattttgtttcgctttgatgatcgatttattattttttgatcagaaaatccattgaccctgccaggc

SEQ ID NO: 17039 - DNA, 1503 bp, Heterodera glycines
tatcagggatggcacggaattccgatttccgacttccgatttccgacagggatggcacggaattccgatttccgacatttttggggtcggaattccgacttccgatttctgaaatttttgataaaaagtcggaaattttcggaaattttttttgaattttttttcaaaaaattaacaattttttacaaattttgttaataaattgcactgaaattttcaaaaatttcccggcggcgcctatcggcaccgccggaaccctaaaatctaatttttcttgagaaatttttgcctcaaatcgctaaatttggtcattttttggacaaaatttgttaagaatttgcattaaaattataaaaattttccgcggcggcgcctatcggcaccgccggacctcacccgccatgttttaaaaaattttgaaaaaatgcgccgcaaaaaaaggtaaaatttttgatgaaaatcattgaataattttttaaagcaaatatgcttttaaatagatcaaaaatttttgagtcactttttacttggttaagaatttaaaatttagcctattaaaatatttagaaaatttttattatgttttgttttttgaaaaatttccgatttccgacgtttttggggtcggaattccgatttccgacgtttttggggtcggaattccgatttctgacttccgaaaaatttttgggcctcggaattccgatttccgaaaaattttggacccccggaattccgatttccgaaaatttttggggcctcggaatgccatccctgatacatatggattaggtatgaggacgcgcttgttcattctattcctgatgtcaatttttcatattaattttaccagtttttgtctaaaaatatatcggaacacttatttatcgttttggaaattttttaaatttaattgaaattttttcaaaatttccaaaaatccgcaatcctgcgcaggatccggcaaattttaaatgcaggattgcaggattaatccggccggatccggtcctgcaaaaaattttgaattccaatcctgcaacaggatccgcaaatttgaaatttccgggctctattaaatcggaacaggacgattcggtgccgccgttttggtgccgccgtttcggtgccgccgtttcggtgcccgccgtttcggtgccagccgtttcggtgccagccgtttcggtgccgccgtttcggtgccagggtgggtttcactgccaatatgtttaactactgcctacttttctctttttctcattattagggttataaattatatggactaaaaaacgccaaatatggacataaaatatggactaaaaaagcccgaaatatggactaaaaacctcaaaaatggccaaatatggaccaaaatatggatttaaaaatgccaaaatatgtgttgtaaaccctcaaaaatacgaaaaaacgtatgtatatttaatatttgttaaaacagacttaaaaatacactaaaaacagccaaaaatgggtttaaca

SEQ ID NO: 17040 - DNA, 2280 bp, Heterodera glycines
tctagagtccaccaaaaaaaaaataaaataaatggataaactcaataaatttgcgctattattatttaatcagtaaattcgaactaattttgaaatagcaaaaaagggtaacatacgtacccataaatgttgcgaaagcagcgccaaatccctccttggcaatttcccaaaagccgccaaactcctcatcatcttgctgaaatagcgcaaattgaaacaacatgaatagagcccggatgaaattgacgggcccgggcatacaattagacaatttggcccggtaaaagtgtcgagtggcgtcaaagtccgtcgtccggactctaatgaattacattacaaaattgagaacccgttccgggaaaacagatttgtttaaatctcaaaaattgtaatcgggcccatttggttgccctgacacttgctatatgatcactgaatttttgaggaattatgccaccattttactttttccatgaattcaagggcaccaatttacaattaaaattggccaaaataaacggaatgttggcgacgtgcctcttggaaccaggtcaaataggaatggccgacagcggaggtgatgagaatgtagaggagcagcgcaatggcacctttcatcggcacgaggccccaacaaatgccaatgcacagggccagcagttggcgtccccagtagagcacgtccagcaactcgtccttgtccgtccaggggctgcgacggcgcaatgcctttgaaacctatggaaaaaagatttttttaaattttttccaacgataattcggaattaatgaacaattaactgaaaattcaagcaatttgctttatatttttctcgtttcctaaatgaattttttcggtttttcaatcctatttttggcaaaaaggcgaagaaagattacagtgaagggggaaaaatttttggttatgatcaacaaatcccttatttttgaaaaaaataaaaggtaaaaaaagtatttttgctgttggggcccccagaaaattccaaagggtggactcttttgaaaggaattgttaaagatgtcagattagtagttagcgatccaaaaactccccatgagtaagttttcacgacgtatgtaaaaaaaagttggaaaacaaaggatccaccttttggaattttttggggcctcccaacagcaaaaatgccgaaattcttcagaggaagacaaattgaaaactatacattagagaaaagtttaaatcgcgaaattcttacagtttccgaaagactctgtggttttccatggccttctacttgtccattcctttttggggtgctcatctaatatttaatggatttgtgctgtaattaggggagaaaaaatatacaattaaaatacaaaaacaaagaactttgggtttttaaatatagatgaaattttaggatttctatattaggtaagaagtgaaaacatttgagaattttgtttcgaatttcaaaccaaacaaaaatgtgaatcatcgaaaatttaaatttataaacattacgccaaaaagaaattttttgaattttttcagaaacaacgttttctccgtttctaaagtcgcctgctagttcgagaaaatcgaaaagtttaaaagtatataattatttttttattttttaatcggctccattaactaaactgaattttttaactaaaactatattttttagctggattttttttcgttgtttaaccgtttggtgcttccgcaaacaaaatgtacattttccgcgttctccaaaccgtcccctatagcaatcggccgccggtgctcgacataatcgccaacattcacagctatttcacatgcaatttggtcagttcagttacttggcctattttttggcgcttttaaactaacattttaatttcccggggcgggatgtaattttaataatccaaaataattttttggcgccaaccgctctcttcctgcatttcgggttttcattgttttctgtccgttttcaagctgatcggtctggcagtgctgctcagctacaagcagtttggcggtagtcccatcgaatgtatgacgccggccggcttttcaagggcatggaacgatgtaagaacactgggattgttgttgtgcaagtacttttccggaattctacttcataccgtcttgaaaatcctattttttcacaattctaggctctccaatattgtaaaagaattcattacggttcttttcgattaattgaaaaatatgtaaaaaaaaactttagtgttttttgagaagtggagggggctcaatttacatacaaa

SEQ ID NO: 17041 - DNA, 1003 bp, Heterodera glycines
ttctttaagagaaataggaatgcattgagcaatctcaaatcaaaatacaaaaataattattgaactcattaattaattggccaaaaaataaaaaattgattctttttaatttaaaataaaattatgtttgaaatattattgttgacggtattaaaaaagagaattgtcaagaaaaaaaaaattaaaatggactgaaataaggccattttggaaaattgattattaacaaatatttatttttttaccacaaaatatttttaaattgcattaatttattatatattaatatttaagaataagcatttaatttcttgtaaagatgaaagtttttcgttctaaataataaagcatttttaaattgttatatattttgtatcttcaatatgccttgctttaatttctgtatttaatttacatttttcttttgaactgtaaatcataaataaagtacatttttttctaatgttaaatctccatccgtaaaatgttagattggacgaagcttattcctgtagtctcctgctgcttggttggtgatttttcgaatttctattccgtccatttggtggaactaaaatttaaaatctgactttttcacttttcttatatttttgcaatttatattttgttagaatttaatttatacttttattttttatcattagtttaaagactattaattagttttattttaattttttaattagcacttacaatttagctgtatctgtttattctaattttttcgcatatccaaaaattatttttttaaataaataaaacgttcctgatgcgctgtgggtgcggtaagaagtacagggtgcccatgtgacgggtactattaagtttattttgttgattttagatttttattatttaattatgactaagtaaggttcgtttcaacgtatggagataatgaataacatatatattacatatttagcaataaataatcgtttctgataattatatctaattttatttaatattctgtgttttt

SEQ ID NO: 17042 - DNA, 1044 bp, Heterodera glycines
ttatcaattttttttttatttaatgttttttgtcaacaaattttttttgctttggtttttgcttcggctttttagcctactaacgatacccgcggcgagaacgcaccaaagctttgggtaccaaaggagccgaggagttctctgatggttaaaggaacaacattgttccgccccaccacacgccacacccccctcatttaatgtggcgattaacttacctgaatttggctccttttaaattatttttttaaataaaaaatggatcagaaataatttaacaaaataagaaaattattaacttgaataatattataatttttatttattattaaattttatttttcaaatcaattctagtttttgttggtgtattcatttttagttcacgttaagaaaaatgacataacttctcaaaaaaaatttttgtgaatgtaaaatttatttttctttattttaaaatctcttgccacacaatgtttttgattttcctttctttttgtcatccaaaagttttatttttaagcctttccatgatttacagcgagaaaatgcaacataagtttgtccatgggcaaatggttcatcggtataatcaatcccaatttttgaaaaagtttgtgattggcttttgtttatcgtaaaagcaaaagcaggtttaataggaaattgatgcctccgcaaaggaaatggaaattttttgtcttcaagtaaagtaatccttggaattaatgtcgtttctccggttttatccccacttttaatcacacaactaattacatggtctcccatttcttttatttgcattcttgtcccattacacaacccttctcgaacatttaaatttctcaacaacattatcattgaattagttttaagctctattttatgatttggaaggcttggacactttaaagaatttaaaatttcatgtgagataggaaaatcactgtttggatcgctttcatcaatacttaaataagtgtgatattcccccggcaatctatttgattatattttcattatattcgtctactattgaattaa

SEQ ID NO: 17043 - DNA, 781 bp, Heterodera glycines
ttgaacctcttctaatcactcttctaatcgctgttgtacctcttctatttactgttgtacctcttctaatcacaaaggggtgagcataggatttttgagtggaaaaatttttctcacaaaaatcttccaaaaatatgtctttaggggttatttgggccgctgatcacgaatacgtgatcagattttacttttgacatcgttagacctcagaatccctgtgtgattggggattctgggacatgttctgaggggggggggcaggttcggatccggacggtgtaacattatttttttgtgcatttttacgttattttcaatgattttaattaatttaaaatattttgttgagttaataaataaaaaattatatttaatttaattttttttttgataaataaattttataagtttaaattaattatttttttatgggagcgcccgtcctgaggccgcgaagcggccgaaaatcccccaaaaaattaaaaaacgggcgcgaagcgcccgtcctgaggccgcgaagcgtcctaatttccctacaaagtttaaaaacgggcgcgaagcgcccgtcctgaggccgcgaagcggtcgaatgtcccttaaaaaattaaaaaacgggcgcgaagcgcacgtcctaaggccgcgaagcggccgaatgttccccacaaaattaaaaaacgggcgcgaagcgcccgtcctgaggccgcgaagcggccgaatatgcctaaaaaaattaaaaaacgggcgcaaagcgcccgtcatgacgccgcgaagcggccgaatg

SEQ ID NO: 17044 - DNA, 2330 bp, Heterodera glycines
  unsure (1)..(2330): unsure at all n locations
aaaaatttcgattttttcccgggaaatagaaaanaatttttggcctcagcgggacatttgagtcccggggcccataactcgtcaggagttggttttagccaaaaatggccttagagctaaattgtagagctttcgaaactctatcgaatggtgtactacatgatgtaaaattttcaaaaattttcgagctaggccccctagaaattttcggaaattttttttcggacgaaaatgggggtgaaaaatatttttctggggtattttgaggtgctgagcacgaatatgatgtttgttttttgtttcatgatttttggaattttttaaaaattctttattttttggcaattttttggccctcgggattttgacataatatttgaaaattcataacaaatcgaagggttgatcaattttacaggaataaagccttaaaaatagcaaaaaatcgggagaattttatgggatttatttggttttataatgttcaaaagaaaaaaagttattccagaatttctggaaattttcgatttttcagaaaaaaattcataactcggttctgaaaagtcatactgtaaaagtaatatacaaaaaaaatccgcaattttttgctctattatataaattttatttggcatttttatcacttttttgagagatgttacaaaaacaaaagtgattttggggttcgggaccaaaggggtgtgaccaggatttttgagtggaaaaatttttctcacaaaaatcttccaaaaatatgtctttaggggttatttgagggtgctgatcacgaatacgtgatcagattttacttttgacatcgttaagccctcagaatccctgtgtgattggggattctgaggcatcattttgaggggggggggcaggttcggatccgcgccgtgtacattatttttctatatatttttgagttgtttttcaatgcttttaattaatttgaagattggttgtaaattttaaatttttttttaataaataatttcattattattttttatctgtaaaaaataatatcatttcaaatttcttaaatattcaatgcattcgatttttattctttaataaaaaacttttccttatttatataattttaaaccatgttgaacctcttcttatcacttttgtacctcttcttgtcactgttgtacctcttctaatcacttttgtacctcttctcatcacttttgtacctctttaaatcacatttgtaactcttcatcaaatttgtacctcttctaatctctgttgtacctcttctaatctctgttgtacctcttctaatctctgttgtacctcttctaatctctgttgtacctcttctaatcactattgtacctcttttaatcacagttgtacctcttttaatcactgttgtaccttttctcacactgttgtacctcttctcatcactgttgtgcctcttctaatcaatcacagttgtgcctcttctaatcactattgtacctcttttaatcacagttgtacctcttttaatcactgttgtaccttttctcacactgttgtacctcttctcatcactgttgtgcctcttctaatcaatcacagttgtacctcttctaatcgctgttgtacctcttctaatcactattgtaactcatttaatcactgttgtgcctctttgtttttaattaatttaaaatagtgatttataaattaataaaaaaataatttttaatttaaataaaataatttttgataaatgctttgtattaaaattaattatacaaaagggcgcggagcaccctttgaggccgctaatcggccgaattaaaccataaatataaaaagggtgcggagcgcccgtcctgagggcgcgcagcggccgaatatccatcacaaaatttaaaaacgggcgcgaagcgcccgtctgtctccacaaaattaaaaaacgggcgcgaagcgaccggcctgagggcgagatatgcctgaatgtcccccactcatctaaaataacggcggatcagctcgcgggcactgccccgaaaactgaaaaatgtattctttcaagttgaccgattggggtactcaaacaattatggggagcaaaaatccaacgcagaattaaagtacaggctatagggaagctattccggaaggattcggtctccccataaatctgggcgcatcggttcggagggactgccccgaaaacaaaaaaatcgattatttcaagtgtccgtttgcggtactcaaacatttatggcgagcaaaaatccaacgcagaattaaagtacaggctatagggaagctattcccgaaggatccggtctccccataaatctgggcgcatc

SEQ ID NO: 17045 - DNA, 795 bp, Heterodera glycines
ctctgaaacaaaacaaaagtatcaaaaagacaacaatttgaccgcctcttaagttgctcaatcagttggcactccatccgccgctgcctccccaattcgaatcgcctccaccgccacctgcccaaccggcgccagaaccaccgccgcgacttcctccgctggccttgaaaccagcaccactaccggagccacctccaccgcggtagttgctgcctccgccggcgccgcttccgtaactgctgccaccggagccgcctcctcctctggtgttgcgactagctccagctccaccgtagctgtttccaccgccgtagctggcgccaccgccactaccaccgtagctggcgccaccgccatagccactaccaccaccaccatagctgttggagctaccgtaccctcctctgcttccgcctcccgatcctcctccccctctgaagctgcctccaccaccggagttgaaagcggaacgattggcaccagttggcgcaaagctggatcccgagtagccaccgccaccacctcctccacgaccatacgaccggccacgacggtctccgtaaccgttatcagatacattgttcgcaaggttggcaagttcgactggcacattctgaaaattggataaatttgatgccaaatcgtttcaattcgatatgcactcacttgtttagcctcttccaacaccttgatgagatcacgagcctttggaccgttgtatggagtaaaaaaagtgatagctgtaccctagaaaaaaacccgacatgtataccggaatattctctgtaatgatat

SEQ ID NO: 17046 - DNA, 2198 bp, Heterodera glycines
agtgacttctttgtcgtacaaccacttatcacccgcgtcattattggaattcggagccattttccgttaagtatataaccttttatgtgagcaattttttgttaacaagtagtaagaactttctcctgttcacaaatcgaacatcaatttggacaaattcctaattcataaatcgaacaaaaagtaaaatgcaaatttttgaaacccacatcttcgatttttgttgtaacttccctaactaaataaaatggacacaatatgctaaataagtgccaaagtatgttttgaaatctgggcatttttatttttagaacaagggttgacaattcagcgatcctatgaaaatagagtagagcgggacagggacctgatactgaaaaaacgtagccaaaaagtccagggttttcaacccgaaagtcccagtcccggttttacccaaaaggcggagttccgggatctgattatccaatatatgagaatttgatttcaagatgagtgtagagaagaatggggattgaatatttacacaccgagtcaaaaaacgagacatgtgtcaataaagagagagtgcagagaaactttttttctctaacttttctctccttttggcgtactatctaatattttcattattaggaaaaataatattcacttctctccatataactttttttctatgcatacaattttcaccatattttgcatatcgatagagaaaaaaatataggatttttcaatcgcttttttaaagaaaataatcgctttattttagtctaagatttaaaacaaaatttcgaacgcctatatcttttttctaactcattaaattgcttggcttttgcttagaaaaagcttcttctcatcaagagctttcgaatgataccaagattatacaatttggttatgaaaaccctccaaaaataattcccaaaaagcgtcattttttaattttttggacaaaaaaataaaaaatattcatgttgcacaacggactcgaacctccgccctttgtccctttactatctcacaaaaaccactccgccacacatgcattcactttttgaactaggggctcaaaattgactcggtgtgtttagtaggtattttcttagttcagcggattggtctgaatatcatttttttttttttgagtttagggaattttttttaaatatttgctgttatgtttgctctttcaaataaattttttaattttattttatgaaaaaaaatgaaatccgttgattttgatgatttaacaagccataacaaagcttaaatgtgcttaaattaaggttgctaaaaataaattcaaccttaaagaaggactttttgtcttaatcaaatggttcgaattttgttgccaaacggtgagtcggccaacgtcagtccttcagaaagtgttgaagaagcgattaagcattgcgttggtggagatatttcatcgcagaatgactattgtgagtttttttaatttaatttaaaaaatagaatttgaattctcccttttcagcattggttttctttggtcgcaaattaaactccgaccaacgcttagctgacattccgcatttggacggcgagtcacgctcagttcgattagtctgccgaaaatcgcccggtgttagcattgaaaagaacctggcggatgtggacaaactgcggtcacaatgccgaactttgtaccagaatcttggcgaggaacttcagcaaaaggttggaaggaccaacaatttgttttttctccttatgtttaattacaaagctggagacatatatggtggacgataacaatgccatattcaattccattctcaaagaccatcccgaacttgtgcatgatccgatcgcccttcccattgtcaaggatttgcgactgctggtgcctgccatcattgaggtggtccgtttaggagtgaaattaaacaaattattaaagaggaaaattaaggcttttttggaaacttaagccatcctactaacataaatacaataatttaaatataaaattttataatcctatcaaattattgttttttcaaaacgtacattttctatttattggacagaaccataaatttgcctacgagcgtcctgtttgtgccaagattttgaagaaaactttgctccaattcggcataatgcagcaagggcccgcagattcgtttatggcacaacagggagccaatgggtttccg

SEQ ID NO: 17047 - DNA, 2751 bp, Heterodera glycines
ccgatacacacgcattatacggccggcattgcctttgtagtggcctcgggtgacagtcacctcgtcatcaatgcttaatcagtggattattaaacagtttataggttaatttgcccgcccctttgtaccgaatgggcgtagaacgcactccgtgtttattgcgcaaatccttcgacagcggcgcggacataatgcgacgacggatgtgcgagggcgcgttgaaatggcgtttgcgcgatttgcgcgctgaggaggagacgaaagggttcagcttcattttgaaagcaaatcaaaaactgaaaataattttttgtcgttaatcgaaaactctgtcaaatgacaattatgtcgaaaacttctaacattaaggagtcaaagatactttcaagtaaaacgtaactaaatgtacacaaagtgcaataaagctatagagcttcttacagccgatcaaaaagatttcattccctataatagttttgggtacgatgaacatgatttgatcaaaaatagacacaatatgctcactcggcctcgacaataataattttttaaattagtgcgctatttggcgttattattaaattattgcgtaaattcaaaatagtaggaaaggtagtccatgtacagtaggtacaaaagtatatgaagaattttgtgctctttttaatgagcctattggatttttccagcccctaggaatttgaaaaagtcgtagaacgttctgtaaatttcgtcctcctgtttgtattgcttttaaatgatcaattcctttattactttccttattacctttgtagaataaacatcccatccagtttatttacccgcttgtatgccccaacccgaatgagctcctcaaaatgatagatgatttgtcatgggtttattcatgataatatcaatgtcgaaattatgtaactaaattaaaagtcctattatatacaaaaaatattatggcatttggccgcattcggaggaaaaaaacattttctaacgcattgagaaaagtaatgtcaattctttgacattatgagcttgattttttcgagtcgatgtcgtttctttccccttcaaatgctatttataaattatgaggagtgatttcgatgattgaacagttcgtacatcaatagctcataaagactgtttgtgatgccccaggtaagcaatgagcgactgaaattgagctgagcaccgcgatacaacgcacgaattgagccatgccgttctgcgaggatttttttgaacataaaccacggagtacaaaagtcaatgccaatgtttgactaaaacaaatgagtgaaagcgtttacaaaagacaggaaaacggacttgcatccgacttttgatgacattaaacggaaagaaaatggtcgaaatgcacgccccgagaatggcaccggacagaaaatttgcgcacaaatgttgcgttttcgttctgctctcagttgaatggaaaagctttgacagcacaaattcgcggaacggctcacgcaaagtgaaaaacattacattgctacaactaaaaaataataatattgaaaagatattttgattaaaaattttaacaattttgaatttacccattgcggagaacgatgacggaaaatcctcgataaaatctgttaaggctgactatattaaaggctaacaaataaaaatgaattgcccactcttttggtgcataatttctgtacataatcctaaaggcttcgccagtgtttttgaatttgtcaaagtgtttgctcgtctgcagaagcgtttgtgttctctccaaagggcataaaatggcttccgtagcaccggctaatgcaataaaagcaaaagtaattggaaaggcgacgatatttggcattggaaaacgaaatgaaattttcaattcatatcccattttatatttttctgttttcttccacattaactttaagctaatcgaaccaagaaaggcggaaacagcgtgacaaatggtgaagctggacacatttgggtcacagccaaaagcgtgttgatacttttcaaaagttccaaacctaaaaatagcattttttaaataaaattctgtccaaaaggtacataatcgaacgcgttgttgtcctctgaataagtgggggaagaaggccacggtaaaggaggtgtaagccctcacgacggagctgaaaagagacggtcaaacgaaattcttcccatattccatccttattaagtgtgctttaccaacttcattctgtccatagcccaaatttcgaagtttcgtgtccgtccctattagtcccccggtgtttggcttatcatcattcacctgttttatggcatcaacggcaagaacattgtgcaactgttgtcggaaaatcagtttggtttgcggaaacaaaaggcacgtctctatgcatccggcttaagggataactaatgcaaattttatttttttttaaattaaatttttatattttaaaatttatggtcctagttttccctcataaataacaaattaaattatcggcaatggtcaagaattggtgtcccgacaaaaaaaaatgtttaaaatttcataaatattttttctaggctaaaaaatacgctgatcacgaatctgagctcggatttggcaaaatcattgattttatctatgacttttaatcaagtacttgattttctaaaaattaaaaaaattaatcgggcctaaaaaactcatatgttgtagagcacaaaaagagctttcgaataagctattgaaggtctggagaagtcaag

SEQ ID NO: 17048 - DNA, 2156 bp, Heterodera glycines
cgcttcctaagttgggctaaggatgacttggagaatggtgcgcgtctcccgaggggattgcccccccccctcccctcccttttgcctcacatccgtcgcttttctgtctatttgctcgtcattatccgttggccaatcctcgccaaatctctcctgctccgttcttcttataacaatttttgaacttgcaaacattcatccacttttatgacgtttttcccttaaattcgtttgaatttattttattaaataaatttccctcccgggcgaatgttccctccccccccccccttttgtctgtcattcctttcgcatttggccaaacattccttttctttcatcctttctccctttcttttaagtaaattcgggacaaaatgtcctaaagtggacgaaagttgagttcagtatcaaattgcaccctttggcattttccctcccttctccctccagcaaattcggctcccttccctccccggggcatcggctgtccctttaaaaagtgtggcgccccaatgccctggggcgattgggcgacgacttttcctcggcaaattattgcgtcaatcactttggtccttctcttttccatttgcatggtaaacgcagaaccgataagcagcgccagaggaagcggaccgatgggaaggcgactgaactgtctgagctgtgtgcgtgtggacgggggttagttaattgcttttggcttgtcaattagctctcgtccctttcagatacaacaacgctcgaccaattccgagtccgtcacggccttcagcagcccaactgcgacatggagacggtgcagtgcgacgtgcaccaagacacttgtgttagcatcacaatgcaggtggtgtttacacaattacgttgagggtgaacatttgtcgagattcgaaattgacagagagatcataaaaaacaaaatttctgaattaactctcacttttgttctctgcctctctctctctctctctctttaccctctttttgtttaggtttcgcagcgacagttttggattggaagtggttgtgatcagcgagtgaattacgactttccctccgggggccgagaaggctgtgtggaaatgccttctgtctatcggtccgtttttcagtttttcctttcgaattttcttggggatttcttccaaaaaccttaactgatttctgccacaatttccttcatttttttcgttttccctttagaaattttttccccggttttatggaggaacggaggaccctccaaagggtttgtctgtgcagcgcaaatctctgcaattcggcacggcccaccgccgcctttctccgatttcttcccgttcttttattagcaacactttctctccttattcctttgctctttttcggaacggttgaagaaacaatcgaaaggcaccgataaaaaaagcgataaaaattttaatttttacgggttcaaaatgaaaataaaaatgataaaatattttttgggtcgtcttcatttttcttcgttctttctccatttctttgctcattcgaaaattaatttggccaaatgagtccattgctccgaaggttagcagtttagagaaattgaggaaatgatgacaaagttaaatgacaattcaaattagtcgagtgcaaatgccatgtcaattaatcattgcaattgagtgtgccgtcgtcattcgaaagtgttcttttggtgcctttccattccatttcgagtttcttctgttccgccgtctgctgacacctgctgatgtcggatcatttaattgatttgattgatccgctttaatgtgcttctgctgctccttttcgctcacctttccccgccttcggttccaattttgaagtgtcgtgtaattgtcgccccaattttgctcctcattttgccctttgccattgccgcgacttcgtgtcaaaaaatgccgcgggaacatgaaagggtcctccaaggtcggcaacgatgaaagtgcgtcccaatcatctttcagctgttttctcagagtgaaaaattctcgcgaattccgtgacgccaccgaaatggccatttccttgagggattggcttaaaaggcaaagaatggccgtcggtgctcactttggccatttcctcgaacactctctgctccgtctcccgatacattttgacgtattggctttgca

SEQ ID NO: 17049 - DNA, 816 bp, Heterodera glycines
ttaattaagcgccgctggttttttgaccattgcccttgaagcgcccttttgctgtgctttcgtcgatttcatcgaaagaattgctcaattttccgagtcgcgtgcgtattggcaaaaggcagcactttatggcgggatgggtatcgtccccattttgctgtgtgccgggactgagactattttgggtgccgggatgatatgcgcttcgggcgtcgcctacggttttatggcattgggaaagaagtgggtttaatttgttgcactattgtcaattgacaaaaaactgataactacaccggctctgtttttggttcaattctaagtacgtttttaagggctgaccgtactacgatgttaggcggtgctaataccgctggacaggacccggcatggagcccacaactgaaccaaccatttccacaacctgccggattcaatcagccctaagtgattgaagagaccgatgatggatcattttcttattccaattctctcattttgacacttacatttgaaccctaaaaccctttcaaaagcccgctgtaaaattgtgcatttttaaaggagatgaatcgacattggcaatgcagacccccacttttctagaattaaaaatacatcccatttctgtcctattgtttagtcactgattgctttgcctcatattatatacattgataacggcgcataaaacaggtatgtgaacaactttttacaaagccatgtatatttgtaaattcgagaatggaaattatagaaaacactacgaaggatgaaagtagatgagaaatattgcaaattgagaataatctattt

SEQ ID NO: 17050 - DNA, 1349 bp, Heterodera glycines
tcaatctgatctagatcccgatcagtcaatctgagcttttcctgatcagcccctgtctcggctacatgccgatcggttcataaatttggcttatcagccccccaatttcgagtccataacgatctaccgatcaactcccaatttcaaatcgataccgatcagccccaatttcgagtccaaattgatcagccaccaattttgtgcccatccagatcagtcccctcgagtccatcaggatcagtcccaaatttcgagtccaacccgaacaattcccgatcgtgacccactcccaattccattttaaattcaacaccatggccccagcccattgtgcttctttctgacctccttcaacatgttgtagtcgttgtccagtgccactttggtgatcgctaaggcgccagcgccgctcccagcggcgccgtgccaacggtcgctcattgtgctggcgcgccgctttggcacggcatccaccagcgactgttgcgaggacgccttgtggcatggcggcgccattttctgctgcatggacgtcgaccgctgttggcgctgaagcgcgacgacttcaagccgttcggatggcattgaaccggtggacagtttcaacgagccgcactttgcgatgggcgaggcggcaccggaggaacactgctgggctgcggccaacgcaacaatgtccgtcgattgagcctttttgtgagattttttttggaaattttgattttcgttggggttaggggggttagaatttgtggtccctccctcttattctggaaaattttgggagggggttcacaagaatttcagtgtgtttttttttgctgggttttctttttgaaaattttctaggcaattttttgaggtacatgaaggtggtcgaattgagaaatttttttggttagaaacccaaaccgaaaaactcttggaaggaaaggtttttttttttgctagctgggcgattttttgagtaattttttttttcagaaattttctagtactatttttggaggtccctggactaagtcaaactgaaaattttttcaatttattgagtccctatattttgaggtattttttgcgatttttttctccactttcaaaaattttttcgccccaaccaaacgaaaatttagcccaatcgccaacgctgaagaattgacttgtattttgatcttggaatttggaaatttaagaagcaattggcggggctgggggcggctcttcaaagttcaaagcgttgtcccgccgccccaattagcgcccattatcggcccattgtttgttggcatacgtccgcccgcgcgctaattgagcggcggcgggcggcaccggcgtgagcccaatgaccc

SEQ ID NO: 17051 - DNA, 682 bp, Heterodera glycines
  unsure (1)..(682): unsure at all n locations
aaaaatatgtatttggcgattttgtgacaatctcagctgaatttcaaaagcaagacaaataccgattattaaaatntaaaaaagcgccgattttttttatgactcgagactgagccggcattattcgagaaattgggtcggaacttttgttgagcttcaacccgagatcgtccccccccctcccgctaaaaaatattaaaatttaaaaaagcgccgattttttttatgactcgagactgagccggcattattcgagaaattagaccgagacttttgtttggcttcaacttgagatcgccccacctcccataaaaaaatttaaaaaccgccgaaatttttttggttttcttccgttttataaaggataacagagcacacagtgttcttcatcatcatcattttccactttaaattgaacattttgtgcctcttcattcacactttctggccggtgccggccgatgattttttgtgtcccccatttggcccgaaaagagcgcggattgaattcaattttggcacccctccggggacgcggaggggagggggccatccaccaaattcgctcttttgactctctcgtcgacggatgatggcacacacaatgccgtcccgaccgcttccgtttttcatttttagggcattttgccgaccaaaaaaaaaatatcaaaaatccattaaa

SEQ ID NO: 17052 - DNA, 1441 bp, Heterodera glycines
  unsure (1)..(1441): unsure at all n locations
tttatgataaaagaaataaaaagcacataaaattattattctgtataataaaaaaattaaagctaaaataatataaaattttttgactatttggcataaggcaaaaattgaaaaaccccgacctcgaaccccgacgcttcaaccccgaacgtgaattttccaaccccgacgtcggggttgcaaccctagtctaaatgaaaaaaaaagttttgggccatttgtaaatccaaaaatttttcaaaaaaattctcagaatttttctcaattgaaaaatgtagcagcctatcctccttcgatttgcttaaattaaaaaatcatttgtcattttattttatatatttaatttttttggatttaggatatccatttggctatcggtttttattaatcatcacagtgagcacttttgcttacctcacaatgtttggtttagcatttcttattaaaaaattcatggacattaaatcgaaaaagtaaaaaataatttattttttatttctatttttaataataataattttggtttattgtttaagcattgtttctcctcctctcaaatcaacaaaaggatgattgaaatgaataagcaagtttctcgaaatctcatcattcaggtgttaaagaatcaaccagcgtttagaataattaattttttatgttctttttaaaatacgccaaattgcgttttttcttctacaataataaagaattatttattcatttcgtgctgattttgagccacttcaaatctcataaacctggtctggatttaagaaagcgttgagaaaaaaaaataattaaatttcattcatgaaatattgtttttagtaatttttcaaagataaaaaagaggcttttagagttaccgtatgactccaagaatgtaaaatttggtttttcttacttatgcgcaaagttagacaaaattttgtcgggaaaatgccttcggtaccaaaaatgtctttaaatttaggcttcaatgcctctcatcatttatttttccgtcgttttcctgcttttgcttctgctgttcaaaattgacacaaaaggatggagctggctacagtactacaacttactgtcaaccattccgatgtttttgcccgccgttttgaatccaattgtgccaatttgcaccatcaattattatcgtcatgtgctcgtgtcggacgtaaaacgttttggtatatggtgtatcaatttaatttttagcattttaaaatgtacacataaaaatttcagggaattttttgaaagttttgtttcatctaaaaattggtcaacaaaacatgaatgaaaatgagccgaaacaacagcaacacaccagccagcaagatgngcaattaatgtgccaagaacgcaaaatatcgaaacgcaaaattaattaataaacatacagattttctgggggggggcccccacacccccccccccccccccc

SEQ ID NO: 17053 - DNA, 1700 bp, Heterodera glycines
cccccccccccccccccccctccgattctaccaataaaaagccgtttttttcgtttgctttaaaacttctttgcgtaatttctcgaacatgaaattattttataatctttttaaaatctttttaattattatattttaaaaaatcgttttttccaacttcagccagcgcatttcttaaatccgccaccaaaaaattctctttccttgacatcctaaatatttttataaatgtcttctatccgaattttattggtgattatttgactaatataaagttacggggtaatccaaaatgagttttcaataacatcataatttcgaatgatttatgaaaagatggctttaaagaaataaacatttaagtgctttttgtgaccgatataaaattaagtaaagacaacttttcacacattaattattggcgaaacaaaataattaatactaatttattaatccttttcctacaccaactatgccaaccaaacccaaacagttgaaaaataaatgaatttgatgcacaaatatcgtatgaatatcaccggcgtgcgtcgcgacttgtacatggcacgcaatttttgccacaattaaacattcaggacaggggaagcaggaaaagattatttcgaccaatttgatttatacgacttttttcccgaacctttttttgaatagtgaaatagtcagataaactttcattgtgcaaattaatggtgtattatttcaaaatttatttaactaagaaatagagttcggaaattctattactaatttgtaagtgggaattaattttagcaaattttcaactgtcaataaaaaaataaaaaatgacgaaatatgttttaattttaaaacttatgaaaaatgtaaaaaacaaattgaaagatgaaaaagatgaaaaaaattagtcttcttgcatttcaattatgcttcttttcttctccaaattgtttcttccatctcataataaatagttccataacttagtccttcactttaattttgttgaataaataaagtccttagaaagctatttttgatgcagaatacctaggtattacatagaatggcattcgcgtcaagcgaccattcctttttatacccgacaaacgccgactccgactttccccccccccccccccgacgaaggtaattagtaatttgttttggtttgagtccgttattaataactaaaaatatttgttttcacttcttataatatttacatccatatctaattgtacgcaaaataaattttacaataaattaaaagtaaaaagaagccgcaaagaatgtaaaagctgtgccaatccataatttttttacatttaaattcgtaaatttcgaaccgcaaatgtgcacttttttcgggggaattttcctttgtttgttcacctgcgacattgaaagcaatttgacaaaaaagttgaagaaatgtgtttaatcagaagacagcgggcaaaaagttaagcaaaaaaagttgccacgcttcgaaaaaggagaataaaggcgggaggaaacgaagtaaaaccatagaaaatccatacaatttacaaccctagttatatatcattcgaaatcggatgaaccgcattaaaaggaaccattaaattttttccaagtcgttttcaaaaaataaaaaattaaatcgaattttttgtcctagaacctcttaataaccctgggatccagccggattcata

SEQ ID NO: 17054 - DNA, 1065 bp, Heterodera glycines
tccccataaatgtttgagtaccccaaacggacacttgaaaaaatcgatttttttgttttcggggcagtccccccgaaccgatgcgcccagatttatggggagaccgaatccttccggaatagcttccctatagcctgtactttaattctgcgttggatttttgctccccataattgtttgagtaccccaaacggacacttgaaaaaatcgatttttttgttttcggggcagtccccccgaaccgatgcgcccagatttatggggagaccgaatccttcgggaatagcttccctatagcctgtactttaattctgcgttggatttttgctccccataattgtttgagtaccccaaacggacacttgaaaaaatcgatttttttgttttcggggcagtccccccgaaccgatgcgcccagatttatggggagaccgaatccttccggaatagcttccctatagcctgtactttaattctgcgttggatttttgctccccataattgtttgagtaccccaaacggacacttgaaaaaatcgatttttttgttttcggggcagtccccccgaaccgatgcgcccagatttatggggagaccgaatccttccggaatagcttccctatagcctgtactttaattctgcgttggatttttgctccccataattgtttgagtaccccaaacggacacttgaaaaaatcgatttttttgttttcggggcagtccccccgaaccgatgcgcccagatttatggggagaccgaatccttcgggaatagcttccctatagcctgtactttaattctgcgttggatttttgctccccataattgtttgagtaccccaaacggacacttgaaaaaatcgatttttttgttttcggggcagtccccccgaaccgatgcgcccagatttatggggagaccgaatccttcgggagtagcttccctatagcctgtactttaattctgcgttggatttttgctccccataaatgtttgagtaccccaaacggacacttgaaaaaatcgatttttttgttttcggggcagtccccccgaaccga

SEQ ID NO: 17055 - DNA, 2191 bp, Heterodera glycines
ttttctgaattttcttcgcgaaaattcaaactttgccttaaaagtgaaaaaagtcatgaaaacgtcaaaaaaatataaaaaagaaattttgaaaatttttttgaatttggccaataatttgagtgccaaaaatgatattttgtaaaaaaaaaaaaatcgaaattttcctaaaaatcgccaaaacatgtgccaaaaaactaccgaaccccaaaatatgtacttatgaggaaaaagtccaaaataaattttttatgtgctaaaaactcgctctgattgaaaggaaaacaggtaaaaatgctgtttttgagcttcttatgagataatagcatatgcgcaaaaaaaaagtaaaaacatattaatccgttcactgataataggcacaaaaaaaaattgaaaaaaaaagcatgaaaaaaggcatttaaatttttttttttttaattaaggatttttagagagcaaaacacgcaaaacttaaccaaacaacttaattttggtcattaaatgattaataaaaattttataatgtttttcgaataagaaaatttttaaacctaaattttttatcaagaaaaaatatcaaatttgacaatcaatttttgagaaaatttttcacttcttagggggtatattttctgaaattttttcaagtcatttcttaggggtgtattttcccgattttattgcatttttaattgaatttttcgtaaaaaaaacgacaaaaaggcaccaaaatggaaaaatgccaaaaaaggcatttaaggaacgaaaatcccaaaaaaggcaaaaaggcataataaaagtcaacgtagaagcttcaaaccaagtggaagtctctattcatcattttctcccctgtttcgtccacgtgttaatcacgcgcgaagggaatggacgaagaaattggggaaaatgggcggggaagagaggggacgggggcgggggtaaaagtcaatttggccgttctcacaatcagcgctatttttgcacgtaccaaaactttcaattattattctttatgtgctaaaatgcatcttgctgctaattgttttattaatcattttgtaaattaatttggtaattgtttgttaattactatgctaattatttttcaattaatttgttattttaaataaatgaattccttaattttttgccattttcattttgtcccgtgctcctccaatcttcaacagttcaatttctttttcaacttttcttatcccttttccgaagttttggcataaaattccggcgtcgggacttagccggcgcgggaaaaatgcccaattagcaaatgattattttgaaaaatatattatattatgccataaaagggagctttacgatgacacccaagcctcgatcatcgaccgcctccttagccctaatttttatttcaaagtaaaaattcttatcaaatcttgggtgcctatcggcgcaattaggtgtcagtcaatcaaagctctctcacctctctcactctccctctcttcatttctcgctctctctgtctctctctcattctatctctttctcactttccctctccctctcgcttcctctctctctcatcactctcatcagattgttatttattttacattattcttttaacttttcaatcacttaggggaacattatcattaagcaaagagaggggcgattttagagaaaatttttcggtgtaaagtttaagaataaataaatttttgtttattttataattttcaactttcattgattttgtggagaagcgggaccggcaccgggaattcccggtcctccgaggtcccggtcccggattttgaaaatttatttcccggtcccggtagggcaaacgggaaccgggaaaaacaagcactggtaagaatgggggtctgatttgtgagtgaaaaattagtgatgaaaattagagtcaaaggaaaaaaattaaaataataattaatatgttctttaaaagtaacactgcccaagtgtgcaaatggcctaatggctagtctacttgactttcccttcttctttcccctggttcaattccttcacagaaattaaaatatcttgaattttgtttttgtgtattcgttggttttcctagcgttaaatatgattcctcatatttttcttttaacagacatatgtttatcattttttaaagaaaatccgtacaaattgagcttagtaatcccaaaaa

SEQ ID NO: 17056 - DNA, 2424 bp, Heterodera glycines
ccccaagagttccgcccttagacagtcaaagcctatatgagctcggcaccacatcagccagcatccataagagttcggtcctccggtagccaaaacccccaagagctcggcccactggcagccaatactccgaagagctcggccctccagtagccaatactcccaaggactcggccctccggcgaccaacactcccacggacccggcccttcggtagccaatactcataaagattgacctccgatggccaatacacatttgcgttttcgtatttcacaaaataacaaatgtcccaccatttttgacccgggcggcggctgtttcttctcgcctgctcctcctcctcgtccttctttggcttttcctccactttcgcttcgtccttctttggcttttcctcctccttcgcttcgtccttctttggcttttcctcctcctttctctcctcctcctttttcttcacctctcttcaatttttctcttgcttcttccgtttccttttcgtctcctctctctcttgtttcttcttcgcctcttccttcgtcctcctcatcttctcttctgtcttgttctcctccttcttttcctctcccttcttcccttctctttttttctcccctctcttcattgtttccgttttgctcctcctcctcctcctcttctcttctttcctcttctctctctctttctcccctctttccattgttgtcgttttgctcctcctcttctcttcctcctccatttgctccgtctttgctccctcctccgtctttctgcccacctcctccgcccttcttcttgtttcttcctccgctgttgtttcctctgccgttctcatcatcgccaccatcatcattttcattccctccaatcgcttcatcaggtgcaacacattgttgccatgctgcgtcaaaagataaattgtgtcgggctcctcaaatatttttttttcgatgaccaatttcaaaaattgaaacaaatttcgcttaccaacattgctaggtctagcaacgtccaaccatcacgaatgttgcgatgcgttggtaacacaggatgccatggagtctcgactcctgtgtccgggaaccgcaccaacacgaactcgtacttcttctcacacacggcgcatgtgtggacgaggtgacgggctcgctccaaatgggtgaagtagttctcgttgctgccatcgaagaggagccggtacaacgcattgttctgctgctccaacagggtctgtgatgggtgccggtggtcccccgggcaattgtcgtccagttgcggtgttgcctgattcaaaaaaaaaatccaaaattaatacaattattgtcatttttattttaatgaaaaatcacataaaaaatttcagcgcaaatttaccgcttttcgcttttccaatttgcgctgttgcggttgttgtgcaacagctttacgggttgaaggagcgcggcgcgttggattgcggacggaaacggaggaggaggatggtgcggcggcatttcccttggcctacaaaattaacgggaaattatttaaaaaaacgaatatttattattttgataaaattaattaattttttaaacccacgcttttgcgtgtaatgggcaatttttttggtgctggctgttggaccagtgcagtgtcggtgcccaggccggttcgattcgcaacgttctaaagtattaagaaaaaaaatttttttcatttggtacaaatttttctcattaaaatccatccttttcactggcggaaaaggacttgaaaaaatttcaaaaattttaaacacttaaactgaccattggtgctttcatggttggtagtgccctttttttcctgctgggaagttcatcctctgacgatgaacttgacgagccgatgggctttgatgcctaaacatgttaacgacataacaaaatttagtcatttacttacgaaaaatacaaatcaaaaatttattcatttactcacatttttaagtcgagcatacgttttgcccccgggcgccattggtgttgaacaaatgttgagaaaaatatggaaaaataacacacctaaaaataggggagaattatggaaaaggtcgtttggtcatttaatggcaatgagtaaagcggtgagaaagtgacggcgttcccccgtcaaatcgatatgcattgctctgtttggacaggggtggacagagaaaagatgagaaatatccctctctaccatcccaccccgctccccgcaaatttgaatgcccccgcaaatgtcacattgttgatcaatcataattttccgatccccccccatcagaaatttgaatttcatccctcatctgtcacttcgctgaccaatcaaattccccctccccctcggctgtcactttttaaatcaatcaaattttatgtcaaaaaagtgcaagacaattgaaaccgttcaataggt

SEQ ID NO: 17057 - DNA, 3459 bp, Heterodera glycines
  unsure (1)..(3459): unsure at all n locations
attcggaatcttgtccgttattgacaaaatattccgtcgcttgagcttattttttaatacgggcgtcctcaattgttgggtatttgcaccgtctcgataaaatgtttatttgtagaacaaataaattaaaacaatttaaaataaaaatgggcgaagtcggaagcggaataaataaattggaggagaacaaatatttaggcgaagtgaaataagtgcataaaaagcaactaaatgaatgaggggaatggacatgcaaaggacaatataaatcaatagtgtcttacataataaaaggaagacacaaaaatagagagtggggaaaatggagaggaaaagaaaaagacaaatgcaaagggaaaataatgcaaatgtgttctttcatctctcggggttgaccacccgaacactaatgtcataagaaattcaagattttctttgataaaaatgaagattttctcattttatcagcagaataaaataacagatcttttaaacaaaataaatattttatttttaataactaatttaaatttatgtgttagcaacaaattttgtctcatttatcaggccaacgatttttgctgtttttgtgctaataagccaaggctgtcaacatatgcatcatatgtgatgttttagcttcattttgaagcttctgagaggccgacgaagctaaatattgaggcataaaaatgtaaaaaaacgaaaaaaagcacaaaaaattggaaaaagagtttttatcaaattaacaaaaaaaaattaatattctctatttattgtttcattcctcgttttttggacgcctgaggcggtcatttgacacctatcaactgattaaaaaaaattattaagaaataatagattttaagagattgatctagatgaaagtttaccaatttctaggggttatttaaaaaaaatatttcaagacgattcttaggggtggttttttcgtatttattgctttttcattaagaaaattttcaaacaatactgaaaaaggcaccaaacgccaaaaaaggcaaacgaaaatcgcaaaaaaaaaaacgaaaaaagtaccaaacagttaaagctagaagcttcaaaccaaattgaactttaagatgaaaacatagaaatttgttagcaaaaaaaaaacttagcccccagcaacaatttttcctgctcaaatacaaaaatttattatggaatttaaaaaaatgaggctttttaaccctggatataaccgtacgtttttttgccgaaaaatgatgtcataggtaccggatttaccaagcaacctaatcacccttcttacgtacatcggtcaccatgattccaattgaattgaaattctttggtgaatgcgttgctgttggggtcaagatttatttgtttggtatagtcgtgaatgacctcagcaattggcagttcaatgatgttataaaaataaatttgtatttttttgaaattatttttaatgttttttttcatttaatataaattctcgatatggcgttatcccgccggaatacaaactttgatggatttcataaaacaataaaatttgactcttttaaagactaaagaaaatatgttattagggtaggcattttaaatggaaaatggcacttttgcgcgtccaataatcaatgacattcttagttacttaggccataacttttttcttacttgatcaaaacttagattaaagatagaaaattctatagaagtttttgtataacttaattttgtgctaaaggtttaacagataaaaaattattattgaatatactcaaaaaattgcttaattccgtgttttttcattgcaatttttcctagcatttgttattttcgtatatttctaaatcccagagactttaagctttcgttttgataccaagaatgtagcttttgaagcttttgatcaagtaagagaaaaaagttatggcctacgaaactaagtatgatcattgattggccgcgtaaatgttttattggacgcttaagctgcaggtagagaggagcccttaaaaatgttcagtcctatcacactgatctcgcaattaagtgtaatatttataataattatttattcatcattttattaccaaatttttccttgcatttgttcgaatcttcaccaacattggcgttctgcacagattgaccattcgatttttgctcaattctactggcaaattggaccattggtctgtgatgttgcccaacagctcaacacgcgtcccaaaacggtcaatgtcacactgaattctcaccctaaatacatcattttttaatataacctaatttatagagagagcactgattgtcgtgtcaggtgatttcgacagtgaattatttcgcttactctttgtgtctaattgtgatttcgacagtaaattgaattcgacaatgagtgatttcgacagtgaagttcggcgccgaccggttcggcgccgttgcaaataatttttctcattacccatcaaattaaatatatgttggtatcattcgagagctatataaaatttaaaaaattttcgtcagttaaaaaaaaagttatggccaaaaacctcaaaaatcaactttgagcttgttaccagatttgctatcgtgaactgacaaagaaaaaagttatagcatttctaatttgttggcgccgaaacggtccgcgccgaactgatctcgaccctattttaagggggggggggggagagagacatttaatttggatttttgttttgaattttttatgaaaaatggtgaaattcaaaaatttaaaaaattaaatggcttttgtatatgaaatgaaaattttcaacatttaagctcacttgtatgatttatctgagtacggtttcttcactgaaattttcagttgattgttagcaaaaacatttgtcgaacaaatgagtacaagtgtaaaaagaagaataatattcattgatctttattaaaattttgcataaatattaaaattattcattgttattttgattgcctaaagcaatatgtttcataatgttaatgactacctaaattcgtaattacctccccataaatgccacgaacacaaattgatttattttatggttttgtaaaaaaagccaatttcatacctatgtttacgtttgtgacaaataaattttaaacaaaaaaaaaataagtaaatatatttttattttattaaatcctctatagaattgaagaatgtttctcggcacaaatgtaattcatcagaaagtagttgatgttagtcaaaaaccatcaaatgcaaaaaaaaaaaattccatatatagagaccggatttctatattttttttctacggcttagttatggcgtgagaagcccacaatagcattttctccgaacaatttgatttagagcgacttaaaaaacatatgaaaaatacatattttggcgttttggcatatttgccaggaagtggaatttttagcacantattttagcatttt

SEQ ID NO: 17058 - DNA, 1934 bp, Heterodera glycines
acatttttgtagagcatttaaatgctatcgaatggtgtactaaatgatgtaaaattttcaaaaattttcgagctaggccccctagaaattttcaaaaatttttttggggtcgaaaaagggtgtgaaaaatatttttctggggtattttgaggtgttgagtacgaatatgatgtctattttaagtttcataatttttggaattttttaaaaattcgaaaatatttttaatttttttggtccttggaaatttgggttaaattttgaaaattcattgctcagttaaggtttggtcaatttaagtgaattaaagctctaaaaatagagaaaaatcaggagaattttatgggattaattgaaatttatatcttgaaatgaaaaaaagttattcaagaatttctggaaaaatccgaattttcagaaaaaaattcagaactcggttctgaaaagtcattctgtaaaagtaaaatactacaaaaatccgcaattttttgctctattaaataaaatttattttacatttttatcacctttttaaaataagatacaaaaataaaagtgattttggggttcgggaccaaaggggtgagcataggatttttgagtggaaaaatttttctcacaaaaatcttccaaaaatatgtctttaggggttatttgggccgctgatcacgaatacatgatcagattttacttctgacatcgttaagacctcagaatccctgtgtgattggggattctgagtcatcttctgggggggggggcgcaggttcgaatccgggcggtgtacattatttttctatgcatttttgggttatttttcagtgcgtttaatttatatttaaagatttgttatttttcaaaatatactcctatgaaatgaaaaaaaattttctcaaaaatttactttcttggcaaaaatttttaattttaaaaatttttttatgtaactattttgggttttttggtcttaaaaatcccagtcctactcatttgcaactgcaatcagtgaataaaaattatttttgctcaatttttggctgaaaattatgtcactattcgtcactattttggacttttttcactattttgtcactattttggcactttttcgtcactattttagttaactatttcgggatttttcgtcactaaaagttgctgccctaataataattatcttttaatatagaatttcatattttttttaaattgaatttataaaaattaatttcatattaatttaaatatcaaattcttgtacatttcaaaattctctttttaattaataaaaggaataattaattttattttttaaaatttataataaattgcattcaatttttgtacctcttctaatcactgttgtacctcttctcatcactgttgtacctcttctaatcagtttttaccccttctaataatgttgtacctcttctgatcagatttgtacctcttctaatcacttttgtacctcttctaatcacttttgtacctcttctcatcactgttgtacctcttctaatcagtttttaccccttctaataatgttgtacctcttctgatcagatttgtacctcttctaatcacttttgtacctcttctaatcactgttgtacctcttctcatcactgttgtacctcttctaatcttaaataaaataaatattattaattttcaagttgttttttattaataatttaaaattaaaatgcattcgatttttaatatttaataaaaaaaatttccttattattaaattttaaatcatgttgacctctttcacgttgttgtacctcttctaatcacttttgtacctcttctaatcaccgttgtacctcttttaatcacttttgtacgtcttttaatcactgttgtacttcttttaatcactgttgtacctcttttaatcacttttgacgtcttttaatcactgt

SEQ ID NO: 17059 - DNA, 2369 bp, Heterodera glycines
gttggccgcgttgcgcggcgtccccgtgcaattggtgcgaaagccgcgactggtgagaacggcacacattctgctgacattcacatttttgactatagccgacattttcttgaaattttaatcgcgtcaaagtcgagactctcggttttgccctaccaaaacttaaattcagtcgtttgtgttttcagatggtgatcaacgacagcgatgatgagaacagcggcgatgtgccgttgagtgacgaggcggcacaactgctccgacaggtccttccagggcaatgttcaaagttatgggactggcaaatcagtcctgtcgattgggatggcactttcggctgattagtttgatccgggagtcaatgaattgcgttttcccctcaggttgaactcggctacgctcaaaattcggcaacaaattgcgacaggagttcccaaaagcagcaaacaatggccgacgatcagtgctcaggcctaaaaggcacttaaaagctagagaaagccagcaaaaattcagtataaaagcaacagtgtgcgatatgtttttaatttcagaaatattctgatttggatggtccaaatctgacaaaaaaacattgataaatccgaatcctgtgtgagtttatgcataaaagacaatgcattcacatgtagcgatataatggaatatacaatggaatacagcagagaaatacatattatgctttacatatatcgtttcatcgcattgactgttttgttggcaccagcatcattcattccactcgtcctctgcttaagtctgcatgatggcacttccgttcttctgctgctggcgatgaatgacgacattggcacattccgtggcgacatctttgcgcaatttctgatcggctgcggcgactgaagcattcacgggccggtttttcagcaacgaattgttgaagaaaatctcgaagacgaacgtacacaccatgacgatgctgaacacctgaaagacagcaattgaaaaacgtagaatcaaatgggaaaagcacggcaaaactcaccaaagtgaccaacggcacatttgtgtcatccgcacggaagttgatgcaagaccaagaaggcgtccaatagagcagcaaacacgacgagaaccaagcagaggcactccagcagaagacagaatagaaggcagtgcaacagtcgtagaacttaaaaatgaaaaacaaattagtaacagacacaatggcaaattttgacaacacgcaacacgacaaaaactgatcacaatttgacaaaaaatcgctcggatttcgactgaaaagcaatttgatcgcgcaaaacaaaaatgatcacaaatttcaactgaaaagcaatttgatcgcgcaaaacaaaaatgatcacaaatttcaactgaaaatgatcgcgcaaaacaaaaatgatcacaatttgatcaaaaaatccatcgaattacaactgaaaagcaatttggtcgcgtaacagcaaaactgatcacaaatttcaactgaaaagcaatttgatcgcgcaaaagcaaaactgatcacaaatttcaactgaaaagcaatttgatcgcgcaaaacaaaaatgatcacaatttgatcaaaaaatccatcgaattacaactgaaaagcaatttggtcgcgtaacagcaaaactgatcacaaatttcaactgaaaagcaatttgatcgcgcaaaagcaaaactgatcacaaatttcaactgaaaagcaatttgatcgcgcaaaacaaaaatgatcacaatttgatcaaaaaatccatcgaattacaactgaaaagtaatttggtcgcgcaaaagctaaactgatcacaaatttcaactgaaaagcaatttgatcacgcaaaacaaaaatgatcacaatttgatcaaaaaatccatcgaattacaactgaaaagtaatttggtcgcgcaaaagcaaaactgatcacaaatttcaactgaaaagcaatttgatcgcgcaaaacaaaaatgatcacaatttgatcaaaaaatccatcgaattacaactgaaaagtaatttggtcgcgcaaaagctaaactgatcacaaatttcaactgaaaagcaatttgatcgcgcaaaacaaaaatgatcacaatttgatcaaaaaatccatcgaattacaactgaaaagcaatttggtcgcgcaaaagctaaactgatcacaaatttcaactgaaaagcaatttgatcgcgcaaaagcaaaactgatcacaaatttcaactgaaaagcaatttgatcgcgcaaaacaaaaatgatcacaatttgatcaaaaaatccatcgaattacaactgaaaagtaatttggtcgcgcaaaagcaaaactgatcacaaatttcaactgaaaagcaatttgatcgcgcaaaa

SEQ ID NO: 17060 - DNA, 1319 bp, Heterodera glycines
tgagggtaaagcgatgattgactttccaggccgtctgtttagagagcagcgccattaataaagtccacttggcccccaaatccttaaaagtattgaaaaacacaatcattttcttcattaaaaattagcgaaacaaaaagaaaaatagcgctaatttttttatcgacttacacccaaaatttcaagctatgagaccaagttgtggaaattttccccgccaagtaaaattttaaaaaatagaatgccaattaattccttacttcaccattaaaaattatagaaaattcattcttaattaataaaatccaattcgcagactagtgcggtgtcgtttcggcccagtccaagtcttttgtacctattgttggatttggccagcaaataaaaaagttagtccaaaacttgacatctcattacgattttacgggcactcccccaaaacatcgccgcaaaaacaaaaaaattttcgatttatgtaggctaattaatttaaaaaatattttttcttaaaattaaaaaaaattgcggcggcttttgtcttgcgcccgattttacgtattggtcctttcgtttggttctacctgaatagaaacaagtgccaattgtgtcggatgccacttggcccgtgaaatcgacttcgatagccgaattgatggctgtcattttgctttgttgcattatcgttgtcgttttattggtaaatccggcactcgcaaacactgaaaagcacaaattattattttaaattatttgtcacaacttacaaaacaatgggttgttgtccattagctcgtagaatttgtgagagcccatcgcaaaacaaacaacgactcgacccgggaacatgcttttcttgctgttgttgatcacgttccggtcgagcagttccataattccgtcgcttaccatttcactgtgtacgccttggatttgtttgttgtccttccattttaatttgtttcccctttctgctctttacccaagtctttgtgccctttcaattgttccaatacgttgttcgggattgatccgatgcccatctgaagggttgcgccgtcctcgaccaaattctccgctatcagtttgccaatttgcttctccgcttcggtcgagaccgcttttggcaactcataaatcggcgtttccgcgtcgacaagcgcgtcaatttgggaaatgtgaatttcggcgtctccgaaggtgcgcggctgcgttttgttgatggaagcaatgactcttttcgcgtttcgagcggcggcactgaagggaaacattttgccaaatttagtgaattgggcggcaaatgagtgacctggacatgt

SEQ ID NO: 17061 - DNA, 2099 bp, Heterodera glycines
  unsure (1)..(2099): unsure at all n locations
atcgtaaataagttacaatatancaaaggaagtacaaaacaatagacatcaaatgatgtgagaattgattagactcttagtttcttcagggacggctcttcggcagaagcgggtgaattgcttccgctggtgtccaatgattttccggttgagtccagggaattgtttagcatggacacgcgtggagaagccgccgcggcggagcagcgtcgttccgctcgtctaccccggtccaagtcctccttggaaagcctgcaatttgaagcaaaaccgtgacacatcaacaaaaaagaatttatatttggcactgccaaaaataatttttcaaataaaaggaccatttgatgagattcctttggcgcgtgtaagaggggtgaattctcatcgtttctttgaagtccttcagcacggacgcacttttgtaaacggtgtccgtaaatccctgcaactcttctgtgagatcaatttttttcgtaagttgcttgttcaggtccaatccgatgaaccacaaagtgcacacggggttccttaacaatgaatgaaaagttaaaacagagtgaatcatcattctttgtcagttcattttcattttttggattttgtaatgccacgcattttaagcgtgggtgggggagagataatttattagttcgtgagttgaataataataaattactcgtaatcgatgtcgagctccaatttgtatgcgggtttatactgccggggattgacatggcaaagattcacgcaggaattccgctcgaaggacgccaccaaatggcggattttggactcaaccaacccgcaaaaattcaggtggtcctcctcattttcggtgagacactacacggcaaaagaaactcgtacggtcggacaccacagcatcaatcagaataaaattgtgcataaagcaatgcgaagcatattcaatctctactctgtgcacatcatagagtaaaagagaagtggagaatgaagggagacagagagagaggggggggggggaattcgaggcttctctgccccccccccaatttaatgattcaaattgtgcctccccttccctacccatggcactgtgtcttttggactttgcttgtgtccctcccttaatgccttcgctttgcccaccttctttgaattcattggtcatcacttgtctcgttgaccttgtcacattaaatgtggaattctgttctgggaaggctggcgtaatgattggcatcaaatggtagcggtccgatgcgcgtgttctcggatcccaaatcatgtcaatgaaatagggtatgtcaatccgcggggtagcgtcgacatccttcagaatgacgggatgtggccaatccctgtgagtcagaaaaaaactactgcacttaaaatttgtatttgacaaattaatttttttttgccactgtagccaaaaaaaagtttcaaatttactaagaaacactcggagaagccgctgtatgttagctggggttcgtatgcccttcgtacccaccctttccccatggatactgtcccacgccggtcgaggcttcccaccgtttgccctttgtccataccatgcagaaaaaacgaggaaaaatttctgcaataaaacagaaggtgttgcatttggatacaattgacaggtccgggcgacgagaattgcccaagaaatgccgccaagaaagcccaacacattggaataaatgccatggtctgcgaaagaggcacagtgaatgaatggaaaatgtagaaaaaactgacttttagcccaaagcttaacggctctaagaaccaaaatgaaattcagtcgatttgggaccaatcgcaaaatttcatcggccacacgacaacctgaaaatagaagattgattcaaatggaaagaaatgatcatattcaaggaaaaaggaaatgaaaaagagcaccattcagagaacgaatgctcttctcgtccaagttcttaagcaaattgtcgtctgagagttcctggtcttcctttatttctttcaacgccaaacgagcgaataaaatgtcgagttcaatgccatcgtagcgcagtttgatcagaggtacgaaggcgtcctcaactttgtggaggtccgccgttttttca

SEQ ID NO: 17062 - DNA, 2882 bp, Heterodera glycines
  unsure (1)..(2882): unsure at all n locations
gctcaattgccgtgctatcttttgctggtgtccacgcagcacggtcacctcacccgcgtcatttgaagatgaaaattacaaaactatgncgaccatgcccaaaacatgcncatggtaatgcggtgacgggtatctcaattgttgtccgtcctaagctcattaaattatccacatctgtcagggcaatgttccatgtatccgggttggtgtacagccgattgatattcctctccagttcaacatgacatgcggtgtcccggttatagccgaaccaatgttgcgcaggtgaagtcttggaaatggtgcggaatgaacggtcaaaaaagtttggtgggtccacactcagctctacattaatccattcgccggaagatagatggagaacatggaaaaaaattacgataaaggcgatcagcaagaaataaaagaatgacgacatccttctgttctctcaatgaaagaaacaatgtggtaccttctccacttttagtcggccttttatacatggcgagccagtgtacgtacataccatttaactagccagtccgccatcccacgcgttttgcgcaacgtttcaactacgtcgcaaaacggggtgccggaacaacgactggccaagaaatagacacaaaaatggccgcaagcgtccgatgaagggaactgaatttgatgcatgtttacctgcacatgctgaaacttgttgagataggcggataaatcgggatttggtgccacacctaggctgtcaaagtattcaatttgcgttgcagatggcacgtaacaagccacccaatgctctccgcgtgtgccctccttgtctgtgtttacaaccatgcagtgggggtagcgccgcattcgtttctgcctctcaagaacaggcggtattttgtttgatgcgtaaacgccgatgaacttgccgcttgtaacacgcagcctccttagtagcacatctatttgtgctgaattcatctctctttttcccactgtttaaacacttccgtccgtgctcaacactcggtcagcgttgatggaaaggacagaatcgaactcgccaaggatcaacatttcgtaaccgtcctcttttataggcttttcaaattggaccttaagcgtacacgtgccctgacggatcaactcaaagccgggcgtatcatccagcgtggaggtcatcgggattacgaagaaggcccatccgctgaggaagcgttgcatcccaatggacaccgtttttgtgtctgaatcatccagaccaagaccggcgtacatgtcgacaaaagcgcgcacaaaacgttgctgtgcaccgtcaaacgacagcaggtatggggtgctgggaaaagattgaccgttggcctccgcacttatcgctcgaacattagcgtgttcaaatttgaagggcgataactttcgatcgccagaataagcgtctgtagagacaaagcagcaaatcagacgacggggcaaggttgaagtgaacacgttgtgagccaactcagtcctgcctttgcccagaaaaatggagcgcatctcaatcttacgcagcgggtatttggctgaggttgactccaactgacggctgattgccaggttaaggctaggcgtaacgtctacggtacgaacatacagacgcaaatcgtgcacgcgaatacggtattccttgctgttttcctgcaatgttccgtctgctttctttccggggggcgtaagcaggaggaaagaatcactgttacgatgaatggtgaatatcacgtcctggttgttcaacatcaatgcactctgatgtgcaagatcaaagttcagcctcaccatcgtttcgcattgctttccgttagagaatcgcgctgcacgggcgatgaagccctcattggtggcactatcttggcaatcatcctcatcggtataatagcacgctgcctcatggaaagtcttacgaatttcatgggagtagcccagttccttcattatgtagtcccggtaatggtaataaatggagctgtcgaacacttctataccggaaatgttaattttcagtgagcggacaaagctgctgccaaagttttgggttacaccaacgcgcttatcctccggctccgcatcactggtcggaacccattcacctgcggcatttttgcgctcaatagagctgagcaaatacatgtatgttttgctcaagtcgcagtactgactgtccgagaacaaacggaacagatacgggccggtctgattaagtgccgacaagggcaacaattcgcggacattggtcctatttatcgccactttcgttggcggaagagaaaacagtgaaaggctaccctcaaggccttcaacactgtctttgtgaattttctttattacgctcattattgttagttttatgccactgaatttattaagtgaacgtcaagtagacagaacatccatttacgtgcctatttatagattttcatgtgtgtgtgtgccctttgacaggcgcgctaccgtctattttaaggcgcaaatgtgagttggtctatagcctgtcttttgttgcctctcaacgaatgcattggcaatggcaccttcacctttttcaccggtctcttcctcttccttgtaggggctcccttcccgcactgcttcaatttttcagccaggttttccatcccatgttttgcgtgtgcctgaatggattccttgagggcctttccctgcgaaagatcctccataatccggcttccggcagtcactccctcgcgtgacacagccttcagcatattggaagcgaccggcatcaggaagcgggcaacatttctcaatagaccagcaccacgctgatgaggtgtaccaacaaaatagtgcatttctccccctcccataaagtaaacaagaagaggtccccagttaat

SEQ ID NO: 17063 - DNA, 2394 bp, Heterodera glycines
tattgtaagggtgaaactcttcaataaagacaaatcttggaaatttaaggacagacagatcatagaaataaggacaaatgcgatcgatctctctggcccttttccaggacgctcgagcccaaatcaatgaacgaggcattggcgcaggaccgtccgaagaagtgaccccatggcgcagcatgaagggcacatttctcaggatggtcaatgcgaataaattcaagagaaaacagttggatttgtatcgcaaaatgatgaactcatgcgtggacggattggtggaaaaatcggagtgagtgggaaaattgggaaaatttccccgttttttttttcttgattccaccctaatttccggcatagaaatcatttattcttttaattttaaaatatttcctaattagaattcgaccagacagaaagttggtaatgcaaatcggtccaagagatttgaaggaatttgatgatttactcaaaaatggaagaccatttatcaagcgaattgtttttaaagcagattatggaattgatgtgtattttttcatacatttaattgaggtgaattttttttgtcaaatttttgaaaatttaataattttttacaatttttgggcatattctgccgactttaatttaaaaagttcgactttattcattagaaaataaaatctaaatttttttcaaaaaggtttataaaaaaaatttaattttttttgtgtacataaaaacgctgcgccaggaatctatataaaaagtgacttttttcatttttttttgttttttaattttttactttttggaatttttttgaaagaatttattaataaaaaaaaattctttcggtagcaaattaaatttttcgtgagatgattttaagccttaggcacaaaaatgctagaattttcttacataaaatttcaacccttccctatttttaattactgttcaatttgccgacttaattcaattaatttgactgaattggcataatgccatcaatttttggcaattatttcattttgcccaaatgttaaggcccttttgaatcccttcacaagcgcaaacacaattgttgaagacattggcatcagcacaccgatcattggcatttgggaccgagacattttggtggaaacattaaacgagaaatattttgacgaaatgacttacaacccgggcgaaataccgcattgggaggtacggtattacagtcagtatgaattactgtagatttagattaggtcaaggaggatggttagacacctaagtttacgaaggggctcaagacttgtaaatcaaaagataattatgcagaaattaagaattttgggggtccgtttggtgccgaaagataaattaggtactcagttgtacgttttttcagtaccagtcccggtcccgtacaactctaatttagagccaattttttttcattaagctaatatgattttgtggtccttcctacgtgccaaaaggagccgccggaaaattttgcagcttttacatccattttaatctctgctttcaccaaaaaatgaaattgttaagaaaataagcaaaaattttcagaattttcctcttttgcccttcactacgaccccccccccaaaaaaaaacggtatgatttgttgacatattatgacatgttgtcttaagtgatcttggctttcgacaaatactgactcggaattacagtatgatggggggatgagtgattgagattttggacaaaaatcacactgtgctgtacagtttatttcggggttgaaaaataaaattttctgttgctttaccgtagggttaagccccgaccccgagctccccggtccccgaccccgatccccgacatttttgggcctattcccccttccagctgttgcgtggacggattcattatcggaaatttgagcagcgaaagagtcgtgccgggccaaattgaagtggtcctaaagaggggaaggtaaaggtgacgacaaatgaaaacaaagaaaccgacactctctccaccaaatccatggccctcactttgcacaaatcggactgaaggaaggcgttgaaaagtgtactaaaattattcgattacaatctgtttaattgcatgtgttttcctttgcttacgattttcccgcatttgtcgacccgaccacgtaaatgtcacttcgaattgagccccgcggactgacccatttttgataaatattctgaaaataggcatttattttgggcgtataaaaaagatttatgccgtgatcagatcctcaacgccaaatcccgttttagcactcaacagcaagtatttgagaatgttgaattgctgtgcgactccgggctttgtgcatggccgccttgagagagggcgagaaaatggcgcaaataaacccttgtggaagtcggggg

SEQ ID NO: 17064 - DNA, 624 bp, Heterodera glycines
ggtgcaacataggtcgtttcgtaaaaactgccaattttactgatttttcgagaaaaagccgtcataacttttcttaaacacaaccaaattaaaaaatcttgatatcatgcaatagctcttggcttgttctattagcctaaaaagtttcagaaaatttcattgagtttccagaaagttctgacccaaaatattaaaaattatgacggatttttctcgaaaaatctgtaaatttggcagtttttacggtgctgtgtcgaagtgtcaaaagtatcgatgatgggtgatcgagagaggcgggtcatttcaggatagaaaattaatttaaataattaaattaattaattcatttataattgaataacaatcttttaataataaatatatttggctctattttagtatacacgacccttcaaaaaaaacgagaccatcaaataatttgacaaatttaatgcaacccaactttttttacaagcatctaaattaagcatccatggtatcatttgatagccctaagcatcctctattttcctgtaaaatttcaaaagatttggttgagcttcaaagaagttggatcttgtaaatttcaaaaattggttccttaaatatttttggctacaactt

SEQ ID NO: 17065 - DNA, 2361 bp, Heterodera glycines
  unsure (1)..(2361): unsure at all n locations
agaccgagaccgaaaaccncgagatccaaaaaaacccgagacttttctcgagtcgagactcgagaccgagactctcgagcatcactagttgttatgatcgtgctgataaagagaaatggggcgacggggatactgtaggagcagccaccgtaaaatggggcgaaattggccgacaaagctgtggtggtgcaagcaaattgctgaacaatttacagaccaacgaagaaaccatggccaacggcatcgacaagaagggctcggcggcattcaaattggatggacacaaatgccaacagcgacaaaagcagaaatagtgggagcaacagcaacattcaaccaatccgtgagtgcaaaatggataatttatagctgttcaaattggcaatggaagccggtttattttcaagttttataaaaatggattttaaaaaaataaatatcgtatgcgtgaaaaattttgaaaaaattttgcagactgccggtagtcctttagccaaaatattaccctgctaagtcatgtcattatgaatgacaacattgaacaaagttaaaaaatcatcttgttcaaaccattaaatttttgtacataaaaacttcagctaatattaattaattattaatgctaaatttattttatttttttacgaaatcttgaaattttaaaacatggtcaaatccggaaaaatttggtatcattcaaccatttttaggcaaatgcctaaaatttgatacgtttaggataagcaatggaaaaacgcgtttttagcttggtttgaggcttctacgaatgacttttataatgcatatttttgtcaatttctggatttttattacttttgagtctatgccctccgattaatatttccgttattcctattaataacccttacttacattgtaaaaatttctttttaaggtcctccaaggcattctgatcgaattattggaatttcgaatcttgacaagatgcagcatctttggacgtcaaggtcagctttaagccgtttgctaattgttcgaatttatcatttttattacagttccccaaatttggacaataaacaccgcgaagaattggcaccgcctcatcaatgttggactccttttggcattcaaaaggtcgaaatcccgtcacaaattgacctttcaacaaattaccaccacgattcttcgctcaatttgaggtataatttttatagcgaaaaaattattattattaattacttatttcatttaaaaaatgaaaaaaattattttatttcatttaaaaaatgaataaagtgagcaaagggatcgcattgacacacttacaaatgcgaaccatcgagaagagaaagatgaggaggaagagctggtcaatttgtacagaaaatttcatctgaacgaaacgaaaacggtggaaaaagcaaagtaattaatgaataattatttttgtatatttttaaaacactttcgattattgattgatcttgttaattaggcactctactattaatgaggatgatgatgatgctgacaatgataatgatgtcggaggattcaatgagtttgttggcccgacatgggctcagatggtcaggcgaaaggtaaagcgcaaatgttttgactgtgctttcattcatttgttttgccattgatcagggctcgcaagtgtccttatttctaagatttgtccttattttcaggcttcccctaaactttttaaattttttctttttaatgatttatttcgctgatttttgagaaaaaaaatccttaaatgaatctttttaagtaaaaatttacataaaaatgttaccaaaacttccaattttcaaaaaaaagaggtgggggggggtcatatcgaagggtaaaagagagaaatttctgaaaaataaatttagctgatttcttaacaaaaacgttaaaaattctttaaaaaatttttcccgcggcgcctatcggcaccgccggacccaaaaaatttctcttaaaaattagcccaaaagtgccaatttatattgctcatttgacccccttttcagtcctatttgcgccaaaagtcccattcatcgccagcaatcaacagaaattgttcgacaaaatcggttgccggcggcaatttgtgaagaatttttggcaaaaaatcgcgcccaatgtccaattgatttgattcatttgttacaaagtgtttatgttgagaaaatgtgtaagaaaatgccaagatactggtcatgtttaattgtaatattattccatgttatatgtttnttttatgtatgttgttagatncggacttttattgtatacatatacataattttacgcatattcccatttttcgaaatggttaaatatttgttangaaagcatcgaaatttt

SEQ ID NO: 17066 - DNA, 3373 bp, Heterodera glycines
  unsure (1)..(3373): unsure at all n locations
tttttgaagaatagcgcacttgtcagcgcctcattcccttttagttcgggaagtcgatcgagaatgagcacgtactccaaaatgctgatcgggggttgtgcncctcctgctggatcggccataacatgtcccgaagttccatacccanaatttgggttcgcattttcataacgcgcgggttggtttctcacgaacaaatttcccgggttttgttgacggtaagcgcgttcttcaaattgcgcataattttgttgatgcgttagccgcggttgataatcggcgttttggcgttgctgcacattcattggccgacgcgccggtgcgaaatgaatttgccctcgctgttcgaggtgttcggcaacaacatttggatgcgccgcaaaattttcttccgcaaagaaatgctgttgaaatgccagttgacgatttatcgccaaattctcttcttgctgacgaatacgtgccgccgcaacatttggggtcgaggtaagatgagggttgaactcccaattatctaccagatccaaatgggcgattcgctggtccaaatttatccccaaattttgttgctggatgtttcgaccattttctcgacccaaattttgttcttgggagttttcgtgaaacaccgaattaccatggctgtccaggagagcactttcatccaattcgcctcgattttgcgcgtccattccgtttcgtggtctcggaatttccaaaagtcgctgatgaattgcttcgggtcctaaaacagacgaaactgatgaaactcgactttggcgatgttggttttcgcgcaatggagcattttcaacgacgaagtgctgttgctgaactcgctgttctccttgcgtatctcctatgccttcatttcgcacttgtatgccaaggtttagcgccctttgtcgcgttaacggcgggcttcgcattaccggcaccattggtgtgtgagaatttgttttctcgttttatggttcaaagctttttgacttagttgtctgcttttccttcactttcgtagggatttgtttccccgtttttgcaaattttcaattcacacgatttcggcgagtggtgataagatgaaaaggatttgtttcctttttaacaaattcggcgatttctcttccactgtctttacgggatttgtttccctcttaaacaaattcggagattctttcttccacgtttgactttagggatttgtttccccgctttacattcaagcactcgtaggatttgtttcccgtttttttttgttgctccttttcgcgctttacaaatttcgaaattgccgttgatctcacctcttttagcaggagcgccacgtcgtacaaagtggagcacgttgtagtccacacaaaacaattaggaacggggaattgtatcccaaaatccaaacacaatccaaacaaaaatccttttacaatcaaaagtccaaacagcgaagaaaattcacaaacatttaaaattaaccaaaaacgagcgaatatccaatctgaatgcaagtgaccaggaaaaaaaaagtcggcagcggaaaacaatcgataatgaaaaggcgggagattcaaaattgagaacgaacggacaaaaataaatgagagggaaatacaattaattaattaagtcaaaaattgggaataaaagaaattaacaatcttatcacagccaaaagggttggaggctcactcattaaagtttggccttgtattcaactgaaacccaaggattatcattttattccaattggttctgagtcaagttgttttgaatttatacctatatcttttaaaactcaagctggtgaagaagcaggttttttaaatccccagacaatgaacattgtacctttttcacgtaaaactaactgttttgaaaatagagaaatagcatttcagcttgacaatgaggtactgatgattgaccaaatatcagcacgcttatcaaagttaaatgtactgagggacgacaatttggaatggaatataaaccctattccacaaatcccaaatcatgcatttcatcatttagttatgtttaatgtcacagatatcaactttcatgcttttattcataatttagtcaaagtaagtgacataacttaccaaattcatcaacatgatactaaattatcttctgctttttccaatacttggcaaaaaacgagggatgaattacagaaggaaatttttggagattggtcttatatttggaaagtaataatcactattatttctttgatttcattgatcgatgttttgttaagatttggaatttttgcactacagatatatctgggaaatggtcgtttaggatcacttcttttaggaaaccaaacaactaggacagctcaaaatataattcaatcattgcctcaatcatccaattcacaaccctcccaatctcccattgaatcttttgacattaaatttgttcaagttaataaaattccatccccttcaaagcaaatgaactctcctcagagagacagcaaaagtgaaactatttgtgaatcactatttatgcttcgttcttatgctgaatttaaagaatttggatttattcctgcaaatttagaccttccgattttcctaattaagattaatggtgttgaatttagagctttagttgacagtgcttctgaaacctcagttggctcagatcgaattctttatttagcaagtgtacccaaaagtgcacaaagggaagttaatatccgattcagatcgcttggaatgaacccactcgaagtttcgggtgattcattagttggaaaaatagttgcatgggctcatttagcaaaaggtgaagatattttaggagaagctcctttattgtttactgatcattcggtttttgaaaacgaatgttttgatttaataattggtgccaatttaatcgatcgttttggtggagtcacaatccttccaaaagaacgaaaaattatttttggttgcactctcataaataatgttagggcgatatctcccatttctcaagtaaatgaaatttcagtagcagaaagtgaacaaagtgtcaaaaaaacggataccaacttcggaacggttcaaaagaaaggggcgttttaagcctcactcccaatccaattcaattgatgaagaaagtggaccaatcacctcgctttgaaaagatttctgttaattttcttggctcaatttcacctaattgctcaattattacatcacgaattaataatggtgaaaacccaagtctggttgatactggagctagcattagtgtagcgccaaaattgatggctcctatttggcaatgcataccatatccaacatttgtcaatgttataagtgcctcgggtcaacacttgaacttatgaaaaagttctgttgttttt

SEQ ID NO: 17067 - DNA, 2173 bp, Heterodera glycines
atagaataaaaatttgtcaagtcaaattcccacattaaaattaataattggttaatttgaagtgtgattcatccatcgttttgctgcccttcgctctcgaatttcaaatttttttttgtgatcacagaatgccaatatcttctcattcattcgctcttcactgcttctccgttctgctgtttcatttgcttttccttttggaattttttgccccctccggcgatgtacgaatggtagaaaaagttgccaaacaaaaccacgtagctgatctccatcagcaagcagtacacataggtcatcggtgctttaattgtgccaaaattaagtgtttttttttcatttctaatcgactgtttttatagtaagaaatttaacgaaaaattcgatgtttgattttaaatttttggaatttggattattaaattaaaatccttttcgtttgttccaatttttgatgaaccaaaaaaaggaaactcactggtgtccacgtgggacccgaccaacagtcgcacaccgacgtgggcaaggatggccaaagtgatcagaaactgggtgatctgagaggtggtcaaacactgggcgaaccaagcgggcagacggatgcggcaggcggccaaaaagtaataggtgtacatgacggcgtgcacactgaagttcagccacacaatccatgtgttgaacgcggtgttgtccacgtaggacatcagaccgtagttgagcgtggccacgtggtggtaccaatgctaaacggggggacaaacgacactcatgtgcggatcagtgggttgatcgttatatcatgtgatagcaagacgtaccaggaacatcaggggcttcttgcgcaggacgatgaagtaagtgtcgcccaactcggcaaatttcgacatgcagaaccaccaggtccacaagccggtgaatccctcgaagaagtcgcgacagttcgtgtacgagctgaccagcccgtaggtgccaatctctctgagcagcgcgtagctggtcaccagacagccggcaatgctaaaagtgaaaattggaaatccttttaaaatttcttaattaaaaaaaatcaaattcaatgaatggaataaaattaaattactcaaaaaaatctaatttctaaggatagaaaagggaaattataataaaataatttgtctcaattagtgcaacttaatcaaaaattaatttaaatgctttaaattgatttattaaaaaataataaatatttgaaaaggcaattctggcacacctaaacatggccaaccaaaggttccacagtctgaggctcagcgtcagttgcatcggtttgcggtccttcatgtaccattgaatgccaaagattgtcaccacatatgccgtggtgatccaaatcgcctgcaaagggaaggaaagcaattagccaaataaaaacaaaaatggttaaaattattctcgggcattggtacttttattctgacaattttttgtgcatttatacatttaacaaatttgttcaaatatatttgttcgcaatttaatgcatttattttagatttaaatttttatatattttattttaatatttattttattccccattttattgcttaccggtccttgggtgtaagcggtgtattctcgagcagccgcatagtcaaacggagaagcgagagaaacgccgaggaaagtgttcggggtggacaattctgctgccgaagtggaagccatttgaactcttgcttaattatctctcattagtgatgctaattaacaattgaaatgacccaggggcaacgccaaaaaattttttttttttgatttatggttcaaattaaaattatgctttctattggcagtctctagaaaagattggcatttcattatccaaatgggcacaattgccaatctcaatcttgagaataacacaaacactaaacgattagcgagtgattggtttagttcaataatttattagcagcgaattttatatggacaaaatttgacagcaaaaatggtcaaatcagtgaactaacaaagcatcagcatatcaaaaaggtgggaagaacaactggtgataaatgtgaatgaaatggtgataaaatgatatgataataaacggggaaaaattaaaaaaaagaaaaaaaaatacaaattaaaagagaaaaaggaggagagagaagaagaatcttatcat

SEQ ID NO: 17068 - DNA, 1733 bp, Heterodera glycines
ttcatcaatctccaaataatcaagaagccatcttttattccgcaaatggtcgttgacgagtttccaaaattgcaaatttattttggcaatttttacaaatgcggtagggcctttatgatcgcacatttttactacttcttggcaaagctcaatgggcctaaatattttattatttttaaaaataaaggtaaattattttaataattattacatttttttctttggttgttgctgatcggccattgtccaacaatttaatttaacaaattaatgaattactgcttcagataggacacactaacctaaaaaaaccgaatagattagatgaattatcaaaatgggagaattaaatgttttagaagttcgcaattataaaaaacggataaaaagaattatttataaaaaagatttgttctggtatattttaaattcaaatttgatgccatttgttcatctcctttctggggtcataattttgccgtttttcaaattataaattttattccatttgttcttttttaggtcataattttgccgttttttaaattcaaatttattcagtttattaatcaaatattattccgtttataattttgccgtttttcacctcttttatggcgtcataattttgccgttaatttattggcgttgacaaaaaaacgaataaaaactaactagatttattctctgccatttttaaattttcctattctatttaatatgtatacctatctattttttcttactttttggttcggtttgtctgagctgatttccatgtccgcatattataatttggctctttttcctgttttataatatgaagattttcaaaaaaaattcactattataataccataaaggaatgggagttagaaattttcaagaaaatagattagagctggaaagaccagtatcgggaccggccaagccggggaatctccgacatcccggtttttgatttatttttttctccatttttgcatatattttcaaaagaggctttgaggctttttgtggttttttgagaaattttgatgatttttgaggcttttggggaaaatcgtcagaatttgttaaatttcatgcttaatttttataaattggcataatgtttggcaatcacttaataatttgggtttttaaagagcatcaaaacgaaaatctcacccacatttttttccagagaaaaagccgttggctttgttttcaatatttttctaaaacccgattctgacatccattttcgcatatttggcaaggaaggatagaataggatttagttaccgtatttcttcgattataagccccggggcttctattgttcaacccccctccaaagggggcttatattcgagggggggggcttttattgttcaacccctttcccttataaattctcaaaattttttgctttttgcataatggtacaatttaaatcttaatctgaaatttttgaattgaaaagatttttcattttttggcccttggaaatttaggcgaatgtttgaaaattcataattcacttctaaatgaatcaattaaagtgcaaaaaagcattaaaaatagagaaaaatctggagcattttatacttttttagaattttctatcttcaaactgaagaagttattacataaatttggaaaaattcgttttttgagaaaaaaaaattaatagcgctgttctgaaaaggtttttgaaaaacacgaaattcttcctctataagcttctg

SEQ ID NO: 17069 - DNA, 1333 bp, Heterodera glycines
agactttgtgccttcgaatgataccaaaaagataggtttagctcgaacctaaacaaagttattgtataaaaacccgggattgtcaattgattggactcataaaatacttttggactcataaaagtcgattggactcataaactgcattagagcctaatttttccaaatgtcaacaaaaatgccaacaaaaagccaatttaaaaaaatttccattttttttgcgccgctccctttgaaatgcaccgccaaaaatcagtccaccacaaattcacaagacattttttgtgcatgtgttatgatgttacaacaacaacaacaatcattggtctcctcaaaaatgatggacactctctctgtttttcttctgttgttcggcgatgttttttggtcgccgttctttacacttttaaaaaaaatgtttgaaaatgtaatttttatttatttttccccatattttttgaaggtcgtcgtcatccatcaaaaaatcatattctctgatcagtcgctcattgaaaacacctctctccacatcttctcagatcatagtaattgctgctgctgcttgtcccgtgcattttgccgaaatttgcgcaatttttttttcgctgtgtgtgaactgttggcgttgtgttggttgcacgccacgcgcgcggatttgatggatgaacgaagggattggggcggggcgggggggggaaagagcacagagaataaaatactctgctgattgactgactgatcaaagatggatgaattttggatttgattgatcaactactcattcattcacttatcactatcactactcttcttaactgtgacaaaaagagggggagattgaagattgatcagaaagctttaaagaaaaaaacaaaaataaattaaataaaataattaatcaaaaatgatggatttgtaaagaacagcagcagagccagggatcaaaggcaatgaatgcggcgactcaattcattttttaaaaattgttttgttttttaatattgcaatttttaataattatttttttttaaaataatgacccgcttttgaaggggttcatcgagatcgggatttgagaatatctcatcctgactcagattaattagtcagaaaggcttttgaagtattcagctccgttaatcagtttatttagcataatggaaccaaaattatcacgatttttgggctattttttggtgcacattttaattgcccaattaacgctcctaaaaatttatggggtctgccaaattttgagattaggtcgtttcccccatcttattttagaagccttctttaaatttgcttacaaaataaaacaattaattataat

SEQ ID NO: 17070 - DNA, 1600 bp, Heterodera glycines
gtccgtgttcaggtcccggtcccgctcaactctagtcaaaactgctttcatagttgttacaaattgaatccagtttgatttcattcacaatggtccaaagaattctccattttttttgttcgcaaaatttttcgaaaaatttcattgctttcaaaaaagttaagccaaaaaatgcgcaaaaaaaaattgcttttacgcccaacatttttgggcttaattttttgaatcttaacaaaaaaaaattttcggaattttacaagattaaagcacttagtgctatcgaatgacgccaatttattaaattcggacaacggcaaagaaattttatcccaaaaatcgagccctccagttactataaaaatggcaataaaaaaggtacacactttcttcattcctcccaagaaaatttttaaaaaattgccaaaacctaagaatttttatgttatatatttaaaaaatataaatgttcgaacaattcgaaattcgggtcgctcgtcgcgttggaagcgcgtgcactgctcgaagacgtggcgcaactgtttgggcgtgtcggtgcgcaagtcggcgatgctcggcctcagccgtccactgccgaccatccagaggatctgttgttgttgtgtttattgttatggttttgataaagtaccattttgggcgccaaaatcaatggcacagttcgtacaaaacggaatttcgtacaaaaaattatttttttttttgaaatttcaagtgaatttttttttgttagaaaattggaaaataataaaaaaaattatataaaattaacttgtacaaattccattgtataaacgaagtggcatgaaattgccaatttcagtcataaaattaatccaatatatttcccaattgaaatttagagagaattttccgagaaaaattcaaaaaaaaaaacaatattaaaaaattatttaagcaacttgttattaaaggcaaaatcattttatgaaacaaataaatgcaatttttgaatcgaatttcaaagaaaaaaataatttctttaaagggaaaattcaaaggcctgaaaattaattcactgaaaaattaaaaaaatgaaattttcgaaaaaatatttgtttttttggcacacctggtcccgattcttgatttcctcgtatggcaatctggaggtgagcagttcgtacacgcatatgccgaaggagtacacgtcggaccgggtgctgtacggctcggggccgtccatgcgaatcacttcaggggcctggaaaaaacggtcaatcaatggcaatttggacacatttttttaaattttacaaataaaacctcgaattttttttcctaaaaaatattcaacaatttttttgcctgaaaattgaacaaaaaaaattttttttttttgctaattttcaagtttttataatagcaatattctatttcgcaagtgccctatctaacaataagtaaaacatagtgccaactttatgccagtaaatttttatgactaatttaaaaaaaattaccccgttttggcatttttcttacaattcggtaaattttaggcatagcaaaaaaatgttttctcagtgtataaacgacattttttttttgttgctttttt

SEQ ID NO: 17071 - DNA, 2118 bp, Heterodera glycines
ttattatgcaattcttcggtggaataaactttacggctctatgtgacccaacaaccacctgctgctgctgccgtagtgcctctggtcatccgcaaatcaattaatatgggcgggcaattaattgcatcactaattcatttatttcatttaacaataatacataaattaataattatgccgtttagtagttttctcattaattagaaaatattacatttattcataattatttaatgattccatttaaaaaagaattactcaaaaatggcacccaaaaaattcatgccaatggagttaatcgtggaaattgtcactttcctccaatttcgtcggcgatgggccaatgttcgcgtgtcgagagcatttgatcactttctgcttgaacaaattggcttctttttgaccaaaacgaactcatcggtctgtgacaccaagcaatatcattcttgaatttatatatttttttaatattttgccattaacccgttggatttgactaacaaaattttacagaattctcggaaataactgtaaaaaataaataaataaggtgcaatttacaaaatgtattaagaaaaaaaaaatttgttttttaaattaagattttttgaattttaaagcctcattaatcccctttccttgcgcttacactataaaattttaaattagggcttaacatttaataataaatttcaggccaagcaatgcttaacagagtttggacaaatggtcaacaatttaccatcaaaacacaagagaaatgtttttaatgaaagcgcgcgtgaattaggtgtaaaattattgtttggaagtgagttttattactaacagttttattgtatttttgaggaattcctccccgactttgctcatatttacataatattgaaataaattatttttgaatttgtactgcagagctttacaggaaatttttagctccattcagcattaatcagcttacaaattaaagaactttgctagtacgactcagctgaaaaaaatgcacaaatttcttaaaaattatgaaaattttaatgcaaaatgttcttttaaaaatggaaattggtttaagaaataattaacaaacaaattcaattcgaattttcttatttcatatattaaaaaataaaaatttgctgcccaatttttttgcccaccattctcagcagaacaactgtctattcctggacaattttgaactttttttttacaaatttttcggggttctgaaatggttatggttgccggaggcctgaaaaaaaattgtgtaccaggcccccgaacctgctagagctctattagatatcatatggttcatccagaaatggattccatacattggacaaaaaattgaatggaggccggacaagaccaatacggtattagaatttaatgaattattattattattatattattgttttaattctaaaatttagatgcaatttttgaatgcaaattaagaattattaaaataataaatttaaatattttttggaaattgtcgaaaagccaaaaagagttttatcagcattatttaaaatatttattaaaaataaatatataattcttaaatttaggacgacatttatctagcaacagctgaacaaattgtacaacttttgatgaccaattatgagggaaaaactgccgaattgatgactcatcatattcaagtaaaaaatgaaattgaacttgcagaaatttgaagacaaatatggccaaaataattccaattaatttttaatttaaaaaaagaaaaaaaaaattttttttcctggtttttgggccttagtttaatttaaattcttttggaaaattttccgaagaatttgttgaattgtattaacaattttttgaataaattttgtcattttacactctaaattttaggctttttagagcctattatccattttgtttttattgcctaatttggcgctttttagagccaaaataatcccgacataatgatgtataatattttaaaactttattttcagcattggtcggaacagattgccaagctcagtactaccgtatggattacttaatttacatatttaaataattaactaaacgactgaaaatttgaataggatgacatgctaattg

SEQ ID NO: 17072 - DNA, 1396 bp, Heterodera glycines
gtgcacattattggtccataatgaaagcacaccacctctgcacattgcatcagctttccatcagtgataaaatgaatctaaaacaaattatttttaccaatttcatttttcagttttatattgtttcaaaaacaaatttgccgtatgattgaggaagaaaaaaattatgttcctttccaacaattctacaaaaggtattcaaaaatatatattcattttgtagaaaataaaaggactctcacccggtgggagttgaacccatggcacttcataccgtggaaagccataacccactgagctacgggtgtgcttttttcacagatttatccatttttgtatcaaattttttcccacactttttgaccatttaagctaataccatcttagacgaaatgcatcgactaaacaaaatgcgtttaacgaaattggatcaatgaattgaagccctttttaacatataattaaagcattcatcttatttaaaattgttactcaacattttgctattttttcatcaattcaaatcaatgaaacgataaatgcacttaatccacctcgagaatcaatctcattaattaggcatgcattttttgctctccgatccgccctgtggcaaaaggaaaagcgagagaacgcaaagaaagttcgcctcggggaggaaaagcgacagcgcactgctgaagaacacggaaacgcaccagagaagcaaagatggagtgtgtgcagagtgaagtgaaaggggaaaagcgagacagtgcggcagcagcatcagacactaagcaaaacgccttggggcacgaagaaaagcgactgatagagaaaaacaaaagcgagagatggagaataaagagggggagagagatggaaaataaaaagagagatagagagaagtagagcagagagagagagatcgagaatagagagagagagaatagagagagagagatagatggagaatagagagagagagatggagaataaagcgagagagatggagaatagagagagagacttttctgtggtgaacatttcgccacagttctgccacaggcataaaaaagagttggcggcggttacggttggcactttgccaaaccaaatgaattcctacaaatggttaattatattaattaggtctgtattttgaggcatatgtttttttgaattttcgtgtaaagaatagccggaactcgcgccgaacggcggcgccgaaacggccctctcccgtctcggcatgtgtaccagggatgggccaaattgaaaaataaaaagcgaaatgcgaaaagcgaaatttgcgaaactgaaaaatgcgaaatgaaaaaaaaagcgaaatgcgaaaagccaaaatatgcgtaaaagaaaaaaagcgaaatgcgaaaagccaaaatatgcgaaa

SEQ ID NO: 17073 - DNA, 2594 bp, Heterodera glycines
tctgagccagttactatgaaaattacttgcgtgaccatgcccagtggagaggggccgaggaatgtccacaaatttgactttggattcaaggaacaccagcggataaggtaagatttttccaattaataaaaataaaataaaaaatagaaaaaatcaaataaaaatcaaaaaaataaataaacaaagaaatttaaaataattatttctaaaaaatttaatgaagcaaaaaaaaaattttttttttttaaagaataaaatgaaaaaataataatttaatgaaacaaaaaaaaacaataaaattaaaaataaagaaagtaaaaaataaatttaaaataattatttaaaaaaaaaattaatgaaacaaacaaaacagaaaaaactaaaaaaataaagaaatttaaaataaaatgagtttaaaatatttatttttaaataatttaattaggcaaaaaaaaaataaagtaaattttaggattgtgaatactgataaattttgccttttttacgcactggcatcgtcgatgaattatttaattatggaccgttttgaatttaatcgatttatgaaaaatattgtgagacagagggatgcagctattgagcttttacgtaattgtggaattgatggaaacgaaattagttatggtgtggagcaattgccgaatgttcagaaatattgggtgggttaaatgaaaaaatgcaaaattaataaatttttcaggatgagatttaccccggaaagtaccgggttgtggcatttgagaagtcagctgatccgcggaaatcgatccgtgttttgtggaaggcccctatgggacgagagaaggtcgtaccgatatttttggagaatggtcactgggatggtctgaagaattatgtctgctttttcaaccgtgggaggaagttctgcgttgaatgtgaatgtttttacgatcaggatgtttatcatacgatggattgccgggcgagatgttattgaatgccatgtgaaaaggagagtggagtgaagattgaatgcccgaagtgtcgacgttacttttacaattgggagtgttataattatcatcagggacatcagacttgcaaatatggaggcgttgcgttatctgtgacaagacttatcgatttaacccgaagaaggaacatgaatgtggtgagacttattgccagctttgtagtgtgagccatgaccccaagcgggggtgttatattatgccgatcgaggagaaggaggaaaaagatgtctacagaattgtagttagggtaagttctacaaataaaatcaacaaaaataagtctttaactccaggatttggagactttgcaggattctatttacaagggggaccagaaggagcatgttattaattatatttcggtgagagttacgtgtacggaatgctgtgatgacaaacgaattgcaaaatttgtggggaggagaggatcaaggattggagcgaggcggagggacatgagccgaccaaggattttgtggagtggattttaactgcttttacgaattacgatacgtacatatttgcacataacgccggacgttttgacggtaatgaaaaaaaattaatctaaatttttaaatcctaaatttttaggtcattttgttttaattacctctgccttaccgggaataacccgctaccgctcattaatggattgaaaatttatgaatttaaagtgcaaaactcgaagaaacattcaaagctgatttggagagactcatgtttattgatgccggtgaagcttgagtcgctgaaggcgacatttaatttggactgtgaggacaagccctttttcccctattattacaacaagaaagaaaattatggaatacgattggaacatctgccaccgatggaggactattcgccgggatatatgaacaaggataaatttataaaattctaaaaatggtaagaaaagaaggacaaaattaacaataaataatttttcaggtacaacgaaaacaaggagacacctttttatttggatgatgaattgaaaaattattgccgaaacgacacggagattttattgctgtcaattattgagtttcgaaggatattgattaacgacattactaagggatttgacccactaccgaggagttgtacgaatgcgggggttgcgatgaatatttttaaggcaatgtttttgttgcggagcagttatcgattgtgccggagaagggatatgagcggtgtgatcgcgccagtgtgatggcaataaagtatttggagtggcggagccagcgggatggaattgagatacggcacacggggaacggacgagaggtcaaagttggaaaatataaattggatggatttattgcgaataacggagctagggacaaatgcatcgaggttatgggatgttacatacatggatgtttgaattgttatgacccggcggcggaactgattggaggaaggacggcccaggaattgaacgatgagactcaggagagattagtggagctacggaagactttggatgtcgaagaagtttgggtatgtttatttgacatttacatttataaattctactttttaggggtgtcaaattgagaaggaattgaa

SEQ ID NO: 17074 - DNA, 1665 bp, Heterodera glycines
attatatccttttcaatttaatttattgaaccgaaaatattgatcaaataccttggaattgttagatgataattataatataagtttattttatatgtttactaaaattcacaaaacttaaataaaatttttaaataattattttttgtaattatttgaaatctttttctaaattaggcattttctataataattctaattatggatggcattaattatttatattctttttaatatcggtttataaaagattttcatatgaaatcaaaaaaacatattttattaataattttatgaataacttaatggttatcagcgtcccgctcaccgataaatcaccaacacggcgcccccaagccattccatgcactgtttgcgccccctttcacatttccgttgttgtactgctccaactccttgctctcccaatttcccccattttgtccaatttcaaagcgatttttttgtgatgggctaatagggccaaattgttcacattttttactttgtggcccaattggccgaatttgtccccctcaaatgtcttccccctttgctccccaatttcgatggtttaattacccaagtttgagataaaatttggtgtgaattttcctgtctgtgctttgtgcggcccaatccgaacgtagtcccgtctcgaacgcccccgaccccccgtgtgctctccccccaacttgacgaagtcctgcaccaacgagcgcaggctattgccggactccaccacgcccacacccgcacacacccgagtccgcattatgcaataatttttttaaataacaatcaattgatttattgtcaatgctctaaaggtgtatatcaagaaaaagatttacttctagtctaacattgcattttttttaaatacaaatattacagtgtattcaaaattttcttattattttaaaaattaaaccaattacaataagaaaaaataatagatataagaaagaaaagagtatcaatctgcaagaatttaaaaggaaattggaaatattatttaaatacaaaatgcaaatattgaaaattaaataaacaattataaaatgcctgaaatccttaaaaaaatacttagagcatgattattgccttgtcaattaactgcaaacaaatgagatcaaaaacgattcttacacttatataaaaattttaaaagataacggtatttatgcaaaaggaataaattatatattaaattctacaaatttataccaattataacgaaattgatgtataaataaacaagttatataacaaattttgcaaatgcctaaatcaaaaataagaagcaatgaagaagccgattaaatactactaattctacaagtttgatattttaagaaatcaaagttttctttaatttattattcttcacaaataaagcttacaaaaaaaccattatatataatccgaagagtgtgttattttaataaaaaaaaaatatctaattaaataatcaaattggtcgatgtgatacaaatttttgaaatttttatccgaaatatagaaaaatgaattgtgataaattttttattagaaaataataataaatattattttaatagaatctgcgacctattaaaacagaaattaaaaagaaaattataaaaaactaaatataagaaaaaataaaaattccatttatcc

SEQ ID NO: 17075 - DNA, 1964 bp, Heterodera glycines
taaaattatctaatttagaaccagaaaaccatttggcgtagtttcagaagcttaaaaatttcatatgtttagtgctttatgataagttttttaagttatcttgcattcaccagttcggtattgcatttcattcactagcgaaatataatttatttgtttctaatttgaacttatcagaaatgttccttgtctttaatagaggttataataaatgataaactaatcttctgttggaaattttacaaaaaaaaaaaaatttgtttttttatgaattttggaatattcattttctataatgctcttttattaaaatatttttcgattcataagttgaaacatttttgtttttattaaaaaatattagatggaaggaaaattcaatatttgtttttcactggtttattgtttatgctgtattcttaggaaattacttatataattgtattatttttattttttattctttatttaaaaagtgcataatagtcaatatattctaattaaatttgtaatttgttatattttatgtttttatcttattttttagttttctttttcggtattgcttatttctctaacgcactgagaagcaacgaaacataaataaacagaacgaagatggtaataatcgttaagagacacaatttgtggtcaagcaaaaaggtgtttttaaaattgaaaaagtcactacaaaaattttaataaattttaaaaaatggattattctataagttttaattttcaataatactttatagtttataaaattaccaagttaatttttgtgtatccggcgccattgattgtagagctcatcgagctttacaaaaatccgctggtaccggcacgcttagcttgggttggccatcgacatggtccggggcgaggctgaggatcctccggcatatgtcccgacacataacgggctccaagtgaatggatcgagaaccggaccgtcactgagtttttttggatcgactcaccacgaaaaaatgctaacgttataaaatttattattatttaaaaattatttattaattgttgatagatttaattttaaaaatttacttttcaattatcttgtcggcattttaaagttttatgaattcttttttttctaaaacagaaaacaaaataaaatccaataaaaaaaaaaattaaaattttgatgtttattagtatttaaagataaagaaatttaataataaaatgtgtattaaattatacaaattttaaaataaatctatttaatttattaaaataattttagacaattgtaaaatatttcaagaacttgtggatgcgaattgcacgaaattggctgatacaaaaataatatttttattctattgtaaaaaaaagataaattggagaattattgagttactttaaattataaaaactaagcaaaattaatgacttttcattccttggtataagaaataaaacaataaaaatgactcatatatttcgacgacgaatatgcaaataatattaaattaaaaaatgttattaaaacaaaacaattcattattttacatatttaagttgaaaatattagctattcaattaatgtcaaggaaatgtgcagacaaatatacaaaatgataaaattaaataaaatattataatgataatttgaaataatataaaataaacctttcaggaattatatttaaattttataataatagtattatattttacatgtttataaaatggaacatatttattaaacattataattctgaataacttagtaaatagctgaatgcctaatatttagtgtttaatgcaattaaaaaccaattataatattagataaaattaaaataaaatcaactaaaaaatatcattttaatatatttttctcttggtcaaaaatatagtttacaatttattcaattaaaaaatataaagagagttataggaagtaatacagggaatttggaaattttggttta

SEQ ID NO: 17076 - DNA, 1880 bp, Heterodera glycines
aggcagtctcgtccgaaagtctcacttttaattccctttcaacaggtggaggaaattgtaaaggccgcagaaaattccaatgataattgtcgtgagtgcgacagtcaatccgccaagtgcatacacaaaagataaattcactccatatagatccgccttgactttgttttccaaagcaatttcctgagcaaagaaaagaaatttttattgttaagttttaaaaagggagcagctcattccccccccccccccccccgcatcgtttccccttgagaattttttaaaatttactaacatagaattaaaaaaaaaaataatttttttataagaaatattagaagaaattgccaataaatttctgcgaatatgcgaggggaaatggaaatgaaatacacccgtttaaaactccctacatactcgaaagtcgaaatcggcagaagagacagtagtaacacaacaaaacaggatgaaaaaaaagagcaacttaaaaggaaaaacaaacttgttcataacttttggtacattgtaaatcattgtgcacaaactttgtcagcacgcaaagtacaagttgaagcggaaaagcgatgaataggagatgaagcgggtggaaaaactgagtcgggcgcaagcgcggaaaggtgtgccaaaaacggatgcccgcgccgtaaagaaggaagcaagcggaacaatgcgcggaaatgcgagagcggacgcaccgcggacgacagtgcggcggacagtggacattgcttgatagggcttaaaatgcaaaatgtgggccactgtcataatttacactaattagctaattagagaatgagtctagcaaatcaaaaattgtgaattttacccagggaaagcagaatgccgaacaaaggttgggcaagagaattgttgttgtttttattcatattgacaaattcggattcttctttgatgccctcctgctgttgctggtggtgcccgtttgattcaaacccagcggatttgaagagttctgccaattggaatgcgtccacctcatcttcctgttgtgttgtaaaaactgttattcaaaaaacatggctaaaaatccaattgcttatttacaaatgtttgagaatttacattttcctgtttttagaagccttacgggaccgggacccagccaaaatttgccgggaatgtgatccggatataatagagatttgattctctgggtcggattcaaatcccggtgccggcaggcgctgtcggggaaattgaattcaattcagaacatttcttatgaataaggacgatcggcctcctgttataaacttgctctaaattgtgacaaaaatatgagcttaaattattgcattcagaagttcaaacgcagactgacttgtcgctgcgcgtccttcaccaacggtgccgtgccaatgccgctcttctgtcgacgcacaagtcgcgcccagaagtgccgcattagtggtgtgccgggctcagtttcaagaagggcacgatgcggcacggagtcaatgatgtagcacagcagctgttggtgaaccaactcgtccgccctggcgaatggcatgcaaatgttggagagtaacagagtggaagaaattcgatggcacacggttcgtcggacggcgaacaaagcaactgctccccgagtgtacaatcttcaaaacagtgcagattttaaggaaattatttttttttgtaaattctctcttaaaacgacccgagaattcttggcaatgccattcggggaccaatgccgcatgtgaacggttatgaataaaatcgcttcccaaaattggtaagggtggcaaaccgctgggggtaaaggtgacagacaacttagctaacggccaatggtgggtaatccctggagacatagttataacgca

SEQ ID NO: 17077 - DNA, 2627 bp, Heterodera glycines
ctctcgaatacaatgaacttggcactttttgtcgaaaggcggcctagataaagcgtacaaaaatgaaattcggattaaaaggttaattcaattggatgattgattatttatttaatgctcaaaatatttctttttatcataccgacattttaaaaatattttacgacctaaactaaaatatgattaaatgattgatcacatttgaatattattaaaagaaaattcctttaaagttgccgacaattttaaaaatttacagctcaaatcaaaatgattgattaccatatgttaaattattcatttgaattttccgacaagaatttttgcaattatttatcctgactaaaaatacaaatggtggatttttcatagattagcattccaacacgaaatggctactcataactgaaaatgtatcatcaaatcgaatatgataaaaaatcgtgactcgtccaaccactctttttagatgtacattgaaaaggttgtaaatttctttgtcatccgagcggacctggggctgaatccctttggtggccatgacacgtgcaggcagactaagggacttgggcaaatgaatcggatgatgccctcccacgcatattcgtttttgcatggtgaatgggtttggtgactccaagatgaactcaaataattgctccaaaagtggtcgaatgaaaatgtactaaaataaaaagttttaaacgaaaataaaattttcaaaaattacattgagaatgggaacggtaatcgcaacgttattcaccaacattgccttttcatttcccccatagcacagatacagtaggactccttttcggaattcatccttcgtcaatccattttcttcacgaagtgaactgaagtccaaattgcccccctcaaattccacttttctcgtcctgcttgccatgttaaatttctgcacaatttcgttcttaattttaaataagaatgataatttaaaaacaaaacaaaattacaattgtttttttagcttttatgtgtgcattttttcgttcattgcgtaaaacttcaaatttccaattaattgcgctgatcattgattttggtcctaaataacaaaaaagtgtttaactgcgattattaccatctgattaccaccatttgagttaaacagacgcataagtgggatgcacatgatctgctccaatagcagctcagttgggagtggtcttgaaattttgggtgttttaacaaaactgtccattttatcaaaaaaaattttgagtaaattgtaaaatgattccgaatttcagttggaatttcaattttgtaaatcttaagtgtgcaagcacgcagggacctaaagtcgaaaaatgggcgtggcttaccatcaataaccggaaagcttattcgattcaaacacccgaccgatttggcaaatcattttaaaaatttttcattctttttgtcacgcctcttctaatccttctctcctcacatttttttccaaataaatattttttaaatttgctgttaaccagggcggttgcttcaattacacaaagctccgtttatcctggcagcaaatgtaatttgcctttcagaacttgaggtttcgcgcttttacataactaattttccgagctgtttaggtgccctgtcgtcttgtgcttcatgggtggcagtgcgctgctcttcaggccaagattggtttaaaatgtttaccaatttaataaacgctgacaaatgatttatttatacattgttaaaagtttgcctactcaaataaatattatcgtatccatacccgttccgttcctcacttattaccgtataccaacccttcctccattatcgatttgccatcgccattatttcgccccctataaattcaatttttttttgctattttatcatttaaaccgcatttcatctctctcttctcttattagatcaaaaaaaaaaaatggaaagccgtcctccaaaacgcccattcccattcactattaatgatattctcaccaccccgccaccacccaaaacattgcagcaaggcttcctcatcaatcagctgcttggtctcaccgttcaggagggtgaaggggccgagagctcatccaacaaaaaattacccagcgaatttgttgaaaagctggagtgcagcgttgaacatgttgccaaatttaactacacgaaagtcaaatcgagcttcgtcatccgggatgtgccagccgatcccgaaagtcttctttcctcgatcttcaaacactgcattgatgaagcaaaaagcgacagccgtgagaagagcagcgaaccaacacaccttggatgcctgatcagcagtgcattattggatggcggtgatgtttttgtacccgtgcgccaaataactgccaacacaatcgacgccattctgaatctgttcaccaaagttgcgcagtcaaaacaacagaaaggtgttacgctatggggagagccgttcaccattgtcataacaacagttgatcgcagcggacttccggtgaagcggcacatcaaagggggcgccagacgtcgtttgacacacgttcagcaccaagtgcatgagaagtgcttgatcaaggtgaagcgtacaacttatttattatatcatcgactgacaatttaagatcaataaccaa

SEQ ID NO: 17078 - DNA, 2077 bp, Heterodera glycines
  unsure (1)..(2077): unsure at all n locations
ggatttctataaatnagaaaaaacattcctaaaaccatatttttgaattcaacccccccccccccctcgtcagaagctaaagagctggctatgcccttgagaaaaaaaaattttttttttttttttgctaaattttctcaagggggggggctgcgaccgatcgaccagcacccctccccccacaacacttactcaccacaaatgcgcttcccatcataaagtcccatccgccaggtcgtggcaaaccgccgtgcatgcacagaaaggtgttggaaatgaccgcgcacagtggcagtttggcgaacaaacaattccatgcctgaaaattttgaaggggaaaaatttgcaatttttttgtgtccaaatttagcagtccaatggcactcacgttgtaaatttgttcggcttggtctggccgctttgcatcgacttcttctttgaacccatacctgtaggggggggagaaatgtgtcaatcgtacaaaagttttttttagaaaatcaaattttttttaatttgaaaattgcaaaaaaaaaattttttttttgaaataaattaagaaaaaaaatctccagcttaaaaaaaatttctgcttgaaaaaatgagggtaagggagaggactgaatgtaaattttgggaacatctttatttttttattttttgaccgtattttgtgatcactacgacccgtattttatgatcattactgatcagagtgcccccccccaaaaaaaaaacccgtccatgaaaactcactcaaaattagttgattctatctcgtgatttcccctgacaacaaaaattttgtcgcaaaacagcagtttgaatgagatgagcaaagaggccacttcgagactgtaaaggccgcggtccacaaagtctccgagcaccagcaaattgcacttgggtgaatgcagttggagcagacgcgactcaacgttggctttggtaaagaatctgcagggaatggacaagagttgtttttttttacattagttgccatatatatatatatatatatatatatatatataccgtatatgctctaattatagtccagtctctattaatcccgcagtctccaattatcccccagtctacgaggtgttttgaaaaataatccctctatcataatcccccagtctctaattatcctcccttttatgaggaggttgaaaaataatccaccatgggctataattagaacatatacggtatatatgtatatacatatatatgattttgtaagaaatttttaagggccggcatttcgcatttcggcaaaaaaaaaaaattaggtccaaaattccggtttcgcaaagtgccggaatgctttgatcagtttttgcacatcccactactcactacaccaaattcggacaccaattttacgatgggtgaaggggggggggcagcggttaattttttgaacggggtcaaaccacataaatcgacgacaccttttttcaatcatcgaaacattgattaacctgtgttttcactctcaaatttaattcatttttttgaagactaatgaaatatgcaaaaaaaaaatgtgctaaattttcaataaattccccattgtttcatgaaaacttttcatttttggggggaggggaattccccccttcgctcctcctgactacaggccacagattcgaaatgatgaattacaaaattggcaaaaaaaaatcacagtaaaaagccaggcaaattgccgtggatgtcgccaaaaatgtagcagggggcctccaatgacacacgtgccggctcctgaaaagtgtgacaatgtttacatatgttagcgaatgatgagcgttgtccgtccgttcagccaaagagggaacacaggacaaaatctcgtggacggtgtttttttgaaaaatttttaattcttcaaaaaatttttaaaaaatcgctgaaatttttttttctaaaacttttctcttaaaagatttctaagtttatatatatatatattttttttaatttctgcgtgttggagattttggggtgcacccgaaaaggaaattttgttgaaatgtggccaaaaaaaagggacacaaatggcaacatg

SEQ ID NO: 17079 - DNA, 237 bp, Heterodera glycines
cccccccccctgcctacgcccttagtcagaggtgaggtaaaagaaattgataacggtagaaggaatgaaaaaaggggggggggggaaagccgggggcaaagtccaacgggaagataataaataattgatgcatacatacaaaatgcaaaaagaaatttacaaatgtaattgcgcctatgtccaaaatcggttaaatatatctttaaataaatgataaattttatgaatttgatgctt

SEQ ID NO: 17080 - DNA, 1473 bp, Heterodera glycines
ttgaaaaatacacccctaaaatcaattttttgtcattttttatatattttcaaaaaaaaaaaaaatttgtttgccgaaagtaaccaatcgattcttaattttcattggagaactttcaatttataaaataatttattggaaaaaagattaattttaccttcaaacacttgaaaggtatttgatttgcgattgcgctggcgaaaatgataaaaatgagattttttggaatttttatgcaaaaatcgcctcccatcgattcgtctactcaacgattcgtctattcaacgattcgtctattatacgattcgtctactcagccaaaatgtgacgattcgtctactcggtcaaatgtcaacgattcgtctattatacgattcgtctactcgacgattcgtctactcagccaaaatgcgacgattcgtctactcctccaaaaaagttcgaaaacccggattcgaactcgaacaaactttaaagccattttccggggtttcctacttaaaaaagcagtttccatagtctgacgactttcttgtgcgttttggtgccttcagtagctgctgttgttcaattagtgttcgaatttatttcatttgcttaaaatgagaaaattgatttaaaataggttgaattaataaattatgaaaaaacgttgaaagtagcaaacataaaatatatttgatactttaagcccttggtctgtttcgggtctaaatgtatgtcatagagtcataacaagtccagcgtccaagaaaaatgtaaaaattttcatattcacattgatttttgttcataaataatttatatttgttttagtagacgaatcgtcactttttggctgagtagacgaatcgtgtaatagacgaatcgtggctttttggctgagtagacgaatcgtcactttttggctgagtagacgaatcgtcgagtagacgaatcataggcgcgcctatgggtacgccccactgtgcagagaaaagcctagtactatctcgtcgtttctctttttctttgtaatttctctctccttggcgtactatctcttcattttaattatgtaaaaaacaacatttacttcattctgtttaactttttttctacttgttaaatccacaccaaattttacatactgatagagaaaaaaattctgcataatgtaatacagccattttatgttttatacaatttttcaaaagatatatataaaacatgaaaatgcattactttttctctctttttggcgtactatttttacatctctaacacacaaaaaacatcaaattcgtaaatgctaaaaattttggttatatggataaaaaatcactttggacatttagaatcaatagagaaattaatagttttagcatttttgctgaaaacagcagtttaggacttgagttataacgtgataaaaatttgaaaatatcacaaatgttttctgggatgtcaaattgcttagcattcgcttagaaa

SEQ ID NO: 17081 - DNA, 841 bp, Heterodera glycines
tcagtgggcccaaataacccctaaaatcatatttttggaagatttttgtcgaaaaaattttttcactcagaaatcatggtcacacccctgtggtcccaaattacaaaatcacttttaattctataacttttttcaaaaaagtgataaaaagctaaaataacatttataaaatagagcaaaaaattgcggattttttgagtttattatttttataaaatactttttcagaacagagttctgaatttttttctgaaaaatcgaatttttccagaaattctggaataacttatttattttggaagatagaaattccaaatgaatctcataaaattctcctaattttttgctatttttcaaactttattccactaaatttgatcaaaaacgaagagagttatgaattttcgaattttcactggattttccggggctcaaattttgacgatttttcaaaatttgtaaccaccttccaaaaagtctgaaaccaaaaataaagtatatattcgtcttcagcaccataaattaggccataaaaatgcattttggctaatttaggagcaaaaaaatttttcatgaaatgcaaaaccatggggtcccccctatggttttgaatttcaaaatcacaattaattttataactttttttagactcgtgataatgagatgatataaagcacattatatagggcttaaaattccctacaaaaattgtctaagaagattttttgctaaaatcaactcctgccaagttatacacccaaaactgaaataagccctaatttccggaaaattttctatttcccaaaaaattttgaaaaatttttctgaaaatgccaccaat

SEQ ID NO: 17082 - DNA, 1520 bp, Heterodera glycines
  unsure (1)..(1520): unsure at all n locations
ctcaaatttntgacgatttnttgaaaaaattttaaacacttaccaaaaagtctgaaaccaaaaataaagtatattttcgagttcagcaccttaaattaggccataaaaatgcattttggctaatttaggagcaaaaaaatttttcatgaaatgcaaaaccatggggtcccccctatggttttgaatttcaaaatcacaattaatttcataactttttttaaactcgtgataaaaacatgagataaagcacattagattgggcttaaaattctctacaaaaaagctcttagacgattttttgataaaatcaacccctgcatagttataagtcataaagtgaaataagcgccaaatttcggaaattttctatttccaaaaaaaatttgaaaaatttttctgaaagtgccaccaatcgatagagcgcgaaaaacggttgcttgaaagtggtcttggttttcccgagaaaaatctgcaaaaaataataaaattcaaaaacggaaaattttcgagggggcctagctcgaaaatttttgaaaattttcgaaatccgaaaacatggatggatgcagctcgtcgagctgcacaaaaaagtaattatcaccatcccgctcagatcaaaacacagcgagttattcgcaaaattcaaaaaatgccaaaattggttttcaaaattcgccgaagtgtacaggccaggcctttgatgctagggcctagctcaagaagaaaaaaatttcccaaacattccaacttagtcgcctcccagcagaagttttttgctccgggttcccagaaaaaagttttggcacaaaaactgcatgcatttttccccaaaaagccatttcagcgccgctggcgctcagttggcctccggaccggaatgccattatttttcctggatgcgcctcaaaaagttgcttaagcaatgtcaacatttcaggtccccccgattagccgttcccgagattttagttttagcaatgagttgccttgttattctaaagtatataaactagcgggtgcgtgaaccgtcggatctgggctgggaaaaagcgcttcgcgctttgggagcttcgctacctagcctgatcatgacttatagggagagaaggttccaaagaggaacaacaaatgtgagaagaggtacaacggtgattaaaagaggtacaaaagtaaatagaagaggtacaacagtgattaaaagaggtacaacagtgattaaaagtggtacaacagtgattagtaaattcattaaattaaaatgaaaatattttttaacaaatttaattaaaaaaatacatgaaattctatcaattaaaaaaataattaatttaaacttataaaatttatttatcaaaaaaaaattaaattaaatataattttttatttattaactcaacaaaatattttaaattaattaaaatcattgaaaataacgtaaaaatgcacagaaaaataatgttacaccgtccggattcgaacctgcccccccccctcaaaatgatgcctcagaatccccaatg

SEQ ID NO: 17083 - DNA, 279 bp, Heterodera glycines
tataataacgctgcggacatctacatttttgaattgaaaaaaaaattggtaattactctttctttttctccatattgaccatcatactcatactccccccaccctttctcctccttcattattttttcctttccttctccaaccctctcctccctctcttgatagtttaaactgaaggcgggaaacgacaatctgatccccatcaagctagcttctgcaggtcctgctcgagcggccgcccggggatcgatccccgatctagtaacatagatgacaccg

SEQ ID NO: 17084 - DNA, 3412 bp, Heterodera glycines
  unsure (1)..(3412): unsure at all n locations
ttagtcgaatgtttgccggatacgtggtcagcgacnccgnaaaaccctnggaaacatgtttaatgacttaaaaaaactaaattttttttcgaaaaatgatttttatttgtttccttgcattaagctggtttgttgaaccgaaaatgcgtaactcgaaagtttaaaatttcgacttttgttcgagttcatgttcggagttcggaattgctcaaaattattgttgtattcgtgatcagctttctctaaaaccccttaaaacatgttttatggtcttaaaataaaaataaaaaattcaaaaatggagggacaaactgaacttctaccaaaatatgattttccttgtgtattaatgaatttgaatttttgctcgagttcgggtccaagtttcggaattcagcaaaacaaatgtcatattcgtgatcagcgtcacaaataaccccagaaactgactttctttgaaaatttcaggggggggtctgaaaacagaaaagtaccctttttcgaatatttttgcttggcatcccaaatattccttgtgagactcacctcaaaaatgttttcaaatgtaaacggcgcatcaggaagaggcaatggcggtgctgcggcaacaaattgttgaacatttcctgaaaatgtactaattatcttaacgatttcggtaaatttccaaatctttccccatagggcctaatttcatcgcttcattcaagaccaattatctaaccaaaaattagtagtttattcaaaatatggccaaaagattccgattttcccttcccatggcggcagctaagccaccagcctgttcagcagtccccaattccccgtttttgttaaagcgcgccgcaaattaattgaaaatcgcttgccttcttgaagagcggctgcatgtgggttaacaacactttgtgctgcggtgccagaagcggacagttggtcaaccgtgtccatttttttgtaatattttaacaaatgtctgacagaaaaaaaaaattaatttaaaagagctgaattttttgaagggggtgaacttaaaagcccagatttgcatgtgccgacagatcggtttttccatttttgaaatacgggggattttaaaggatttaatctgaacaaatatggtatcattccatagctcttgatgagctttgagcacaggacaattgaacacttcagtaccggataaaacgaaaaaaacattttgacagaaaagtgaatggtggggcgagacagagggggggggaagcattctgacaggcgattgactacgagggctgtccaaacccaaagtactgaaaggtgcttttacaccgggactcaattttttgtccttttgttagaattttggtcctggtttcggaattttgcaaaaccgagatcatgttcgtgatcagcgccataaattattctagaaataccttttatttgaaaatttcaggggggggtctcaaaacagaaaagtaccctcagtttcaccaatttttggtttcgaatattttctcccatgattttttggtcctattatatttcactgggactaaagttgccccggtgctcagatggcgtcggttcgactttgaccaaactcattaagagattttgaatgataccaaatgtagcaaaacagttattcatcattaagaaattagctttgaacctcccaaagaattaaaatggtgacaaatatcgaaaatggggaggagacgcagaaaggcgggtggacacaaatgtgaaggcaaagaaaaattcagagagaaggaagagatataacggagaaagagagaaaggaaagagagatgaaaggcagtgagaaaggaaagagatgaaatgcagtgagagatagagagaggagagaaaagaaagagatgaaatgcagtgagagatagagagagagagagagaaaagaaagaatgcagtgagagatagagagagagagagaaaagaaagatggcgagataaatagtaaagacaaacacccaaaatatttgtgtttacgcaatgacaaagcacctgttgttgttttctttggttggtctttaaaaagtgcttatgcttaggaaatgaatacccgcaggccatttaaattagagagagcaaagagagagaaagaaagatgggttagggagagaaagaatggttgaaacagaaaggaagacagagagagatagagagagccaaatagagagagagagcaaaaggactaagggagagaataaagcacataaattattataataaataactagggctgctaattttatgtaagaaaatttgcgaattatgtaaataaaatatgtataaaaaatgctaaaatatgtatgaaatatgtacaaaaatcctcaaatatgtaggaaaatatgtaaataaaatttttttaatggttattttttggaaaaaaattcttcgtaaaaagtgaaataggcacaaaatgcaataaaaatgaccaaaataggcttagaatcacatttgaatattttacaaattaatttttgatatatcattttttgaaaaaaatcgattttttagggatacattttcaaacaaaattttttaattttttacaaaaaatttctataaattctcaaaaatcctcaaaatatgtaaaaaaatgaaaaatatgtacgaaaaattgcgaaatatgtacaaaaaagtccaaaatatgtataaaaatatgtacatatttaatatgtagaaaaatccgaaatatgtaaataaataacttttgttcgcaaacacaaaaaagaaagtgtttttcctactaattaaggctatagagaatccaggaaaaaaaacatgtatttacataaaattagcagccctagccatcaaaaaccaacttattatcgataataatgaatatttcacgtctcaaaatgataatttcagtgcactagatataaaatttctgaagtggaaaacttgtttaatggctttcacaattttaacacaaattattaatattttggcccatcaattaagttaatttaatcactcaaaaatggacatgataattaattatttgtgagatcgcgtcttgtgctgttgcggttgcttctcgccgcttcctcctttgccgttttcatctcgcggctcgcctctgccccggcaattggccaccagtttctggaactcctcctccaatgtccgtcgtgcgctgtcactgtccggaatttgtaaaatgtgtgccatggcgggcacatcaaacgttacatcgagggccttaaaatattgcgaaattaggataattttcccttttgctaccattagtgcgccatggacgcccgagtcgacggcatttacaacaaacgcgccaaggccaatttcttccagccatttaatgacccgctcatttgaccagaccattagatctaatttgcaatcgccaattattaattgcatntcattgaattcc

SEQ ID NO: 17085 - DNA, 2869 bp, Heterodera glycines
gggtaaacccaactcatccatatccaattcatccatagcacgatacgagtcgtcgccgtggcatttaatgtcacgactaagaccgtacaaccaaaaaatgtccacggccaagaccggcataatcaaaaataccacggccaagaccacgtaagcagaaaatgccatgccacgacgatgactcgcaatgtatgagtttggtctatggatgagttgggggtgactcgatcatttcgtttttttgacaattacatttttcttttactttagaatcaatttgcttgataaattggcaaattcgtccaaaggtaccaacatcgtattcagtgccgcttttcaacagaacatcccgcttggtcaaatttatgttggatttgccggtggttcggcttctcctcaggcgaatgccaacgacggcgtttcgtccgttgcttcagatcagcgactacactttgagaatggcagcgagatcagtttcgatcaatttgtcaacagtgcgctcagaggagagacatcggtcaaaggtggcactgatcaggccaataatcacttggccaattgtgcagcaaatggagtaaaaagagaaatgttggtgccggacgcgacatttatggacaaacttcgggttgcgatacgaaacatcatacaagaatcgccgcccaatagcaaatggaatacattctcgagaatcaggcagaatttgtacttcgatataatttgtcaggttcatctttttcaattgtttctttgccatttggtgttcatcctttgcttttcaggtggtttcggtccatgtgccaattgctggtttgtccgtgacttatctgcgcgtttgtgatggcacaaaagccgatatgtgagtttattgcttattgtcagatcgatgaaaattaattcgaaagctcatgaaatttagggaaaaaaatttactgcattaattttttgtttttgtcccctaattccagtgaagacggacattctttttactccggcgtttcctttcgtgaaactcacgccgtgcaaagtcaattgtttcccgaagaagcgatcaccgacgagtgcaaagaatttatctacttaattggatgttggggtgggtgaacattttgcactttcattccatgtcatttctttttcagatacattttgcactacagccatgggcattgaggtgaaaactacacagtttctaggggtcgtcataaatggcctctgccggacggagggtggcggccatcgtaataatcggggaaatggtcaaagggatagaagggaggagggaaaagagaaaacgaacgcaaaataagacaccaaattctcttaacaaatttcattcaaaatttcgatttttttttcttgcggcgactatttttcgtaagcgctaatgtaaaaactgtgaggcctttttaatctaagccaagtcgaaagaaggggatggccttcttaaccaaagtggggggggggaaggataaattaaatcgcaagtgaagggaaaaaagaaacaattgaaataattaaaaagaattttttaatgttttcaggctggtgacattatcaaaattttcaacgccaaaatgaaaacgcgccaagacaacgttattcatttctcgttgcacgggcacacgccgaacagcgaaggacgatacaaaagggccatcgaatgtgtgaggaaagcgaagcggcgaattggggacgaaatggcaatgaacggagggactgaaaatgagggtgatgggacgggtgggaaaaggacgcgacagagcgaagacagttgagaataatgtgatggatataacgcaattgagccaaattggaacggaattttggacgttttgaatttgcattacccaaaaagtggcgtttttaagtgatgccttttatacattaaaatatatttgttttacatatttatgaattaaacccttcgagaataaagcgcaaacaaaattggaagaatttcctgaagagcatttcggctttttcgttgaatctgtcctggaggacttcgcctatcatgtacagaaagggcgcctccaactgttggaagtcgtcaaatttaatgccattcacttttgagcggtgcattttgccgatggacgaaaggcgttggcatgccgaggacgcgtcggcgggcgtttgctcgacggcactgataacctcgtcaaacacctgacaaatgaggggtcattcttgaaaatcaaaaattttcagtgacttaacctcctccccccccccctcattagcttatttccctatggctcactttcaaataattggaggcaattgtctcgaaggcgggctctgaacactcgggcgaatcgatgtccagcccattcagcttgtgatagcgctctttcgcttcagggcacatttttaaataccttaaaaataaggtgaataaaaaccttatttttacccctctctctctctctatcctccctctctctctcactcaattgttccttcattctcctctccctctctctctctcactcaattgttccttcattctcctctccctctctcttcctctcccctctctttcaccctttctctctaacttctctccgtctctctctcttcccctctcctctctttcaccctttctctctaacttctctccgtctctctctcttcccctctcctctctttcaccctttctctctaacttctctccgtctctctctcttcccctctcctctctttcaccctttctctctaacttctctccgtctctctctcttcccctctcctctctttcaccctttctctctaacttctctccgtctctctctcttcccctctcctctctttcaccctttctctctaacttctctctcttcccctttccctctcccctctctctccgtct

SEQ ID NO: 17086 - DNA, 1921 bp, Heterodera glycines
ttggtcctgaaattcatttttttttttaaaaagtcatgcataatcttggcgttttgttggatttttttttaaatcagaaaacatacactaagttccaagcggcacgcttggcactgcccgctgagttggattcgctgctccggcatcggcatcagcgtggacggcggcgtgaacatggcggatgcgggcggcaacgaggcacgcttcagtgacgagggcgaacggccaggcactggaaaacacaaaaagatttttaaaaaattttaaaaacttcaatcgccaatttccctatgaaaatagtgtgtcaaaaatgtattagaggctaaatgtcattttgatcaggccgatgcctacaactagttgcagatgaattatgccacggcacgatcagtaaaattgatcagctcatgggccggaagccaggtcccgaacaatttatccggctaatcagagcatcacactccggccagttcagatcagtccagagctgatcagctcaaaaatctgatccggagtaatcccggactcggccaactatccgaaaataatccggctgatcgaaacataatgcttcggccagatcagattagcccaaaattgatcagctaatcatgtccctgaatctcggactcggccaatcgtccgactgtaattgaccagagagtacaccgacgcatgcccagcaatgatcatttgttcagaggagttgatcagcgagttagctacgtatgtcccataaatcccggcctgtgccacccttaaatcccagtcggtgttcggtgggccacctttgaaaatggcatcctgctgatgctgcagttgttgttgctgttgcgtgttcatgcatgccgacgccgccgcggcgttcatctgctgctgctggtggtggtgttgttgttgctgctgttgatggcacatcatttgttgttgctgatgctggagttgtagttgttgctgttgttgcagcatcatcatgttcatgtttgggttgttggtggtcatgcccggtggcattgtgccgtagggcgatggcattcccattattgccccgggcggtagtgccgacgcagctgatggcatgccgccgccaccgccggggaacggaccgggcacaccgccctcgcacggtgacctgacaccgaccagcggactgtgcagtgacgggggcgccggaggcatgcccatgccggcagcagctgctgaaaatgcggaaaaattcaaaaatgagtatgccaaaaattggggtttggaaagcgtgccgggggatcaaagccgggaacccccaaacaaaacaaaaaatagtgagacggcgcacaattaaatttagacaccaaataaatttataaagtctaaaaaacgagtcgggcgcaaaatctcaaaatttgcgaggtcccaaaatataatgacaaatttatgaatttttgtcccataaaatttaagtgagttagccctgaaaattagcgataccccaaaaatttgaagtgttagccccccccccccacctccctcgccccatcaggggccagaatttttttacaaaaatttctcgctttttggtataatattttgatttttttgtttaatttcgcaaaatcttccgacatttaccaataaattttttgggttttcgccgaaaaatttagagaggtcttaaaagttttcgataatcgatgcaccaatcacttggtgagttgctgccgtgccccaaactacgtttcaccccccgaaaatttatttaaaaaattcgaaattgaatttttctttaagaattcctaagattttttatttgagagttcgcacccgcggccatagccgcctcgtgctgttgtcgctgttgttccagcgccgctttctcggccgcctcgcgtgccctgcgcgctttggccgactccttcttcggcttgccgtcctttgttgttgg

SEQ ID NO: 17087 - DNA, 2191 bp, Heterodera glycines
ttagtttctatgccatatttttctttcgtcgccttaacccttcttcgtctttcatttgtcttaccttactaactttttgctttgaccgtctctcttacactctcttttcccattcttttctctaaccttcggattgacatttagtttctatgccacattttctttcgtcgccttaaggctgcttcttcttcctcttcctttttttcactcgtctgaccatctttttgctttgtccgtctctcttacactcttttctcccgtccttttctctgattttaacaaaaaaaaaatcggtcggattaaaatgttgtctgtccattcgcttaaatcttgcgttctctctgtctctcactttaaacagtctctcggacagtggcagtcatcactttctttgatttgtgctgcttgggcttgggcttgggctgggcgagggcacagaaagtggggcaagtcgacgtgtcgcatcgctacgcattttctccacacaaattatacgtggccatcccatcgcatcgacccgtcccctttccatcgcattttattcgggaattttcttccttctcgtcagcacagatgacccatttaaatttgattttctttatttgatttgtcactcactgttttcaattagtattttatgaaaacaagttggactaatttgggcatattttaattatacatgttacaactcgggcttcaacctgtgcatacgggccttaatttcttcctcagatgcaacataatagcaattttttcattttgatagtaagacatttaaaaaaaggcttggatttttgcataagaatgcttcctgggttttttgtctagaaaatccaggttcgagagggctctatttttgctaatgtaaccccattttttgatttttttttaggtctcccgaattaaaatttcattgctttcgctttgaattccttttttaattgaaaaatgaaatttagatttcaaacttgatacttgttgttgttgaacatatttctatacctcacagttcgtccacattttgactttcggacaaaaacaaaagacaaaaaacggtggcaatgatctccaggagggcaattattatttgggccattgctttgttggcattagcaggtatactggctgaattggcaccatttgatggcattttaattgatgtgccaccaaattttcagcgatttcgcccaacttttccaccgctgacaaaggagttgacgctgtcgatgcggcggacgaaatcattgacgacccaaaagtggaggtgccgaagaacggcgttggcaaaggcaccgatgaccaaacagtgcagcgggaggaggaggccatcaaactggagggactatcagtggccgagttcaagcagctcagggagagtgcggagaagcatcaattccaagccgaggtccgcgcgaaaatggaccaccaaatggggctgtttggaattggaggatggggcctttttttgacaagtcgacatcgaaaatttctccgaaatgtgaccccaaaaagcctgacattcacttctttccgcgatcgagtctcatgaattgcggactttaactcgagaaaagcattgagggttgaacaaatttgtgagaaaaagtccccaaaaattttaggtcctgaaaacagtgccgattgttttttttaattagcaattttactactttggtttcccgcccccccccccctccatttgcgcttttcaatgttgttttttaattttgttttctattttttttgtcaataggtccaatatttaccaataatatggtaggatagatagagaatcactgttttatagatccatttttttcttggattaaccgcaaaatccaatttttttttttaatttttgatatagcccaaccccattccgttcaggtcaaccggatgatgaagctgatcatcaattcattgtaccggaacaaggagattttcctccgtgagctcatctccaacgcgtcggatgccctggacaaaattcggctcatttcgctgacaaattcgacagcacttgcggccaccgaagaattgtccatcaaaattaaggcaaaaaattttcaaaattttccaaaaaaatttgtttggcgtttaggcagacaaagaaaatcacattttgcacatcaccgacacgggcattgggatgacgaagcaggacatgatcaacaacttgggcacaattgca

SEQ ID NO: 17088 - DNA, 2482 bp, Heterodera glycines
  unsure (1)..(2482): unsure at all n locations
ctagnctcgaaaatttttgaaaattttacatcatgtagtctccattcgatagcatttaaaatgctctacaaaaatgttctaagacaatttttcgctaaaatcaacccctgacgagttatggacccgggactcaaatgtcccgctcaggccaaaaattttttctatttccgggaaaaaatcgaaatttttccgaaaaaaataccagtcgatagagctcgaaaaactatgttttggaagtggtctccgtttctctgggaaaaatcgttaaaaaatcctaaaattcaaaaacccgaaaaccgttttttaggcctagctcgaaaaattttcaaaattttcgaaattttaaaacttggttggatagcctttcaaatactacacatttttgctcagaaacaatttttcggtcaaagcaacccctggcgagttattcgcctggtactgaagtgtacattttgagcacacttcaattagccaagcgtgcaggccagggggtggctctaataaaaaaataaaaaataccagcatgtagaggacagttgtggggagtgccctctcagcgggcactttttgattcgggttttagaaaaaaagttaggggccctaaactgcaagaaaaagtgagaaatcggtccccgggactcagtcgtccgcgctgaatttttctctatagttttcccggatgctcctcaaaaagttgtaagacccttccactactttcagggcgctcccggccttcggccgggagaaaatggttttagcaacgaaactccttgtcaatataacgtatatattaaaattaaaatatttaataatttggagaagaaaatgcaatattttttatttgatttgtataaaataatcagtcattgtgaaatttcaaattgtttcatttcagcctatttttattattttctaaattttttatatttaattttttttcaaataaattgcaatcactaatatataaaaagcctttaaaaaactcttcaattgccgcgtcagtatttttggcaattgagtttggcgggtctggcaggctaaaatgcacacagcttaagttaaagcagctgtgcagccgccaatcaatgtcggctagggcttcaagctctgctactttatgctgtgccagagtaataatgccttgcggattgtacatttggtctttgtacttgttccacaattctatggcattactcggctggccatagaccaggatgctcacaaagagccatctcatctgatctgaccagcgcgacagagctgcctccgccagagttttgtcccaaattttgtcgtcttcaagaagaccatgcattattgcagcctcagtgaatgaggtacaaagcaacccattaaccatcttaagatggtctgggtctccaggaaagtgacgcataagtgaatagagcgcgaacctttccgggtccgatgggggtacaggaacaattcggccgataggtggccttttaatttgctgccttttgtacaggacccatttgtcctttgcccatcggaaccgctctgggactttttcgaaaagaatgtccttaaactttggatcattcttccactcattttgccattgtttccaataggctgaacactgcgtttctggcagttcgccttgctggatttgttgagctttgctcaccagctggaaagccctatatacaatgggctgttggtttggcaaatgaattgccaatttgacaacatgatgcgaaagacgggcaaatggcattgaatgaacaatggcatatgcttccgttgcaccacgaaagttcatcttggcatattgagccggctcgtcaattttgattttattgccggactcttctttgcactcgacataacaatgtcctggccctttaaaagggtacttgagtgcgtatttaatatttgctttgttaccatatgcaaacagtacattatggtgtactcggtaacgtagcagaatataaggattatacggcacgacatgtgagttgtcgtatattaggccgtttacctctaattgggcaccaccatcagttggtgaaggccggaaatacatcgcgggcctgtccgggcgcaaaatcgtacattttgagtaaggggctgggaaccccttcttgcaccgcccgtaaattgggtcgctaggaccacaccaactgtcactgcatctgtgcagttgcatatgcattgtttcgcggatttcgcgatgcatttttgcaatgggcgtgtcgtcatctttatcaggcaaagatggaatgtgcgcccatatgtattcctgaatgacatatggaactgcgtccaggtctgtttgcgccacatgtgnngcatgtgggcctcctcggccttggaactccattgattcaccgaaaccaaggatttgttccgaagaactttnntgtcatanagntcttctcggaactcagcgattttgctgctccagacacgcatccacatgtcaaaacggtcagtaaatatttgaaccgttttt

SEQ ID NO: 17089 - DNA, 2511 bp, Heterodera glycines
ccggatcaggttcccaaaaatataattctaatcatgaatccgtgtcgggtgcattcccgaaaagtgtttgtaaggcttttaagttttacggaatgtttttggaaatgtcttttcccgggcctcgaaaaaaagtctgtcccgcgcatcgcaaattgaaacgaacccgcgaaactctatggaaaaagggcgattcccacagcaaattgctgctgtcattgtaattggcactccattctctcgtcctcctttcgttttctctcgcctttttaagcatcgttttcagttttttgtcaaattttttgcgcagcgattcttccaaagtgccaaaattagccttataattgcgcaatttgtgcccattttgcaattgtattttaaaaatataataattttgatttctgagttcctcgtcaaaaaataacactgaacatttgtgcagataaagcaatacttcatttattaatgttgagacattaaacgttggtttaaatacggggaattgctgacccaacaaaggctcttcagctttaaatttgaaaaaattaattaatttcctaaaaataataatttaattttaaacctacagtatgccaaacaacattatattctaccgtaattccttccttactttttgcatagactttgaataaatattcgtacacaatgtttgtgtatttgtgaaatctttcgcattttgtccgccatttttcttccccaatttcctccccttttttgtcacaatgccaattgtgtcgcatcaaatacaaaatgcctaagtaagtctcatattctttcgccaaaaaattttgcttttcttcgagagtggcttcttgggccatgacaaaatccttcaatttaccatctctttccaaatcgcagcaaaattgttcaaaataggactgacctctaacaaattctacaaataggcgctctccggtctgaaaatattcgtttcaataaatattcctttcgtcggtggaaattaccaaaaagtacgattcaaacgccagctgttcaatcatcaatgaaccgtcattattggttatcagaattgggaagtgtagtgaccctttctccgctcttttgagcatttccgccaaaaatgtgtcaaaattgtgccgaaatgcgtagttggcattttgaagtgccatttcaacaaatattccctggaacttttccttgtgatgattgttgtccaaatgtgctccataattcagcctctgctcattgtacagtttcaattcgtaatttctcacaaaaagtttgtccaatttgtgcccttttccgctggcaaagtttgggcagaagtaaaagttccaaattggtgccagactttgcaccacttccgtcaccaaacaaattgtgaaagttttgccaaaataaaactgtggcttcaccacgggaagtccggcgtacactctgaacaaatattcgtacagaatgtccaaatatttgcggaattttcggcattccctctgctcatactcctcaaaatcggtcccaattttggcacaatgccaatgctttctcatgaaaaaaataaggcccaattttttctcatagttttgctccaaaatttccttctccgactgattataatcgaatttttcatcagccaaaaaatgctcaaattttgatgatcccttcacaaatgcgagcagcacattgtcatcattaaactgtaaaattaatttaatttgaattaaattaaatccttaccaatggttttgcctcttttgctgttgaaattaatgaaatggagaaaattaatagaaaaaccaatttggaataattcatttgctaaatgtgaaaatttttcccggtcccgttatttttggacaaaccaccgggaccgggagtcccggaaaaacgggagtcccggtcccaggatcccacccgggtccattttccaagtcccggcaccggcaatttaaaaattccggaggttctagtaaatttactggattttgttgtggaggggattttatatgtgaattttaaataaacataacaaataaatgccatttatcaataaaattttattagtttttggcaaaaatgaaaataatttaaagatttttgcaaatgcaatgaaagaaattaaaaaaaaagaaaataaatgaaatgaaatgatacgtattgtacttatttttttcattaatatttctttgatgaattttaataaaacaccctgaaaaatggcaagaaaatattttttcgatcactcattttaaaaatgtcaaaaaattttcagaagagagagagcgaaaagagagaagcagacaaaaaaacagaaatagttcattatttagcgcgaattgagcattattttaaataattttgtattttattattatttttttaatttaattatgctttttcattgtccattcattggagtcaattcgtcgaatagttttacgcgtgactatggcgacccgatgatgctctgaatttgtaaaagtataaataaaatggctcaaaaaaataaaaaatggaattatgtgtaca

SEQ ID NO: 17090 - DNA, 1845 bp, Heterodera glycines
aaattctattaggaaaaatacaaaaatgcaatacctgactttaccctcggcagcaattcgtttcttcatatttcccactaaatggaaaaagcagaactgcacacgacagagtggcaacattgtacggacagcagcaaccacggcctgctcgaagcccaacgatatagtttcaggtgcaaaattcggccatttttggacaattagttgaagcatccgtgtgtaaatcatttcacattttgaagtgagaaggcagtacgcaatcggaaaaacccatttatcacgtctaaaaagacaacaacaaaaaacgtgaaaacataggcttttactttgcgagaacataaatttggctgaacaaaggcggcgccaaactgaaagtgccatctgcgtagacatttttcataataccgctccattccgaagttgaagaacgacaaatatcaaaattcttaatatggaaatttgtgaaatttaatggtttttattttttcacctttgcggtccagcctgtccctgaatttgaaaaacgccggtatatgccaacaaaaaattctcctcgtcattctctgttcgattgtacattctgtacgagggcggcaattccaatgcgtccaaactgagtggtgcagcaggtggtacatcttcgtcatgacgaacatgttttataacctaaagcaaaggaaaaaaaaaaatcaaattttggcataaaaatttgcaaacgttgaccttttttgtcgcagctttggtcggaaaagcagccaacacgggggttgctgtttctgcaatacttgcgcacgaatagtagccggcgcttcgcacgtctcaactgcacgccgcttgagctgggtcacacgtcgctgacactccacttgtgcggcgctcatgtcgcatgtgtggcttctaattatttgaggacattaccattaatatcagtgtgaaggcgccctaaatttgaaaaatagtctttattttatttttgcatacacctttgcatttgtcgttaggcccaaaaaactcgcatcgccaatacttccgaagtccatcttcactgagttggtgaagaacgtaaagtgcaccctcatgttacagcttctgcttgtttcgctttgtctttaataatcaagtaaataatctttatttttgaatttacatattatttaatatattatgaacgaatttaatttatgaattattgaaatttttgtaaaaaaattattatcactacgaaaccccgtactgacgaaatcacttctgacgaaatcacatgttaccgcataccggctatagagcagagaacggaaatttcgacttttagactcgattttaaattttcaggacagggctaaacattttttgactctattgcacttctcacgaccataaaaaaaagacacgaccataaaatttttttgcaagtttagtgaaccataactttttcaagaagcatccaaattaaacattcttacaagggaaccacccgaactgtaagtcggaaaatgcatatgtattatataccattggatagagcagggtcgacttctattgtgaatttttaatattgcgttcccataggaagaaatcaaaaaggtatgaggcctcaaaaatcgaaattttggctgtgttttcacttaaaattggtggctcagttggttaaattcgcatttttgaagatcgggttcacatccaacataaaaataaataaattttaattactatataatataattaaatagttttaaaaaatcattttttagactaaaaaagtgtacaataattgttctttagtaaaaataagcaaaaataataataaaagtaaaggttgggaattgatagaaagtgaaaaaagct

SEQ ID NO: 17091 - DNA, 1966 bp, Heterodera glycines
agtcagcatctcgaggatagattctgccgtaaaatgttcgtttgatagaagttgagcaattaaaagtaaaatttcatctgcactttcttgtgtgttaattagccacattgatgaaaaatcattgatgcttattggatgtttaattattttcactacaataaaaagaagcaattcattgtcatttagcgttaggtcggtttgttgatcatattgctgtgcattttgatgattcaaatttgtcgtcgtttctttatttgttgaccgtatgaatttatcaagttcccgtcgagcttgtgaatttgggcaatttgttttgtaatttttatgtgatggcgtttcacgaaagcttttccgctcgtttttttggggttgctgactgtcatggctttgtgcttgaagatgttcaagaatttgttgaagactaccttgaatttgggacaataaaaattgcagctggtcattagttgctgctgtagttgcgggcgggtctacgatttctttgtctttggaattactcgattcaatatttgcatgttcgagcgatgttcttatatattctagcctttgtgaatatgttggttcattatttatttgtcctcgatgtgatgattctggcaaatctatgcttgcttttttcgtgagcctccgttgtacttggaccgtttctatatttgcttctaattgcattggatctgcatatgtttcctgtatatttgcttgttgatttctcattcgtagttgttcgttttcactatttatttccatgttggatgcttctacatttggaacttctttgtcagctttttctgctcccgataatatttcgtttgacggttgcaaatttggtgatttgtcgtttattagttctgcatctaatgctttcttgttcccttgttcttcatgcttttctatatttgtttctgcatgtgtttgttcagaacttatttgttgtgaacatgatgtttcgttgtttcttggttttacatttggtgattgtatatttgtcttgttgtggtcagggtctaatgcatgcttattgactggttttgattgttttttaatttgaaaacgaacaggtgccctataatataatttgttctattgaaaatggttaaacttatacctattttcaggcaatatgagacgacgctttgatggcgattcttgccaatgctggtctggtgaataattgcttctgcaattctttcttgagtttgttaatttacgatggtctgatcgcactctaaggtccttatctttgcttgtgtttcttagatataggtcttgccttttcgagctatcgttgaattctgcgcgttctggagattgtgatcttcggcgatgttttgagcggtctgtccattcccgtccttggcgctgtttttctgcccgctctggagattgtgatcttcggcgatgttttgagcggtctgtccattcccgtccttggcgctgtttttctactgcaatatgccgatgatctttattatactcttgccgtttctcagatggtgatggaagagtgttgtttttagaatggtaatttgccgcatttgagtccgactcatttccccaacaaggtaattctttatctctaatttctggctcaatttctccttcttctaattcatcagaggccattgtcttttcatattgatcatgcacattaatctctttcgaaaatgaactttgtttttcaccataagataatgcattttcattattaatttctttattttgtcttgtcattgcttgatcatttaaccgagattgtatctctttttctgagtccacagagtcgtttttatgtcgctttggagattcaccggatgaaattgacattgatatttcatcttgaaataatgcttcttcttcattagtttcattattttctcttatcattgcctgagcattaaaccgtatctcttcttctgagtacatgattgagtcgtttttctgtcgattt

SEQ ID NO: 17092 - DNA, 1834 bp, Heterodera glycines
tttagcagacaacaggatgagcttcacggccgaaaacctttagaaatttttaatttgtaattgcaaaaataaccggtaaaatgtttgaggaaaattataattaaatttgcacccataatttccgattttttcctacatatttggtacatattttcaagttttggtacatatataatacatatttggcaaatttatttacatatttatgtacatattctggccatttttcgtacataaaaattgcagccctaataataacatatcaaaaaaaacacatatgaattatattgtatttaatttaaatattcaactatacgctgttgagaatgtgctccacttaccaagggtgcgaaaaaatgcatttgtaaaataaattgttatacatacaagaacaataaaaaaagaaacaattagaaaataaatgaataaaaataattataattaaaatgattaaactaatcataaaataaatgaaataaattgttaaataaaataataaattttcaagtataatttaataaattttataatataagtagtttaataatgaattgttaaatggcttgtttcaacttaaaaaattaagggtagagagttaagaataatattttgcttcataattttttttttgaagtttgactgcataaaattcaaaaataaaaattgaaaaatccaattgcattaattaaataaaattattttatagaattttaaaatattgcttcctgattctcaacaaaccaaaacaaacggaattcaaaaccgagttctttgttcaataatttacagcacttaccttcaaaaataaataacaaaatttcaattaatgttccttataaatatcaaaaaaaaaatttcatatattcgggcaaaattgtcaaaaaaaactattataaaaaatattaaaattatgcatatgaaatacaataaatttttaattcaaattttataataaaatatgatttaacaatttacttgcgtaatttaagaaacggcccctgaaactcgacttgttgtaagatggaatttttttaatttgttttttttaaagatattaaggctttttactgttcacccaccttttttcgttatttttaaataaaaaagaaaaacgaatgccaaaaaattcattaaactgcaaaaattgtagaaacttaaaatcttagcactaattataaattaataaaagttttattttaattatgatggtttaaaaagaatgtaattaattcttataataagggattatttttaatataaaatttaaattattacataaacaataatgaaaatttatagaaattggattataaaaacttatggtttacaataataacatcgatctcccttttgggagcatgcacacggacattgttgccgtccgttgcccgagagaaggccgtgtataattgaccatgggtaaatacttccctttcctggtaaatgccgacagtgcggattgtttggccctgacctttttgaatggtcatagcgaatgcaggcttaattgggaactgcaaacgcgcgtattttagcccaccaggcgttttgtcctcgaagatattgcgagatctttcaaggaaacacctcacttggccaccaatagcattgctattgattgattacacgaccgacaaggtgatcatcgccaagttcttcgaggacaatgcgtgtgccattgatcagcccttccctatcacttttgttgataaggatgacaacaacgcttccgacctttagttgcagacagtggtgaggcatcccagagtctgtgcgtctgttttatgctgccacttcggactcgatctcatcgatgtccaatgggcgatcgtca

SEQ ID NO: 17093 - DNA, 1077 bp, Heterodera glycines
taaaaaaaaatgacacatattacttgaaataaaatgaaaagaagctaaattatcataaaaatgcatgcacaaattgggtagaaagaaagaagtaatttccatgctaaattttgtaatagatgaatatatgatgtgaataaaataaagaaataacactcaaaaaattttaaaaatataaaaataatattgctttatgatttactctatttatatatgattgttataaagcactcgcgtatacaatcttttaaacttaattaattcagacaaatataagaattttttgggtttctgacaagcttaaaataaaagtcaaataaacttcttttttcgaacctaaatgcatgtttaaaacgcaataaatagaacttttattcgaggaataatttattcaatgcaagtctcttttctcactattaataatttatgtaaattttcaaattcttatttagaacaaaaatacaatatcatggatttagaattaaataaaaattcaatgttatttgaatttgcattttaattataattatgtacaataaaaataattgtttaagaattaaaaattttccgaaaattttaccggcaatcggttgtctacaatttcattattattagaatggttaaaatttaaaaaattctgatttgtttttaaaaagcgatgaataatctaacaaatgatcaattattattatacttatggttggggaccagtgaaaatatacatatgagtcatcgaaaaaattttggttttagaataaaaacactctttttaataaacctaaacacatataacccaaaattaaatgtcaagaataagaaaaaatctattaaagcattttaataattttcaaatttgcagtgggaattttataatattcaatatctttacaaaatgccaaaaatcgcataattaagaaaaaatttatgacaaaggcatagcaataaaaatatatttatacattcagtgcaaaatgtttcggttaaggagcaaataaaagaaaaatatatatgtatatcaaaaaagttaaaaaacaaattttatgtatattctaatccaataaatttcaataatttttt

SEQ ID NO: 17094 - DNA, 1421 bp, Heterodera glycines
aattatcaatatcgcccggcgcaggacaggatcctgcgctagcattgagcaggatcccagtccgcaatcctgcatattttgggatttgcaggattaatcctgccggatcttgtcctgtaaaaaattttgaatgccagtcctgccactggagccgcaaatttgatttttatgcaggattcagcaggcggtcagccgccgttttcgtaccgccgttttcgtacggggacgttttcgtaccgccgttttcgtacggggacgttttcgtaccgcaggggggtcgttttcgtaccgccgttttcgtacgggggacattttcgtacgagttcttgtacaagcgtcagattcaaatagaaaaacttaagaactaataaaaccaaaatttatcattttttgtttcccattcataaaattttgtagaaaattcataactttataataataacaaaatccgggacaaactaggtcgcatctcataatttcggaaaataccagcgagaaaattgttaaggttttcgggattgacattggcattgtcataattgtgatcattttgagcgacaatattgttattgatatcgttatagagttggacgagtcagagaatccgtgcgtcggcatcgcgatacttctttttctgtgcaccatcatgcaccaatttatcattatttagttttgtttaattacttgctgctggttcatttgtagttaataaaagcttaactgtcaaaacattaaaagtaattttaaaaaattaacaaattatttgaatgcaatttttttttgcatatccactcgtacgaaaacggcggtacgaaaatggcggtacgaaaacgtcctggcccggagaatccgtgcgtcggcttcgcgatactaaaaagtttcaaatttagagatgtaaaatctaaaatgtttccaaaaaggtaacaaaattaaaccaaatcagtattgagataaataattttaaaatcaaaaattgttgttaaaaaataaataaataaatttggagatgaatttttgagaaatttttgatttctcaggggtgtatttttgaaaattttcgggtcgattcttaggggtgtattttttgaaaaaaatttttaagtcgcttcttaggggtatatttttcgtttttattgcatttttattagacaaattttgggaaaaacccaaaaatagttgaaaaaaaacatggttttcgtgcatttcaggtcacggggagctcaggaaaaaataatgaaaacctataaatcgtatccctaccgttgaattgattttatttttttttgaaaaatgtgcaactaaattattaaaaaattctatttatcccccctggcacataaatggagactgggagattatttttcaacctagttcgaaaggggtatataattggagaccggcagattaatggagactggcac

SEQ ID NO: 17095 - DNA, 1895 bp, Heterodera glycines
  unsure (1)..(1895): unsure at all n locations
aacagctttcgcctattctcaagtgttggcagttgcacgcccacgttcgattttggtatggaattggcggaaggctgcatttaaaaaatacccttttggtgaaatatttcacattcacaaagttttttggaaatgtgccgcaaaaaatgttaaaaatctgatttagtgatcccgaatgtactgaaatttatgaaaatataataatagaatacatttttatttgtttattcataaaaaataaaaaagtcatcagaagggcgagaaccacttactctgacgactatcagataaatgtcgtagagtaagtgacaaaatatatggatgatcacatgaattaaaaaaagacaaaatatgtgaaaataaataataaataaattgaggtcaaagtcaaatgaggtcgaaataccaaatcacttagaaatttgttacattctaactttcccggtcttacagattaccctagtgaacttttaagttttattttaaattgatttaaagaatttgtttttattagttctttatcgagttgattccacaattttgttaccctcccagcaaagggaatgaattttttgcccagtttgtattttgtgttaaatctgtaaaaggggatgttaaagcgtgctgatggattaaaaatagaaaatagtttcagatctgttcggccataagcaattttatgcgccatgaacagatcaaacagctttcgcctattctcaagtgttggcagttgcaggtattctaatcgattttggtatggaattggcggaaggctgcatttaaaaaatacccttttggtgaaatatttcacattcacaaagttttttggaaatgtgccgcaaaaaatgttaaaaatctgatttagtgatcccgaatgtactgaaatttatgaaaatataataatagaatacatttttatttgtttattcataaaaaataaaaaagtcatcagaagggcgagaaccacttactctgacgactatcagataaatgtcgtagagtaagtgacaaaatatatggatgatcacatgaattaaaaaaagacaaaatatgtgaaaataaataataaataaattgaggtcaaagtcaaatgaggtcgaaataccaaatcacttagaaatttgttacattctaactttcccggtcttacagattaccctagtgaacttttaagttttattttaaattgatttaaagaatttgtttttattagttctttatcgagttgattccacaattttgttaccctcccagcaaagggaatgaattttttgccagtttgtattttgtgttaaatctataaaaggggatgtcaaagcgtgttgatggattaaaaatagaaaatagtttcagatctgttcggccataagcaattttatgtgccatgaacagatcgaataagtttcgcctattctcaagtgttggcagttgcaggtattctaatcgattttggtatggaattggcggaaggctgcatttaaaaaatacccttttggtgaaatatttttgacacttttcgattttttaaatatttttttgaagagacggattccaaacctccggagcgtattccaataagggcctaatataagttttgtataacgtaatccaaatcttagacgatttggatttaattattcgaaacaaggaacgcatacgtaaatacgcattccttgttatttggttaatatgatcggaaaattgtaatttgttatcaatgtttactcctaaatccctaattgtatccacagcatttattgtattcccatcaaatttgtatgtttcttttgggttttttgaacccanaatataatacaaaagttttttgaattgaaacttttatttgccatttatgtacccattcgaataaattatgcaatgctttatgcataatt

SEQ ID NO: 17096 - DNA, 1325 bp, Heterodera glycines
tttttaagcttctcaggtcataactttttttactcttaaagaattttttagaaattttgcaggataatagaaaacacttagggctatcgaaaaataccaagattataaaatttgatccattatagacgaaattatgaataattttctgtcttaaaattttccatttgatggttttttgactaacgcccattttgatggtttttgactaatgtcccagcaccgttccttctttcatttgaaattaaaagaataaaaacataaaaaaatatattttctttacaagaatagaacaacaattaaggcaataattggcgtcgcgggtaaaaatgaacttgaaattactaatgttaaaaaatattgtatatttattaaaaattatttttttttgtcattttttcgcgatttaatcattgaaacaatctaacagctaacattaaatttttgaaatattttttaaaattttcaattaaatatcttttataagaaaaggcctactattatggtcatgagcaaaagattaacgaatcaattgacggccgcttatcggcggaacctgcagaggtaaaacgactcattttctcgagaatattacttaatacgggaaaagcgtatgattgtgttttaatgatcacttctagtttttaaagaaaatattcagaatttatcatcattcatcatttaatattattgaaaaaataaaatttcaagaaataaaaaacaaaattcatacttaaaaacggacaatgttttacatgctgagaataaatataaattatcttctacttcattatttttcgagaattgtcaacttatttattcatattttttaaagataaattaaataatatggtaatgaaacaaagaaagaaaggtataatttttgattttgactaaatttgttaaaattttaataaatttttaaaatatattaaaataaacgaaaatttaaaatatacataatttaatgaatataagaataaatattaatatgaattttgctcgatctctacctaatattgacaaaataagtctctgaacatgagttaaagttttagttattataattaaagtaaatttttatatttacgcatatagaataaatagctaagaatataaaaaattcttcaaacctaaataaaactcaattcatagttgtcaaaaaattaaatatttgggaaaaatgaatttgattaaatatcaaaatgttaaattctttcatttgcattacgaataatctattttaattaaaacagagattgttattttaattaaaaaacttatttttacaagttttgaaattacatctaataataaattattatttt

SEQ ID NO: 17097 - DNA, 1579 bp, Heterodera glycines
taaataaatgagacaataaaagtccaacaattaattgttgtgaacaaacgtatgacaaatcacacaaaattaaatatttttgaaattagaatataatccttcatacatcgtgaaaacaaatgcctttacaaatacatatcaacacaaaaaataattttaatacaaaaaagattgatttggattcgggattcggatcttgaactcttaaaaacaacattgtgaaattacttaggaaagttattgttggtggcactaatgccaggttgcgagatgagcacaatgaagcaattgtttaaacaataagcagtgaaattcagcatgaaattaaaaatattaattattggggcagcttctttcactaaaatcataaaaattgtaattatttcaatgccaaaaaggtgtcattttcctttagtattcccaggtcaaattagttttttttccaaatcaaacgccaaaatttaaattctctcctttctcagtctcttttctctgtctctctcatctctttgttctccgactcccactctgtctccctccctccctccttatctctcctttctgtctctttgctctctgactctctccaccactctctcgctgcatccttcgaaatgaacacaaaacgacgctgacccgtcggacgaccaatggcattatctcagcacatcttttgccattgccccatccaatgggcacttccctcgtcttccacattccacttcatcttcatattttcctttacatattagttttttttcctccaatttatgtttttagctcaatgtattgcagtttacagataataagactcatcttatttttttataaaaacaaattattgataaattccatatgcaattattttttatacttaatcatgaaaataaaaataaataaatatatttattaataaaaaaaattaaattgaaaaaataaaatcaaaattattcttcttcgagccggaaaacttaagaaaacagaagggtttgcgcatgagctgaagatatagaaaaaaatatttttaataagatcttccaaaagcttaaaatttatactaagaattacatgtactaagaaaatatcacttcgtcctgcgagataatttgtgcttatatttatagaaaaatatataatagcaaaagaaaacccaattcaaataaattaatttaaaatttgtaaaaaccaaaatttaacactacctttaatttgcatcggaaacaataattaataaaaaaaattttattgcaaaatttatgtaaatagattaaaaagactatacttgtatcaaaaatgttattcttacagctggtactcaagtacaaaaaaacataaatttaattaagttacagaccaatcatcttattattaataaattctcttgatttagtagccttgaataaattaccaaatgaactgtgacagaaattgcttaaattatatatgaaaaattctgaaattgtttaaattatatttgaaaaaataactgaattgttaaattatttttgaaaaaataatcacctattccaaataatgtagacgaaaatgaagcaaaacattgaaacacaaagagaaagca

SEQ ID NO: 17098 - DNA, 2626 bp, Heterodera glycines
atttaggacatcgacaaattaagaaaaaatttggttttgagtcaaagagtgttggtttatgaggaggaggaggaatagaagggtgagcacgaagtggacgaaggagaggaggacgaggaggaactgttcaaggaagacgcagatgatgacggagagggggaagaggacgacggaagggaggaagagggggaggaatcagtcgccactaacgaagacgacgaagaagaatggttgatgctgactgacgaagaggaggaggaaaatgaagatttcggagaagagtcgaacggagaagaaatgtcggaaggaaagggggaggaggaggagcgaatggcggagagattcggtggagaagagcagcgacaggacgaggaagaggaggaggtgctttacttgtgactctgcacttttatatatgtgtttcgttagagagaactaataattgttttctttttaatttataacttatctttaatttattatgttttttgtttttgttctgacatttcgtattaaaattttgatttttttattctgtccgataaatgaggttttacaattctaaatgatactatgttccccaaatgccaccgggaatattacttaaaaacctagaaatatcccctgaaaggatctgaaattttttgacaaataaatccggttagaaggttcatgtccatatttattaacaatcgaaaggaaaattaacggcctatcaaagtaaattcacataacaataattggtgaggtaaaatggcgtagaaacaagcttaacattgtgcggattaagtttattcaacatccaattcaatgtttttattgtcagtcttttgcaaattctcgtagagtcgagcacccaattcgcaggcaaccaacggacccgaattttgacgaacaaagcgcatgagcaacaacccgtccagaccgagcagctcatcctcaaactgtcggacattccatccctcttaaaaagggataataattcaaaattgaggaaaaaactgaccaatttcggtcgggacaagtttaaggaatgatttggcactgtaaagttggaacggacgcataagacgggcgatgaaaaggaaggaattgaagacagtcaggaagatcaaagcgaggtaccaaaagtaaaggaacaggaaaaccttcaacgaccaaaggaaaattgaatgattgtgaaaaattgtacaacaccttttcattgatcatattcacgctcaacacacatcgaacttcgctaaaattcataaattttaattcaaattctaagacattttagagaacctgagaagaccgccgtccgtatgtcccaaaaaatcccttccaaattcgcagtaggaaatgcggggaaagtaagtgaattcctcttgccatccgttgttacgccaaatggattcgatcagcttttgcgagggaatcaattattattttacaaatctttcaaaattactgtaatgccccatcgccaattttcataaccgacgaaatgagtgaggaaaaacaactgggcaccattgacaaagatgttcataagctttaaacaatggcaaataaagaagagactaaaatggagttcactttgaacagcaaatacatgaagcaggcacaacagcccaagccattgccacggcttttggaagtctgtggaaaagtaaaatgaaaataaaatgaaattgtacaaaataccccgaagtatgtattcggccgcctcagtcagcttttgctcgcgtttttctccagaagaaagtcgcgattcccaacaaagttcgttgacatggttaaaatcgacatctgaaaaagcagtttctggcgaacattgctcagtcgtcaccgggtattcgttgtccaagacgccagaggaaaaacggaatccgaatcagaagagcctggacgattatgacgaagggaacccactgaagaagagaacgaacataagcaattggtggcaaaaagacaacctcacctggtagtaatggacataaattttggtgctctggtcattgtccccattgaaatggtaatactttacatatgtgccagtcacataacagtactggtgaacgaattcaacccatgcctctgaaagggtgcggggagtgcagtttatggaatttacaaaaaaaaaaaaagagaacctgaaaactcattgggcaccatgcaattgatcggtttcccgatgtaatcgacggtgccggtgatgaacatgaacaatgccaacagcatgggagtgtaacggtaacagagtcggtctacgaagtcatctaattggactcgtacaggactgaaaaccaatggaaagggaagagaaaaagtatgaaaatgtaaaatgacataacgtacatgagaattttgattactgcatcaataacaggctgcattttaaaatgggtcgaacaaatatacctaaatagacagacaatcagattgtatctactaaatccactacatgtcacaagctcctcaaaatctattgtcaattgtcattttggtattaatgcagtttgggtcccatattttggtcaaatttttcaacaattttttttggttacccgaccgggtctcagacccggatacccggttttttcactacccggggcccggttttttgaaaatccaatacccg

SEQ ID NO: 17099 - DNA, 2342 bp, Heterodera glycines
  unsure (1)..(2342): unsure at all n locations
ttgtgccgtccacatttttgtgccgtccccacatttccttattgtgccgtcccccatttttccccattgtgccgtccccatttctgtgccgtcccccatttgtgccgtcccacattttgtgccgtcccccattttccccccattgtgccgtccccatttctgtgccgtcccccattttgtgccgttcccccatttcccccttncggtttaattacccaagtttgaggactccaataaagtgtattttgaatcgctttcccgcctcacttgacccccagcaattccaccatccccgattgaccgccaagcgtccacccccaatcgccccagctctcgccaaatccggaccgttgccagccaacaaacacccattcagtaccgaccgctcaatctccgaccgactccccgactcgccctcttcatcccgtccccccccccatttgtccatcaccgattgcggaaaggacaggaggaggaaggaatgtcaatcgtctgagcaattttttaagaatatttttgttaatttttctttaaattttcaattacaatgggggtatcaattatgtaatttttgatttaattgtgaaagtgtgttcaatttattatttttttcagtattaaaaatgaaaaaaatagaacatttcattatctgcaaatcctcttggcgtttattagcatcgctgatggtgtaaattagagaccggacgggcccgggggcccggcgggcttttaccgggcgtcccggtcccgttttttttttttggaaaaaacgggcccgggatgcccggtaaaaacggctttttttgaacgggcggcccgctccggtcaatcaattttcgaagcccggtccggtcccgggcccggtcaatttgaccgggctaaaacgggcttaaattccgccagcgaaactgcccaaaatttgaaaatttaaataattattttggcgaaatgtctttaattcaaaaatttcaagatagaactttggatttttgaaatttttgggcaatttcaactgttaaaaagaccccaaaatccatacgaaattgaacaaaattttcataactttctttttacaaaaaaaaatttcaaatttcatgaaaaaccaaaaattttcttaataaatttcattaaaagtcaaagtttttcttcagcgtcgcctagtacaaaaagctaaatttttttctaaaatgtagctcaaaatagcaaagttttgtcattttttcgtgtaaatctgttaacaaaccaaactcaaattttcaaaaatttacccggcggcctgtcggcactgccggacccccccccccccaatgttcgtcaaaatctttttgaaaaaatgcaccttaaaattcttttgaagagtaaaaaaggtcgatttacaatggcttgacatttctaagttaaaataaaggactataaaattttttcgaatttttaatcaaaattccaaaaattttgaaaaaagcccggtcccgtacgggcgcccggtcaaaattttggaccgggcccgggacgcccggtaaaacgggctttttttgaacgggcggcccgccccggtcaattttcgaagcccggtcccgggcccggtcccggttccgggctctagtaattattcattatctaattagcagtctttatttaaatttcataattattctaaaacaattactgttgtgtgcaggtaacagttcgcaatttccgctttttttgcacacgtatagtatctgtagcataactgtgcgacgaaaaaactgtttacacgctgaaaataattaaaagataaattttgaaataaaatattaaacaaatactaatttaaaaatcaaatttctttcgtcaaaaagtgcttgtgccataacaataccttcacaactaggaatgctgtaatatttgaaagaagacaatccgccacagatgagacactttttgatttcactttttgggattttctccatttttggcattttgggtgaatggaaaaattttaataattaaattttttgaagaaaagataatgtaaaattaattatgcaaatattgtatttattcataatttctttagttgattttttccttatggattggtttttgtgtgtgtatattttatatattatctaatattggaaaattataaattataaggcgattaaaattacaaatgcattacaatagttaaattttgcgctattgatttgattttcttgtattccctaattttgttaaaacatatcccttatattaaaaaatgtccaaattttacattatatgatcaatgatggaattttcggccaattcatttctttttaatattttttatatgctttaaatttttaaaatgatgatta

SEQ ID NO: 17100 - DNA, 2475 bp, Heterodera glycines
ttgaaagtccggcgattggtccagggaagttgacttccaattcgtcattcgttgaccacaattgtgcttcatgattcgtcatttcagacttggcgaatgggcattcctggtgaatggccatttgtttgcagatccgcttgttgaccggtggaaattccttctcgatggtgacgaacttatcggccaaaagattagtgtaataacgctccgtggtgcgttttacggagcaatgccatgcaaaggtgatctgctcgggcttgatgattttttgcgaagagctcaattgccaggttgagccattgagcagtgagtgatggcgggggacggcaaaaaggtgaatttttcgtgctcttgagtttccaaatcgtgcttacgcgatctggggcgtgtcgttggctctttcgtggtctgcgttctcgccctggtgacgtactggattcgtgtccttgctctcgttgcaagggttgttcgctgagtcgtcgtcgtggtccagtgagtgccattgcagaagacgcagggtgaaggcggatccctcaaccctgcttgtactgtgcgatcccggattggcatattttaggcgcttgagttggccttagtcccctctgttgtgacctccgcggttgcggcctgttgtggttcattcgctgctgaacctcctcaatcgttgaggacatgtgaatttgtttccggaaacgtgctgtcagctgcatgctcgagtgcttttgcttgaattggtgacgtagtttaacgtccttatggaccaattgtcgttgcttgttggacgtcatttcggaccctgaccgtcggatggattgctagtttagcgtcttttcggacaatggttgcttggtggccggtgctttgctagtttaacgtcattgcggacttgtggcagccgggtgattatcgtttcggacagttgttgatggcttaggctagtttaacgtcattgcggacgattgttggtgattagcttagtttaacgtcttctcggacgagtgctgttggcatggtgtcttactgattgttgccgagctcatgtttaggcaattctgttgactgcccttatcaattactgttgttgagtccgagcttctggccaatgtagcgacgcaatgatggttggcgcctgatccacttgcggttggcgacaaggctttcatttttctgttgagttcatttgtttggcttgtttgtgcgggattcgctgcttttccttttggttgtttgctggaagaaaatgctggtcgcttggcaactgatgaactcttccttgttggtgttagccgttgcactgccataggaattggtgccgttgaatgctcatttggtgatttggcttgtctatccctgactggattttgtatgatctcaatgccggatgcgtcgctgtctgatgaaagatcaatcacgattgattttgagctgatgggagccgattctctcttccgtcttgatcgcaatgttgcaatgctggacaagagtttgttgcgttgatgccgtctcagttcgtccttttctttttgttgaatgtttttctgcctctgagccgttttactgctttgtggcgattcatcgttgttgaccattagcacgaaagagatgttggacggttgcttgagcttgattcgccctgttccactgatgatattgccgattttcgattggcaaatcgtaaatccgcttggcagttgttcaattggttgaacattcagctggtgccaaacgtccattccgaggagaatgtccggttgccgtgactcattcggcagggaaagcttcttttgttgaagttcgtcattatccaatgcgtttagttgtagtaccggcaaatcattcagcaggaacttcaaagcgttcaggttgaaaatgaacctgtcctggtcggggcataaaatgccgattgcaacgcggtcgcttatgtatcgcttcggttctcgttcaccgaagctggacaagtagcattcttccgtgctgaggacgttcatatccaattgttcagctgcactgctcgagatgaatgatcggtggcttcccgggtcaatgaagatggttcccatcatgctgagggatggccgtgacggattgaagatcgctgcctttgtcgtcattagcaacgctctggtttccttgctttggatggcattacacatttgttgttgttcgatcactgttgatcgcttgccatcgttggcatttggcttctcttcactgcaagaggtgctaggcgtgttgatgccattcttggctttgtactgatctcggcagagtgccgtgggatgccgacgtttgcagtgatagcacttagatggtcgagcgcatttgatgcgcggtggtttggcttcatgcacttgaagcacagcttcttttctctgaccatgctgatcccgttggttgagtggtgtcgacgtttttggcattcgtcatgccaatgattgctgttgcagaaaatacaggggtatgggggaccttttt

SEQ ID NO: 17101 - DNA, 2253 bp, Heterodera glycines
ttattaatattcaaaatctcagaactgtccctactcgactaccgtatcgacaacagtattcgcttatatgatgaaattaaatctttaaaaaataggcgaacatccaagcaacggagaactgatcgaagtgcaattaaattcaattaatttccaaaaaaattattcactgaattttttaaattaaaaaattcctttaaaattaaatcaataatttttcttcaatcattcatttctccctaaaaactttttttaccattttataaaataataaaaatgttttaccctgtgcttctgctatttcttgggatccagcggggttttttcgggatctcgcggtattaaactcgggatcccgaccttggcatacgtcccaatcgcttttccaaaatcttctgggttaatttaatggaataatttaaaaaaatttggagccgcattaattatcttaagctagcaaaaaacaactaacaaaaaaatacattaaaaaaaatttaattgaaaatataacaaaataaaatattttaagacattaatttttattttatttttgattacttacatccatgttttttagtttatcattttttaaatatattttttaattttatgtgcgctgtcgaaaaaattatttctcaaatgaatgccaaattttgcggttatgatttttaattttaatgaaattgggaagaaattggccaaacaaaattgttttaattttggccaaaaatttgataaactttaatatgaggtcggatttttcgaagtggcgaatttttgtggtggagttttcggaagaaaaaaatgagattttaaaaaagtgataataactattgctagggaattcaggaaaaaccaaaataaaaatttactgaggcaattttcgcacaaaaaaatgaatgaattaatttaaaaattcacaagttttttgattaaaatttgagttttatatttaatattttcaattttttgttgtttggaaaacatgttaatttgctgttatacaaaaaggttaagagaacatttagtactccaaaataaataattaaaattgaaaaaagaaatttaacgccgataccgtatcacattcagtaacactttccacggtaggcgttaatcacgtctgagacaaattcgaaggcctatgggggatgtccatgttaggctccatccaaatgttaggatgccgaacaccaaaagatcttaaaagtctgaatattttctttttcaaattgctcacttccaaattagggcagatctaaaaaatcagtacatttcatttagcaacaatgacctggcattgtgcaatcatacgatatgttgtaaaaaaatgacaaattatttgcataaaaataaatttcgacccaatgaaaataccaattcatacattatatcttttttcgaaaaatcttaaaattattaattttaatatttctctttgttggcagcagggctgggctttcaataacgaaaaccgtaatttaatggtttttttcaattatgtaatcaaaaatcgcaaaaatataacccacatccgtatttacgagggacaaaaaatgtcgcatttccgtaagccgtaattacgcccagccctgattcataggcgaataaatttttcaataaatttttacagatacattttgtgttaaaaaattttccaaaccctaaccaactaacttacacaccatcaccatcattagaaccacaaaatgaactcgcaagtcgctgttgtgccaattctggcaattgttttggtgttttgtgtgttgttgttcaacataagtgaagcgggtcgctcgagagactaccattacaaggttccgcgagctcagttcagttccgttgactagagcttaaccggaaatgatgcaaccaggaagaacacaaatgttcaagccacatcggatagttcagtatccttaaatgcttggctcccagatcaagaagcaggcgctcagcatcatcagcaacatccaaatcaggaaacttacaacaatatcatacaacaaactcagttagcaatcaaattaatggcatgccaacaaacttgttcatggaaactgaatggccaaagaatacgaaaaatggtggtcagcagtgagtgccaaaacaggtcggaaattaattgccaccattggtgaagccaatatttatagatatttgttttccgattagtttaattagtgtagtccaacaattgagtaccatttcgtgatatttttggaaaaagaaaaatgtttggtcgaatgtaagtga

SEQ ID NO: 17102 - DNA, 1528 bp, Heterodera glycines
  unsure (1)..(1528): unsure at all n locations
tggccaagattgatcaatgctcgggatcagcgatgtctattccagtngggaaaatcaccagacgatggcatctcggaattcaggcagcacacaaaggcgttttatcacttcgtacccggtcagaattaaacaggaatttatgcctaaattaattaaaaataacataggcaacggcaattgctaaaagtgaccgctgctaatcattctcggcgccagtcccttcgtgaacacgcgaaacccctcgaaatggtaaagacgccgaatggtttcccaataattcgtcctgtgaacctaaaaacagaagtggacgactattcattcgttcagcagtttttacctgtatcctcacccgaagaacttccaacggatttgtaaaaagcgacgcacaaattccgcccaacgctccggaaaatgcttgcaacaccaacaaattctcgctgtccccccgaatattgacagtgttttttcccgagcttttcgcactgattttccactcgccacggagacttttaagccgagtgagaaaagtgtaataggtaaaccaaaagaccatagcagaagggatgtaaagcatcagagaggagaaaaagccacttgaaaaactcaattagagggaaaggaaaaaagaagaaagaaaaaccgaccggtaaaatccacgaatacctaaaacagtgaattgacaaggaaacctcgcgaagtgtaactcggaaaatgcataagtttatatgccattttaaatgccgatagcaacttcccagggaagggcctcgaaaattgaaattttatgattataaatcagtcagttaaaggttggtagcagggctggccgtgatcacggctcacggggtttttggggtgctgtgatctcggatcactgattttttcaaattttccgtgattttgatccgtgatagcattttatatagtgaatttttactgagacgaaaataggaaattggtgtgtgacaagtagggatgcgatttttagttaaatacctaaaatttttgcgcacttgtaacgttgagataagcataaaaaacgagtttttagcttggtttggagcttctacacccacttttataatacctatttttacctatttcggcatttttgctacctattttaaggattttcaaaaaatgcttaacaaaaatgcaataaaatcaaaaatatacccataagaatcgaccaaaataattttcaaaaatgcaccctaagaattggaaaattttctcaaaaatttatcccaaaatttattttttttttctattgacaaaatttttaatttaaaatgtcaatattatctaataaaatattaatatatttaaattttcgtttacaaagagatatgtagaaccaagattttccctctttgtttgcttttttcactaaaaatcgttaataaaaatttttatttacctattttggtacctattttgaaatttttatacctaatttgatgcctaattttgatatatttttttacctttttaagtaactattctgcggattttttttacttaaaat

SEQ ID NO: 17103 - DNA, 1092 bp, Heterodera glycines
  unsure (1)..(1092): unsure at all n locations
gtgacaagaaattttttagaaaaaattaaataaataaattcatttctgttaaagaaggacacatatatatttagtctggtagttaagccttttgtctttcgttgtctatcccttgggttcaatgaatttttatattttgttttgataattttaattgaaatttaattataagaaatttcctaacattgaaaattatttttctttatttttaaaacgtccatagaccaataaattaaccaattatttgacatattttggacaaaatctgttaacaaattcactcaaaatttaaaaatttttcccggcggcgcctgtcggcaccaccggcggacggacccccattccagccctggttggcagtcattcagaaatgaaatgtgccttcagatctaaaaaacccaatttcgaggctttttaactcccagggaagtttcttaggcaattaaaaaaattaaaaattcacattacaaattggtcatgctctatccactgataaaaaccgtatgtattttccgagttacaattggcgaaattcccttctcaattaaaaactgaaggaattcccataaattaatgaaaaacaaatccccaagaattccaaatgtttttttctttccaattgttccctttacaaaccatcgatgtgataaaccgctcggacaattcgaagcccaaaggtcaaacggcccgactttccatccgttcgcacgaagtccaaaacggcaacatttttagcagagcccaaaaattttgcgggattattatagatcatcatatgctgactaaaacggagggaaaccgtagtgaatgggacggatttacaaaatgaaaaaggaagataacttatgatgtcggtagggacgaatattatttgagtgaaaatgctagaaaatccgcctgaataccaacaaatttggaatggcatttgattgttctcaccggccaaagcagagacaacgggcgcggattgaatattggcattaacatgaagaacatttcggaaattctcgtnaatggtggagtagatgaaactgacgccnnagtgaggcatttgtacccaaaagccntattaggggtcaaaaatgactaatt

SEQ ID NO: 17104 - DNA, 2339 bp, Heterodera glycines
tgacaggacggagatagagagaaagacgacagacaaattaccgattgattttttaatgtattgattgaccagttttgtaccaaaaatcttctcttttttctggattgatgcacaacgatgggaattgttcaaaaaatttcttgcagcttcgcacttcaaaagtttggacttaaaacgtagaattaaaaaaattatgcttcatttcgagcgataagccttaagatttttcaaaggtgaagggcactgatccggaatttttcaaaatttgccattttccagaacagactgatgcgcacacaactttttactatttggtttttttttttgtaagatgtcctttcggcctaaaaatcaatgtattttttccaaaatcggttaataaactttaataaaaatttccaggattttacccgacttcgcctatcggcactacaaagaccacaaaccccctcaatttatttaaaagacggaatgccaaaatttttgaataaatttataataaaatcaattaaaataaatcaattttcatctcaaatttcacctagaatttgcaaaaaattttcccggaggcgcctatcgacaccactggatcgacattaatcctgtagaattgagtcaaaaggtgtgacatttggtcattttttggtcaaaatcagttaattaattgataaaattttcgaaaaaaatttcagacggcgcctatctgcatagacggacccctttgttcctagtttttgaaaaaattgcgctgaaaaaaagcatttttgaaaagcaaaaaatagtcaaattttaaaatgcaggatttgcaggattaatccggccggatccggtcctgcaaaaatttttgaattccaatcctgcaacaggatccgcgaatttgaaatttccgtgctctaaactactcccatccgaatttagtgacaaaaaattttcacttacaatgtttattcgcacacacataacatatacatacatatatatatccatacacgcaaataattgaaatgacaacagttttttggggggttgattatgtgaaatgggggtttacaatacaatatgatacaacaaggggggtcgacgatccgatttctccacacgcatcgttctcagggctggctcttctgccgctgatgacgtgttgcactagttctgcggctgcgatccttccgcctgtcgcttcagccagtcgtacaccgcgcccatggagtatcggttgttgcgcttcgggtcccagatgtgctgcatgacgaactcgacgaacttcggaggcgcgtcgttcggaaattccagccggtatccgtttgtcacctgtaaaaggggggaaacgattaaaaatggaaattttttgggttttaactcactgctgccaagatcacgctcccgcgcatttctgcgaatggcgtctcgccattggtgaagacttcccagcacagcacgccgaaggcccacgtgtcgtccttctgggtgaagaagtggtcggtcagtgcatccggcgacatccatttgacgggcagttttgcgccgctctcgagttgctttgaaagtgccttggtcgccatgccgaagtccgagattttcacctgtggggaaaaatgaacaaatttagacgtttcatgacaaaaaaaaaatttctttttttcacccaccacgccgtccgtgtagaggcagttcctggcagcgacgtcgcaatggatgatgcccttggagtggatgtgggtcagtccggttcttctgtcgtgcgcaccaggaagtccccgtcgttcggcagcagctccactacgtcttggcgcggcagcttaaagttgaaaaaaaaatttaaatgtggaaagtgggggacggtgactgctcctcaccagtccgtgatagtagggcagcctccacatgtcaacgtccattgtgcttgtggccgggcacgcacgtccgcttcgtgtgtgatgaagtgttgtagacgatggacgatggacgataataataataatataatacaatatgagggcgatgaaaagaattgtgaggaaaaatgaggaaatgtctgccttttatacaacttttttccccttcatttcgaaatttttttgcttgtctatataaagggagggattggaaaatttgctctcattcattgagcccgtcaaattttaattcttctattatgcggaagatcgtctacttcaaactgttgcaaattgtgctcagtttggccttcgtgtggcaacttctttcccttcaccaattctgcggcacttttgtctctccaaaggtgttgcttttgctttgacaattcatttgaatttaatttattgttccatgcttttcaggccttcctccatgacatc

SEQ ID NO: 17105 - DNA, 1475 bp, Heterodera glycines
  unsure (1)..(1475): unsure at all n locations
atgtactaaantatgtaaataaaacttttaaaatgtttatttgggaaaaattcttcttaaggagtgaaaanggcacaaaatgccataaaaatgtcttaagttggcttagaaccttagaatcacatttttagtattttaaaaattgatttttgatatttttatgggtacattttctaaaaaaattttttaattttcacaagaaattttgataaattttcaaaaaattcattgcctcgcctcccttttctggtcgatttattgaaagaacgtaagacaataatgcaattagcttggaaaacagtcgatgcttttgaaatgatcgaatttcattctcgtctttccgcccagcggattatccttgtcgcgcgacccctcgtccgcccaaatgttaatccgtctgcctttcttggcccaattagcacaataattaggattagtgacagtaaaatatttgtcggaaaatactagatttaataaaatttaacaaaacacagtttaaatttcggttttcgaagaatgattcgccgtataagaaaattaatgaattaaatattcaaaaattttgtacattaattaaataaccaattaattatttttttaccccttctttaatttgattttaaatgaatgcattttccactgttaattggatgaacagcggatgaccttcccagaacaataatcatcttccttcattggttggttgctgttgtccttcggaaaagtgttgacattatcataatattccagctacttaaattatttaccgtcaactttcattttaccgtaatcacttagtcacccccgccccattttaccgtaatcggtgtgtcagcgccccaatcattcagttccgggcaattagtcttccataattgcattttgtatgccctccattcatttcctcccactgctcaactcgccgtgccctgtcactgccgacaggtgctcctgccgcactctgtccctttgtattggcattgtgttggcattgtgcccttttctccctctttttctctttgccttttgtgccactgttttggcgtagtgttctgtgctgtcgtcattttcccattcattccattcgctttttgtgcttaatttcccatcatttgcctacccaaaagtgcgcagcaaatccaatgaaatgaaagagcgcatggaccaaaatttatgggggagaagaaaaatggagaaagtgagtgatgagagagaaagtgatccatgagaaggggaccaaatgcataattaaagaggaggcgaaaatgggggaaacggatgaacattgngggggggggggaagttagaaggagtaaacgggaaagttaattaacaaattaagcgggaaaagcattattagctgaacagttggaattttcatttggattgactaaatcactttggtaggctaaaattaataataaacaaatcaaaacattcgtcggcttaatgttcttttgtttttttctttttct

SEQ ID NO: 17106 - DNA, 2088 bp, Heterodera glycines
  unsure (1)..(2088): unsure at all n locations
agggcattccctcttttctctcctctttttgctttgctttcgtcccatccctcgcttaattaccataaataaaacatttcccattgccgtttctcaccataaagtgcagaatcggaaggagaaaatcgtctcaaaggagcgaacgaacactaaccgtaatcaccatcacatataccataccaaatcagcacatggaaacggtattccgctgaagagatcgatcagaagtttaggaaaaattttctataaagttaaaaaggagatttcaagccttattttttattttaataaaaaagctatttcaaaaattttatcattaaataaccaaaaaaattcctttttaataaaaagcatttatttttaattttaaaaaatataaataaataaagcaaaagcaaaagccattcatcggatcacacaaagacaattcaccagacaacagaagcatcaatgacaaaattatctttttcaactcttttttctcctttaatctttgcgttcgttttttcccatttttcgcttggtcacctttttttgttggtgccaaaacaaagaaacgaatgtaaagttttggccataagaaaaaagaatttctattcgacacctcaaatttccccatgggattgcatttgtttgggggagggtggttttagaagacacgaaaatgaccgacaaagaaaagaagcagcacagctattaacaataagccgtaagagggcgtttgtcccttgtcccccccccccccggggcatttcaaacggacacttttccatagctcaaaaatatgaacaaattcagccaaagtttgataataagcggatagataagtacattctcaagtttatgttaagccatttttccttaggcttttcgaatcgctttttcgttttcggattgaaaacatttgctgctctgtgcccaacccattcatcatcatcatcccaatcacaaataagcaatccctcctcccccaaggcagatcaaattacataagacaaaagcaatggccgagattggttttgcggttggtcacttttgcacagtttaaacttaagcagcggcactttgccggcttaagtaaccaatggcaaaaaaaaaaaagccaaagaaacggcaagccaattctaacagcagaaacaatttgaaatttgtttaacatgtttttttacaaatgaattgctaaaatcagcaagaaaaagcctccaaaataattgttaaattaagcaaaatgacaaaaaattagtttaatttgaattttcccaaattgttccaaaagtattctcctgctgcttgtaaacaaacaaaatttgtacaaaagtttttaagctttttatgttccttaaattcttttttccgtttttttcactttttctcattgcaacattttctcagtttaatttatgcatcaaatgttcgcttttgagctgtaaaagtgaatttttgatcagtggcgatgcgatccctcttttgcctcctctctccccgccccctccgtcgcattttctgcaaaagtcaaaagaaatctgtacaaatgccaaaatattatgaataattaaaaaagcgaaaaaaccaataaattaatattaaaatttaataaaaattaaaatgctaaaaataggtaaataaataattcagtgcttcttccttttcctttgaattttgaatgaatgcacagctgttttccgaccattttcaactgacaaggaaagaatggacaaggaacataataaactttgtccgtcgtaaaagatgtcgtccatcaattagccttcttaaaaaataagtaaattgatggacattcaattcattttcatcattaatttcaaatgaatgtttttttattaatttaaaaaatcaattaaccaattgtttttaattacatcgagtgctttttcttcgtgtacctttctctctgttaattagtaaatgtaattaatggaaacagctgaatttgttctcataaattggtggtgctatatgacacaacggaagaattgctgatcggacgagcgataaggcagaagtgaatttataaaatttaaagtacataaaaatgaaatttaattaataattntattttttactaat

SEQ ID NO: 17107 - DNA, 2177 bp, Heterodera glycines
  unsure (1)..(2177): unsure at all n locations
tcggtcgccgactgtttgcncactttcgttggtcgttcaatgcgccaatggcttcgtcggtgtgcncattgtcatcagctattcactatttcatcgttgcattgctccatcgccgacgatggcacttttgctcatgccatcaaagaacagtttaaacgggttgatttgcggcgttgtgccatttctttttacggagaaaatgcgtgggcattttgccgcgttcaattgtgtaaacaatgcattcgatgaagcatttattttttattatttttcatttctttggcttaagcatttttgtatatttcattatttttttgtttgataaaccctttggtacatttattttcacacaaattcaattagcgacgttatgaaacgtcaaaaattttttcttgtttaaatttttccctgaaaaacccattaatccttaattgcgtgccaactttatgtagcacaaatgacgaaattcaataaaattttaaaactttattttaaattagcaaaataatggcttctccccctgtccctgttatttctgttgatttgccctccaaacttgtccaatgttttgattgtcgtcagggcgcaattcgcgccgttcgcttcaacggtaagcggaattggttactgtaattttcgtcgccaaatgtggctcattgcgtcaccacttttctcctcatttttttgttttgttttaaagcgttaatttcctttttaattgcagttgacggtaattactgtatgacagccggcagcgataagtccgtcaagtacgaattgtgaacagtattaaatctacggtattggtggatagtatccaaaaaaacaatggactggtattttggaaacgcattggcaaggcgttgctggcttatccatatgccatggcactttttcgtacaattggtccaaatgccatgacattttttcattcaattggtccaaatgcaatggcacttttttcatccaatcggtccaaatgcaatggcacttttttcattcaatcgctatttgtccccaaaaggctgtggaacccataccgtcgtgtccatttgaagacgtacagcgggctgggccaagaagtgctggacgtggccggttcgagtgacaattcgttgattttggccggcgggcgtgacaaacagccgaccgtgttcgatgtcgagtcgggcaaaatggtgaagcggtggcaaagccacgggggcgcagtcaacgcggtcggtggacaaaagaaatggctcaaaaatctgattccctaattgggctaaatacaatacgctaatcaccaatttggcattgttttaaaattcgcaataagtttaattcggagttcggaatttaaaaaataaatttaatacgttcagcgtgcttttttgcctaaatattttagttaattaaaagggaaaaaatgttaaaaatatgcctaattttttccgcttcggagtgcctttttttgctctttggcctcattttttcgccgcgattttaaaattttagttggaggtgttaggtcgatgccggtaggcccgttcggtaaattttgtaatttttcctatttttaacatattttcaccaaatttgccatttttgggtcaaattttgggtgctgtgtcgaagtgcaaaaagtccgaatgagtggtgatcagaaggggcgggtcagttcagtaccgaataatgattttaattaattataatataactattttaatttattaattttatttgctggccctaattataatttagctttatatttaatatttcctaaacaaattacatttttgtgagagaaatacagtgccccaaaaaagtcttgactcaaacctgaaaaactatcttatagttcatttaaaaacttgaaataattcatgctcgcacaacttttggtgctgatcaaaaaagtctcttacaccaacttgatcagatcactccttcctagtgaccgggacacccaaaatacactgaaaatcggggaattttcgaaatccctagggggctggaaaattttttctagagaaaatggacaagctcactggaaagagcacagaatttgctaccgaattgcttttggaatggtggttctacgatttgtatatggaaagttaggggccaggccgttttcgtacgaacacatgtttctggactataacttttttctttgccaaccaaatccaaca

SEQ ID NO: 17108 - DNA, 999 bp, Heterodera glycines
tttaacagtttatcatgaattcgaaaataaaaaaatttgcgaactctaattagtaattacaaataaatttataaaaattttgaaagatagcgcaaagtaaagctttatttataattcatttttcttctaattgcaattacctattgtaaaattgataattgtttttccaccactaatcattttgaacgctttttcgccatattcctccctttaaactttcctctcatttggggaatgggacaaattaaaatgtgtcaagattggatggtccccctgcgccacaagagtttagtgtaggtaattgctaattggacgaaaataatgatcgcacatcggagttcatcaaattgttctaaaaatttattgacagcaacgcgcaccgttggcgagaggaaagagagagagagagaaaagggaacaaatattggggggggggagggtaattagcactaatgagaaagggaaaggacgacggacacaatgaacgatcgaccaccattttatggtttcgagcgggaggaatgattgggcgggaaaattgagtgattagaccatgggacagcgaaagtcttgtgcccccgggggttgcgcaaaaatggaagaaagaaaacaatgcgcagcgaaaagaacgaaaatggcggaaaagaggccaaattttggtttctctccgtcgccattttttcacatttgcgttgttatgaaagaatgaaattttgtttgatcggtgggccgaaacgatcaaacaaaattagtcggaaaacattccaatcgcttgctccattcacatttttgttttcttcaacaaattccgtaaccactcaaatatttttattatgtaacaattccataagaatggcatttttagggataaagcaaaaataaatttatttataaaaacatttgctataagagaaaaaatagatgttttatttcttttggcaattcattaactttttaatttttatttacaatattaaaaatattatgctctgtaacgaa

SEQ ID NO: 17109 - DNA, 2174 bp, Heterodera glycines
  unsure (1)..(2174): unsure at all n locations
ctgccnccgttncggcggctccgaaacggataacagccctctttttttggtgagggcacctcgtttcgagtcggggtcgttttggcgcccacgttttggcgccaaggtcgttttggcgccgacgttttggcgccagggtcaggtttttaaattttttctatgtttgaataaatgaaaatatgtatcactaactcttttgaaatttcaaccgaaaaaatttaagagtttaaaaatattcaaaatgttttgacattttttgaagcatagcgaagagaaaaatttgaaaaaattcttgctaagtcaatttttcatgttgaccaacaaaatgttcacagcaagttgatcatatcactccttcatgttgatctacactagagatcaacattttgaaaaaaccatagttgtacctgtttcaaaaaatggcctgtacctattttttctgtactaagtacaggaaaataaatgtacaggaaaaatccaggttgccgaaaaatggcctgtgcctgtacctggatccaggaaaaatacagggctggatccaggtagatgttgatctctaatctacacccataaaacacagtcaaaatcgggaagtttgaaaaaaaattctagggggttgtgaattttttgaaaatttgaaaaacccattggaaggtaaaagtttttcactttattttgtaaaatttttgatcaaatttttaccttttttaatttttggcttcgcgccaaaacgtgggcgccaaaacgaccctggcgccaaaacgtgggcgccaaaacgacccagtcccgtggaaatttcgcatttcgcgccaaaatgcgaaacgccaaaaaatgcgaataatgcgaaaggcgaaatgcgaaaagcgaaacctcggtccatccctggtccgtatcactccgggcagtcacagcaccgaggagtccatcaatcgtcagttggccgacaaagaaagggtaaaactaattgattttatttaattattactaatagagcccgccggtcttttacctgacctgtatttttcgggcatactaccaggcccggatcgttcgacaaaacgggcttttttgcactgggttgcccgtcccgatcagttgtctaacaataacctggtccagtttctttaaaaatttagggctcgaattattaatatgtttgcaggttgcggctatacagccattttatgttttatacactttttcatgagatatatttagtaaaacgggatgaaaaaaatttgcatttctttttctctccttttggcgtactattttcatgtctctaacacatgaaaaacattaaattcgctaattgtaataattttggttgtaaggtacaaaatcactttggatatttagaatcaataaaaaaggataaaaattcgcattttggttagaaacagcagcctaggacttggagttatagcgtgataaattaatttgaaagtctcacaactttttctgagatgtcaaattgcttagcattcgcttagaaaaagattctccttttcagaatcttattttagataaaaattttgttcagtttagtcggagatgaagaaagttatggctgatcaaaataaaaaatacaaaaaggcatttaccagtgtaatttttgaattaacgcgcaaaaatttacgccaaatacgctatttggcgttttgagcaattttgtctgacaaaattgtgtataaaaggcgctgttatgatgcgttttcctcatatttcactaacgggcgtaactagagttgagcggtaatcggtaattgtaaaaaaaccggtaccggtactgaccggtaatgcaaaaaccggtaccggtactgaccggtaatgcaaaaaccggtaccggtaccggtaccaactttttccaccggtaccggtaccggtaaaaaccggtaattttccaacgtaaaaatttttggacaaaatttttattcagttttcgcgcgagtgcctgttttttagcattagaattgttcagaagtatatgtatattgagggtgaaggataaagaacactaaaattcagatgtagacctcaaaattcagattattgcaaaacaaggggtcagcagccaatttccaacccaacgacgacatcaaagtgagtggtggagcaagccaatcaattcgcattaattttgttttcatttaacgcaggtcattgctgcgaca

SEQ ID NO: 17110 - DNA, 3383 bp, Heterodera glycines
  unsure (1)..(3383): unsure at all n locations
acatnnttttttgcaagacaaaaaaattcctttcgaaatttgattaactttttgtgcgagaaacaaccaaaaaagtgcctttttggcattcgtaatttatttaaagtgcctttttggcattcgtaatttatttaatcaaaattattacccttttggttgtttggtcaaagtccggagcccccgatgcttttgcatttttaagaaaaaatttagcctcttgggatcagtcatcctcattttacaataatttttgaaaatctgaccctaaaatgacataaattagtcattttttggcgaaacacgggtacaaattcctgtttttttcccccgagctttttatctatgggcctctgcatgggatactgtgggtgaggggtactgtaaactaaccgtaccacttcgccaaactgcacaaacttttaaaaaacaaattttgatttccttgttttcaatttgaatttttttttcccacaggtggggctttggcctggtcgcactgctcaccgccatcaactttgtatactacctcttcgtgctgttgctgttcccatggacgcacgagagttcggtacgccatctgttgaagcaggacaaataccgggagattgtctactcgaacaagcaccgcgagcgccggctcatccgccgctttgccgagcacgcgctgcgcaaggacggggtgcgcgaaaattttaaattaaattaaaaatcattttaaaatttgcaagtttttttaaagaaaattagaaattcaaaaatttttgttttttggcgagcggggaaacggctggcgcggagggggcgggcgaatttctctccctagtcactttttttattcttcaaccaaaattaaacattcaagcaccatcccttttgccaaagttcgactcccattgagtgctgtaaccatttttggcaatttaaaaaaatatttattttaacaaattaattaatagatttgtgctaaggttttacacttttaaatgcccctgattttcctcctctccttctttttgcagattctgctcttttggttcatcgaaggccatgcaggaccgatcgtggcgcgagagttgatgggcgaattgttcgaaacatacaagacggacatggtaatgcaaatgaataaattatttatttttttaataaatattttaataaatttatattttttaaatttaaattaccaaatgaatttaataatttttttctttattaatttaaattttaattatttcttttgataaaattaatttttttttctatctattccatttttaattaaatgcatatatttgtatttaaattcccaagtaaattaaatttaataatattttatttctttaataaatatttatttatttttattaatttaaatcaccattacttattttaattgcctatttttttgttccttttcagcatgaagaggatgacgagcagcccagtgaagtgagcgtggtcaacaagaagggcaagggctcattctcgtcgcaaagcaccggttctctggacgacgacacgtacggtggcattgcgcagcgttttggtaacggtaagagcgcaatgaattaatgtaattaataaccaatttttaaaatgattttttaattataaaaagggggtaaagctattatctatttcattgaattgtttttcaaaaagctcgagaattacggtatttgagaatttttttaccgtacactaaactcactcactcatgaaccactttatctgtttacaaattttccctgtcaccgaatatttgttacagtaactatcgtataattgtttttttaccgtacactgactcattagcctcattattttattgttactttacaacaagttttctcttgggccaattttcaacaagccatacctcaatttttggcaaatttatatacataaactgctcccctcctccccggcaggcatttctccgtccgcaccgcccaaattcctgcccgaggcgtcctccttttctcatcgcaggagcgtgaactgcttgacacggacggcaacagcacggagcagaccgggctgtactcgtcgacgcccaagcagaaattgttgcccaacgacaacaacaacgacataaacccgcaccattatcaccaacagcagcaccacaacaacattggcggacgcaacaacggacggtacccgccgcatgcaggtcggccgggcgaaaaaacgataggtggacagatacttttgaaaaaacaaatcagcaatttttgatcacttttggcactatgaccaaaaacccattgagaatttttttttatttttcgcgtggcgggaaacgaacgacctgctccgtcctgcatctctcccccacccctccgaatttttttataaatagagatttttattttataaattgcttaggggtcttttttagaaattttcaaaaatttttccaaataatttttttcctacaactttataagaaaattttgaaaaaattcacttttttaagaatttgtttttttcatttttaggttttttttattagaaaaaaaataaacttaatcctttttttaaatttcccaggggaaggtttgggaaacgtagtgaactaacaaatcaattagaattttaattttcaacaaataaacgctttttcccccaggcgatcgtcggcgtaggaacggtgctgacatcggcgctagcggcagcggcggtggtggtggcttcctgtccagcgtgttccgtcggcttggcaacgccgtgctgggccattcctcttcatcgtcctcgcatcggtcgcacccgtacgcctccgccagcttctacgggcgtacaccgatcaaacaagtctgatcagtggcggtggcggcggtgatcagcgcggcggcttccgatttccgagacagaaaatcactgatcaaatgtatctttgttatcgttgtttggtgtcttcttgttgtccgtctcattcacatggattttgatcaaatcggcagggattgattactttgattgattgtgcgcttcattatttttatcatttttatgtccggcgggccttttttttgcatctttccattctgttattttttgagtatttgtcaccaatttattacatatttgcatcgtatttattcagtttcattacagtacattttcaaattgtctcaatttttcatcgcgccttcattcatcaaacacaatgtgcccatttcttcattccattcaaaaatcatacaaacaatcaatttttgacagattttccaataaaatggtctctcgttctctatcattccctcttcttcttctaatattccaacaatttttttttacaattgttgtcatcatttggcttttttttattgtatgttttttaactgattattttttgtgttgggacggaaatc

SEQ ID NO: 17111 - DNA, 2376 bp, Heterodera glycines
cgcgaccattgagccggcggaggcgctttccatcgatttgcccagcgacgggtcggagcggcgctggtgtttgccgccttcgcccaacagtttgatctgctcgcgcgggatgcgccacgtcatgtcgtacagcatgcgctccttttcgcgcacgtacagaaaatagccgaacggaatgaccactgaaagaggcggaaataaattcgaaaagtgatcggaaggagcaaaaattggaatgatcagagagacaataaaagaagtgatcaaaagcaggaggaggagagaaggtgatcaaaaaagagataaggagaaaaggagaaaaaaaggaatgatcagagagggcaaaaaatgatcaaatatggacaaataaagagatttgaaagcaaaaatcagaaacaaaaaccgaactgatcaaagaagtgagcaggagagggagtagtggagagataattagcagaagtgaaactgataaatgagcatttaacatttattagtgacaaccaaatgaaatcagtgactggggaagaaatgttccaaatatttaaatggggacaaaaaatgttgtactgatccgctgatcagaggagtgattagcagcagaaaacaagcacagagtgatctgttgtaattggacagcaggagtacctgccaagaacagaagcgcactgcccagcacgtacatcgccgtgtagtcacagagactgtcgtcgaagccgcaacggggcatatccgtgggcatgtaaccgtccgaactgctccaataatggctgagcacttcgtgggcaaccttttcattaattgctgaattaaaaatagattaatagtaattaattacatgctcagagcagtcatgttccatcttcaaacacttcaggcggtcaccaaggcgagcggtcaattcgaccacaattttcattgtcccttaagggggggggggaaggcattgaaaaaacaaaaataattaaaaatttaaaaataaaataaaacatttaccatttttggtgtggtaagtggcgtaacttggcactcgaattgccttgttgttcatcagcacttgaccagtggcacctgaattaaaatcgcttacaattaattggttaaatgccaattaatttcactgatgggttaattattaattaattaattaatgttgaaatgtgccaccaatgaattgtctgccggtcattttgcgccaaacggtcttcccgtccagataaatcgttttgtttttggtctcctcaaacgcgtcgcgaatggccaacccgtaaaggaacagcgcgtcgtacagtgacatgtacgagagggtggcatactgtatttgggtgtgtggtacggtagggccaaccgaattttttaaaatcaaatccaagacgtacatgattactcacaacgccggtgacctgaaattgatgacgggtagaatcatttgcgcggatgattcattcatgagattttagggataaattattaaattgggggcaaattgactgagccactgataatagcagcgctatctgattatcaacctgatcaatgtccaaatgcaataaccaaatgaaagccaactatagacttcaataagagggtaattagttaactgattgactaaccagttaattagttggctaattagttaattaaatgcaattgaacaaattttcggcttctgaccatgttgaagcgccgctcaaagtcttcgatgaatttcttgtcatagccatgcgcagtgatcacaattgcgtcatcaaaagcagccttcacctcctgcttctccacgttggtcgactcccacgggtaatggtcgttcatctgagcaaaaaatgattaaagtaaattaaataattaatttgaattcggcacggacgtgggcaagccacgggatgatgtacacgtaatcggagctgaaatggagggaccattaaaaaaacctttattcattttttacttggaataattaaattttatacaatacaattattttttcagtttgagaaatttgaataaaggtgtttcaatttttttttgaattttaataaaattaaatattttttggcacacgttttcatgccggagcgataggcggcgatcataaaggcggttacgctgtgcaaatccatgcccatttcgacaatgacaactgaacatatgtgggcattttgaggtcctactcgccgattcaatttatttaattaaaattaatgggtttgcattccaatggcacaaatgccaaaactcactccgtgcccgcgtccgcaaatgtttcagtcgccccgtggcgatgatttcgtccgctgtcatgtacgggtcaaactcgacctccgtgtttatttcgattaaggtctccttcagcgaattcttcaatgaatacactgacag

SEQ ID NO: 17112 - DNA, 1575 bp, Heterodera glycines
  unsure (1)..(1575): unsure at all n locations
taattggttattacgtataattagcaaattagagaattattaagttaaagaaacggttagaaacnaataaggaaataatcagaaaaaatagataaataaacttggatatttcaaaattaccttgagcgaacgatgccaacctgaggaggaatntaataataaaaataaattttaataatatttttttcgccatcattcacctgtttccagccgtacaaatgcaaaaaagtgatggtcgcccgtgccatttcggtggccgaagtgagcgcaacggagcccaaagtgtcgaacactaacaaaaaaagatcaattttaattaaaattaaataattcgaaaagtttgaccagttctgtccgagagggcgtcgtcgcccgacaaatgcgccacaattggcacattccatcgggacaccaaacggccaatgaccagcatttctgaaaaacgaaacaattagacgcctaactagaacaattagtcttcctaattggctgctgctgaccgttgttgcagccgggcccaaagtaaacgctggcattgcgcaggtaatgcaaataggcggaatgctcaacgccgctgaaacggttgcacgactccatcgtgtacacctgacaaatgaacagagcagctgattttgcttttacatttaattgattgtctatggaattcaactataggcccattaagtgctaattggccattaattgattgacctgtaggttcatcgactccggcaaaatgttgcgctctttcaaatcgctggcgcacaatttgagcaccaacggttcgtggataatgttcgggttgtttggctgcaagtgcgcaattttgatcacactttccaccgtatttttgcagataatgggcgaaaaacggaggaaaaaaagcaatggcaaaaaaggaaacaatgccaacgaaggcggaaacgaaggtatcatctaaataagagaaagaaaatggaataaatgggaaaagaaatgccaaaattcaatttgatatgagagaagaaatgccaaagttaagtgataatcagacatttaatttgaaagttggccgacgaaaggactggacataattggcacattttatagctgcgattctgccggctgatggatgcttccgtggttctgctgctgtatgtaaaccacaacgcgctcacttttctctgtacggctaatccggttgaatttggcacttcaaacggcgcagattaagtgggcgatggacggacagagatattccacttaattggtgctaaatccgcttaattcgggttaatggacgtgaggaagcgaattgccgcgcactaatggaagacggtggtggtggtggacgcggaggcaccgggcgcaattccggcacaaaaacagcgcagaaggcaagtgagaggcattattggcattggcatttcacacccccaaggcggggcagaaacggtggctaatggtaaacggtaggccatttgttgcactaatccatgccaattgtacggtgagtgatctccgatttattggactaattgacagacactcaaaaaacaaaataaataaaaataattggattgaatgaattgaaat

SEQ ID NO: 17113 - DNA, 3169 bp, Heterodera glycines
taatagctgtaagagcatagtcctaatgatggaattatcaatgaaaaaacaatgaaatcggaaaactttttaccaaaaaattcaaatatgttccgacgccgaaagcgggcatcgcaattcaaaaatatttttcctaattttattttgtgccacagctttcatccttttggcaatttcgtttggcctaccgaaaataatttcgatcgtctcaattatccttttgatgtggctgtttctgtggtttatttcgcgaatgtgatttgtgacgattttgatggacaaatgaagaaggaaaaatgattggaaaatttatagccgggattttctgggccaaaattctggaaatagggccacaaattcatttattttttcgggattgtaaccccgacctaattagaatttttttttattcctacacaaatttggatagtccctaaccaaagcaggatggttgctgatggcccaaaaattttcggaagtcggaattccgggccacacaaaaaaaaaattttttcggaagccggaattccgggccacacaaaaaaaaaaaattcgtaagtcagattaagaggcccaaaaaaattccggaagcaggaatagtcttacataattggttaacagttgaaaaatgataagccttacaaatctatgaaaagcatcataataatagatattaattttaaaattaaatttttctcgaatttttttaagtcgcatatttattgaatgcgcgtcatgactaataatgatatgatattttgaaattttcctgattttaagacttttttttgaaacctcctcttccagtattatctgattgtattgagagtattccaaaatataaaattcactctttttttcgatttttttaaaaataattttctgtcgtaatattaatttgtatgaatttaatttgtgcatccgtttttttttgtaatatttggttcatttttttaataataaattccatttttgcaacaccatttcctcttgcccaataatcattgttctaaattttaatttaaatgccaagaaacaatgggttacgctttgaccattcgtttccgattatttttagttttacgtaattaaaaatcatcaatttaaaagtgagaaaaaaaaagagagttaatcccatgtcttttattgagaaagaataaaaaagtgaaatatttttaataacatttttataatttaaaaaaatattatttaaaaacaaataactttggtctaaaattttgattaaaagaaaaaattaatttaattttagaacttttcaacaaacctatttttctcttggggccaatttactattacaaacagaaaattccaattattattttttcttatttttttttatttgtccgatttatttgacgtaaaaattccaattttattcataatttttatatcatatatatatttttgtaaaatatgtatattataatagataataataataattttaaaaatatatttaataattaaattgaataatttaaataaattaaatatcacactaaatgaaattacaattaaaaaatcatttaaagaattgatttccattttttactaattctaataataatttgctcattttgatgggttaggtggtgatgccaggtgaaaattttgagcatttgaactttaaatacgattgaatgaaattgtcaaacagattagtcttttatggcactgtcacaattaattatttaaataccgtaattgttacattatgttttatgacattttcgtacattagaccaaaaatttttcacaaaaatctcgaaaaatttcttcggtttgggaatggatacagagattcacaataactgagtacctaagtcggtgatgaatttcagtgcccaaaaattaagtatgaattgtcggggaattgaaaaggacaaagggtcataaagccatggtttgggaaaaacagtaaatttcacaactcggatggattcgattcgtaggaatttttgtaaatatttaaaaacttttaaaaattcagggaaaactatttttttacaattttttcaacatggatttgtatctgttccatgccgaccggtatcaacaattgtacaactgcagctacgatgtgaaccaagtgccgttcgaggatcgtcaacacattgcacttggcacaatgttcatcacattggctggaattatggaggtggacgagtttttgatattattatttaatatattattaaggaaatcaaatatccttgaatatattttttaaaaggcaatgctgagaaaaattctggaattgttaaaaagatttccaaggaatttgtggaaaatttttcgattgaagtttggtttaattttaaagaaatcttttttatccgggggcataatgcgaaattgatgggattaaagtagagtttaaagaaaagttctaatttaataatgctaaagttgattttcaattaattcaaggacatttgttttgttggtaaaacccagtttaaggcgtacttaaaagcaaggacaaacctttctcaaccaaaacatacaataattgttgttgctcttatttggtcttaaatatttaaaattatttgcttttttgttggctaatctataactcattaattaataaaaattaattaattaattttaatgatactctagcactaattaattaatttattaaattaattgccctaattagctgctctacattccatgcacatttgccatttggaaacaccgtgaaaatggctgctacaaaatcatgttttacattgcgatcaccgacatgatggcaatgttgatgaacggcattgccaccggctggttggccattatcggcgccgtgttctgtactcatccgaatttgacttacattttgggtgcctatgggatgtgtaagagaagcaatttttaaatttacaatttaaaataaattttttcaaatttttttaagcgttatggggagccgaatcaacagcggaggtatttttttaatgagcagggattgtatttttcatagaattcactgggatggacatgtacttggatgtcctgattgacctggaaattttgtccttatttctaaatcgaattttgaatttatttggaaaagaattcattgaaacatgaaatatttaatataaagtagaaaattagtacaaattttttagaataaggacaa

SEQ ID NO: 17114 - DNA, 1581 bp, Heterodera glycines
tttttagtcgcatttttaaacgacgtccattttgcaggcaaaaatcgaactgttgcgcagcattgaggcggacctgaaggcggagcgcaagctgcgcgaggagcgcaatgaaataaaaaagaaatcaaaggggaaatgatcttttcgggttgaatattttttttgtcaaaaattgcaaaaacaaaatacctacggtttcgctttcctgaaacaaatccattcctaaatccctactagcccaaaattcgaaaaaaaaaatttgatctgttccttaaggttatgatgacaggtcaaacaaacacggccatgaatggcttaaaaaatgaaattctttttatttgccttacggtttggccttcatttacagtatttgctttaattatccccagtctacgaggcgtttgaaaaataatcacccatggggaataattagagctaatacggtaggtatactaatttttataaattttaatcaacaaaaattgtgaaaaaaagttttgcataaaaccgcaacaataattcgtcatcattttgttgttgccccttttcccggcctcttccatttgttgtttcctgcaccggtctttgttctttttgccattccgacagctttctttttcgtccttttctgcttcggctgatcattgttttcgtccaattgtgcggcaaggaatggcggcaaattctgttgctgatcacttcgctgttggctgcacacaatgagaaattgtttaccgtatttattgaaataaagccaccgggggctgtaattcagggggggggggctataacttacctatatggttcgtaaaattaaaattttttatttaatcatcttaggttgtttagaaagtcacttaccgtaaatccgctatttgaatgcctgggcattgtattgttcaacccctcccaaaaggggcatttaattggaggggacatcctaccagagggggacatagtaatgttcaatcccaatttgtttttgaatacctaaatttagctaaacaaatttgcttatacaaatttctgacccatcaaatgaatgtggcaatttagctatcgaaattggtctaaataatgtcataatcgtgttcagcgcccctgaaaaccatatatgtgactttcgaagcaaccttagatgattataaaattttaaatttgtggcgtacgaacccatataagtaccaggaattcctttcaccgtcaaccctaagggtactaatttggtttgtatcctatattttggtcaaaattaaaaaaaaaaattttttttgttcttttttatcataattgttttaagtaacaattctgttactggtcaacatacaaatacaattgaatcgacgtggcagaagttcaaagatgagcataaagtgagatttggcagtcacagatcacttttttccacatatatttcggattttttgtggcgtaagcaatttggaggaccggatattttttataatttgtggtcacaaatcgctgaattgtacccaataaacacatacctaattcaccgtttatttgttacttaaaacaattatgataaaaaagaacaaaaaaaaatttttttttaatttt

SEQ ID NO: 17115 - DNA, 1704 bp, Heterodera glycines
  unsure (1)..(1704): unsure at all n locations
gggggggggggctataactttcccttttatggtccgtaaaattaaaattttttattttatcatcttaggttgtttagaaagtcacttacccgtaaaatccgctatttgaatgcctgggcattgtattgttcaccccctccccaaaaagggccattaattggaggggacatcctaccaggagggggacatagtaatgttcaatcnccaatttgtttttgaatacctaaatttagctaaacaaatttgcttatacaaatttctgacccatcaaatgaatgtggcaatttagctatcgaaattggtctaaataatgtcataatcgtgttcagcgcccctgaaaaccatatatgtgactttcgaagcaaccttagatgattataaaattttaaatttgtggcgtacgaacccataagtagtataggggtaaaaatctgggcccccccctgggcagagagatgcgcattcactataggagagaggagagagttagagaaaaagagtaattgcaaaagcaaagaaaagcgattaaattgtaaatggacccccggccactaattttggtgcaaaaaaccccagcctaacggtattcccggatacatttcgcaccgatgcgcgcgtcacttctttttttgcgtgtcccaaaatagtgatccaagttaaagttatcaatttgtgattaatgcacctatcattatgaatcgaagcttagaaaatgatttggttaaatctcccccccctatatgtatgacccaaataaaatcacattttagaaaaatcaatcgaattatctcttctcttttgaccatggcgatttttagtgtggtaaataaagagttgcgcgaataatgattttgtgttaatatttatatttttctctattttatatcatagaattttagaaaaaatgatagaattttaccctaatctaagctaagctttatatctatttattgctgttaaaaattaaaattcgctcgggtgtgtgggtgcgatgacatcctttttttcggagatggtccccctaatcaatgacaaaggaaaagatgagaaattaaatgacaaaaaattaaatttatgaaaataattatgaaggaaaaagattaaattgcttaaatagttttttaatgagaatttgaaaaattgtttgattttttggaaaacattattctatcgaagcaaaattgttttttttggataagagaaattatgcctcagttttaattttcttcttgtccactttttgacccccaccccaaacggaaccaaaaatttcatgaaaaggaattaaaatattgatcccccctaattaaatgagagagctgggtcgagggagagagaatgagttgcaaattatcacgtgcgttagtggaaaagtcaattaaaaagtgcgcgaaagggggaataactaaactgaaaaaaatgtatttgggaaggtaaatgaaaaagaaaaacgtaaagagtttaagctctataacaattttagaaaacagaagaaaaataatcgtttttattttgttaaatttctattctttttatttgtcatttgttaaataaatttacaaggaaagcaaaagaatatatggaacataaaaaaggaaaaataaaactatgaaaaagctatagaagggaaaatatggcatacagctcaattttgtcatccattccaaattaataggtattcggtatttgtcacttcgaaaaata

SEQ ID NO: 17116 - DNA, 1516 bp, Heterodera glycines
  unsure (1)..(1516): unsure at all n locations
ttagcaaagcaattattttatttttgcacatttaattccccgcacttttccatcagaggaaacatcgaagcgaagtgactgccgcggtcgtgaaacaccgtaaaaagcactttggcacattggcaccattggtgggaggcgaaaaacagcagaaaaagggtccatttgtagagagaaaggcgcataacgcggaaaaaaatttgcaaatcaaataaaattgagccaaaaaagaaaagtgaaaataaaaaaatttaaaatgaaaaaatcaattaaaaatgaaatttaattttataaaaaatatttaatgttctttttacaattaacaaaaaacaaaactactttgtctgattatttaaattagagagcggaccggaccgggcccggtatcggtttttaccgggcccggcaaaccggtccggcgatttttggaaaaaccggttcgaccggttttccggtttgaccggtttttgagaggcctggcccggaaaccggttgcttctgaaaacatcagaccggtccggcatttttgagaattccggtctctaatttaaatttaaaattccagtctttacgaataaaaaaattataaataaaaattaatgaatggtaaaaattgagccatttaaaaataattatgttcgctgaaaccgaataatctttagtgaaagttttagagatatttagtagttttttcttcgataagatatttaatccggcacaatctaaaaaaataaaataaaattggagaatgggaaaattaacgttggaattttaagagaaaatctcaaattttttttttatcaaatcaaagaatagagaaatattttatcaagtaatataaaaatgaagaaggacggacgaccaaaggaaaatgaaagaaaagggcaaaaacaatcgatcaaaagaaaatggagaaaagttcacttagatataaaatagatacctaattaatatttgttgaaaatattcaactaattgcctaaccgaatatttaatagaggtcggaaaacagtggcaaaaactcaatgtttgtttccatacaattaattgttcttttctgatttgcttcttcaatgtgccacttttacggcggacgaaccctttgtgatcactgatcagcggatgagtcatcggatgccaaacaacgcaatgccaaaatctgctcaatgtttcggctactctgttgtgcatcatttttttgtaaaaataatgacaaatggatgatgattagggagtccaaaaatatggacataaaatcgcgaaatatggatataaaatggcaaaaatatggacataaatttttccaaatttagggtatgatttctcaaaatttcttcaaattcgctaaacggaaagtaacactttcagaaatggctaaatcttataaaaactcgttttagaagaaaaaaagcaatttcttgagaaaatcgaccaaaaaatcgaaatttccattttttgcttatttttgatataaattaaccaatttttaataaaatttanatttatcaattttttc

SEQ ID NO: 17117 - DNA, 1479 bp, Heterodera glycines
ttttcgacaaaattttgctaaaaaatgtctttttcagaaattttttcggtccttaggagtcaaaaaggccaatttatctcatgggggccgttctaaaggggttttttggaaaaatgccaaaatatggacataaaatatggataaaaatgccaaaatatggacaaatatggaaatatggacataaatcgcgaaatatggaaaaaatggatatagaaatccatcctagaagcttcaaaccaagctaaaaagatgttttccatgcatttcaggcctcccacagtccaggaaaaaatatggattcccatataattggactccctaatgatgatcaatttatataaattaaatcatcaaatgaatgttctttttatgtccataatttctgtccgtttaaaattctctaatcctttttagaatctctgatgcaatttacatatttttaatagtgtaaatgttcttaatctttgtgtgactgttcacatatttttggtttcatttttttccattttttgtgatttttgcaaaaaaaaaaaaagaaaattaatttgacaataaaattactaattgtaagcaaattgttttttttcgtaattcgttattcgttttgcatttcttccgcaagatctgtcttttgacgaacaaataatcaatttgctcacctaattgctaaattattgcatttgtaaaaagaaaaaatcaaaacttaacaaaaaaaactccgcaattttcctcactattacaaacatcaaaacccgaaatttgaatcctaaaaactgtaagtaccaaaaatattttttcctttctatgtttataaagaaaggccaatctaacgttttaaatgcaatttttatgccattttatttgtgtcgtcaaaatgcagcagcttttgttttttctgcttttggtggcggacatttcgcacggaaaagggcaaaaagaggaaaaatccgaggcaaaatgcgacgaaaaaaataataatgaagcgataaggtggaaaataagcataactaattgtttaaatatccaaatatattttttaatctttaggcttcacaattggggcggcaatttcaaattttgcacccaaaatgtcgaatatccgcgcaccaccgccgaagtgcaacaaattgtgcggagggcacaaaagctgcgcgtttttggcagtcggcacagctacaacaaaatcgcggacagttgcggcacgcttttgtcaacgctcggaatgaattcgatcattgccatcaatggaagccgaccgaccgtaacggtgcagccggggatcacttacacggacttggcaccgacactttgtcagttgaaaatggaaaataaaagtggaatttaattgcaattaaaatcgattaaatatgtttgagattttggacagatgccaacaatttcgctttgccaactttggccgcaattgccgaaataaccgtcgccggtgccactcaaacatgtgcccacggcagcggactg

SEQ ID NO: 17118 - DNA, 902 bp, Heterodera glycines
ggcgcaattgtggaggcgcaaatgtggaggcgcaaatgtgagggcgcaaatgtagtagccgcaaatgtagtaggcgcaaatgtgtaggcgcaatggtggaggcgcaaatgtagtgggcgcaaatgtgagggcgcaaatgtagtaggcgcaaatgtgtaggcgcaaatgtggaggcgcaaatgtggaggcgcaaatgtggaggcgcaaatgtggaggcgcaaatgtagtaggcgcaaatgtgtaggcgcaaatgtggaggcgcaaatgtggaggcgcaaatgtagtgggcgcaaatgtagcaggcgcaagtgtggaggcgcaaatgtggaggcgcaaatgtggcacaaccatagattgatataaaacattaaaaatttgatttattttgtcataacaccgtcctgcttgacaaagcatcggaatttggcatggaaatggaattttaagggatttttgttcaaaccttcaaaataagtaaagcatagaactggctaatagccacattaaaaaagcattcttatcgtctctgagccttgatgttttttctgtggacgcgtaaacattgattggacgcgtgaactggaatatagccattcatctcagaggaaaaccgttcaaatgacacattcaaaagctcttgatgcgttaaaccaccaaaaatcaaggtaaaaattcgaatcaatgtgatataagaagcactggacgacaacatcgactacgaggaggaggacgacctttctgcctatctactttcttgggtgctatgtcgttatttaaaaaaccatcaatatatagcttagctcaaaagcaacctaatttttaattcttgatatcattcgatagccctacgtcttccatatccgtctacaaaatttcaaaaagtttcattaagtttcaaaaaa

SEQ ID NO: 17119 - DNA, 1148 bp, Heterodera glycines
tggagggaattcgtcccttttgggtcccagaattccatcgacacccaaaatcagtgggcctaagaaagtcgtgactcccttttttggaaaggggcataactgagccggcaattcgtactgggggccaagagcattccattccccaccatgcagtggtaaacccgaaaaagacgcgttctttacgacgcctacgcgcatgagcgtggaaaggcttcgttgaatgaactgctgctgcctgcgccaaatttagtccccgaattggctggggttttacttcgtttcagggccatggttcaccctgttctgggggacattgaaaaggcattcttggcctttggccccttaacacagtggaccgagaagtggacaaatttctctggcttaaagacccctcctagcccctgaataatgacaatttagtgttgtgatttatcgcttcaaaaggatcgcgttctgagtgaattcatcgccgtttcttcttgcctcagtcgtccaccaccatttatcagaatttgggaaccccttggggctggaacataatttttagtcgacagattactcctttgtagcgaatcggtcgaagacgccgccaaagctgttcaaactgcccgagaagtgatgagcaaggctggcatgcgtctccacgaatttgtggcagctgatccctccgttttgcatggcattccttctgacgaattgttgacgggcgaacagcaaaggtttttgggcagtttgtggaatttggccaaggaccaaataaattttgcattaccccgggccaatgatttccccccaacccgcagagaggcctttagaacaatcgcttcattgttcgaccctttgggcctgtatagtcactgcctcgttaaggccaaaattttgtcccgattgcgttcggggccaaaggtcgggcactggggtcggggcaggcagggacgagacacagaataaataaaaaatttattccgggaaatgacctcaaacttgggtaattaaacaaaaatttgaaatggtgaacgaattatcacaaattgatcacagaaaatgccatcaccggggaattatcacaaatgaaattgggcaccgggatgggacaggaaaatttcaaaaaagggggcattcgggcaatggaaaatcacagatttcga

SEQ ID NO: 17120 - DNA, 1063 bp, Heterodera glycines
ccagcatctcggttttgctctgctgcttttcgtggcaaatagcaactttttcaagcagaaaatgctggcgttccaagcagtccagtggagctgaaactttgcagaaaggggtaatgaagtgcgctggttccgaatctgaggccgcccgggtgaccaagttttgtagaaattaattaagattttttaatcaggaccacccaaattacaacacacctttattcttatgttttaaatcagtgtacaatacactcgtttcgggaaacagttgtaggtatgcgcaatggggctgctatttgtcgagagcagagcgaaagccgaattcatgttctaaaattattaatttgttgtgtctaatgatttaaattaggcagaacaacattttgctttcagaaattgtctctatgaatgcgcgtaagaaataggcaaatttccaatactgttatacaaaagaatttcaaaatttttgaaaaagccaaggtcctgatttaaatatgctaaaacaatagaaaagttcggaaaatgggtagtctaaattgccaaaaaacaaggcgcacttgaatgctcatgactatttttgacttgacactaaagataaatattttttcaaacactttctaaaaatatttgctctatagcatgtttagcaaaaaataacgtgaaaatttaaatctttaaacaacctttcaagaatttgtttctaacacgcaaattcgccttgattctatcaaatccagactatccattttccgaactcctctattgtttgagcatatttaaataaggaccatgtgttttttcaaaaattttgaaattctttggtataacagtattggaaatttgccttatttttacgtacattggtgccatcaagttcccgaaacccattcatttttcagcctaatttaaatcattagccacaacaaattaataattttagaacatgaattcggctttcgctctgctctcgacaaatagcagcccccttgcgcatacatacaactgtttcccgaaacgggtgtattgtacactgatttaaaacataagaataaaggtgcgttgtaat

SEQ ID NO: 17121 - DNA, 1261 bp, Heterodera glycines
actttgcggttgcaaaatctgctgatgttgtcctctagcagaaagggccatggacgaagaagagcgctgatcggagggaaattcgcggaaagagtggcggacgaagcgacattcgccgggctaaataatgaatgacagttgatgaaaagcttttcgccccccccggcacaatccctactcacatttaaacacaatttaaaaatcctatcctcacttctcaccatgatcagtggcatttccggtggcaagtcgtcctccgcttcgtctcgctgtctgccgtcccttcccctcccttccaatgcttccgtttcttccccgtcgtcgtcagtgcaacggcttattcccgaaaaggcgcccgaagaggtggacgaacttccggtgctaatccgatgattggcgaccaaatcagccgctgattccaatcgctgcttcgccggtgtttggtccacaaaatgcagaagggacgtgaacattgaccccgcttctgccaccatcgaaaagcttcccgcgccgtccaaatgttcttccatttctctgcccaatatttccaatctgtgccgaatgccttcccttttgtcttcttcctcgctgatcgtgcacaactcgtggactttgaggctttgctctgctgctactctcgacgtcctttcgctgccaatctcgtcaaattgatggcccaccaaaacagccgtggggtctcccattggtgagaaacggagaccgggcccaccgaaatgggagaaacattccgcggaagagccgttgctgctggtcacggtaccttggacagaagtcaaagtgggcggagcggcaagacaaagaaacagtgaaataaaaagggaatgaccgtactgtagctcaatggccgattactgtcgcaacaattcccagtagaagccgactcaatttgatcattgccatttgggagaatattttgagcactgacagaaacaccagcagagggtacactttcattaatgccatttcgttgttcgaccgaaaatgccatcgaattgcttaattcggaacaaattgcctggagcacttcttcctaaaccatccgaaattaagtgatttgtggtatctgccgaactaagcagcttcctctgcctttcctcacctgctcataatccgtccgaattgtccctttcgtcactttgtccgtataattggcatgaattatccctttcgtcactttgtccgtataattgggatgaattgtccctttcgtcactttgtcctttccgtcttttctcacttt

SEQ ID NO: 17122 - DNA, 944 bp, Heterodera glycines
cttcaaatagcactaaataattttaaaaaattatttattttttgttggatttatttcgctttttccaaatcccccccccccttcccctagtgattcattttattatattccaatgctttccataataaaaataaaaaatttaattaattttcactaattaaattttgaattttaattggtctgtttaaataacaaatgaataaatttgatgagtaaaattggagaagttttaatttttttggtctcacaaagtttctgaaatcccttaacattcggccgtaaatgttgggccgaaatgtaaacggagtctttccctcgggcaacgatttcatttcaaatggaaaaccttcggccgttttcccatcttttgaggccgtctttctttgcccaatgtccatcaattttgtccattatgtgctttttcgagggttactttcccttggcattcttttcacgtaaaagaagggtcatttaagccctttggccattgtccaaacgatggccaaaattggctctcaaaaagagaaggaaaagagggaaaacagccgacactcttttgccatttgacaaaaatttaaaaataaatagtgaattttgtggtgaatgatttgtaaagtgcgataaatcagtccgcccatgggcaaaagtcttccccaattggccactgagttttgccgatgaccaaatttgcctaattataagtgtcccccgcgccgcgccccaccggcgactcgcctcaatccttcgattagactccgcgatgatctttcccacattttccatcagtcgtgcgttttccatttccaatgtcttacaccgctttttgtatgcctccaaattggcgcccaaatcgaattcggcagacggagaattgacttggttctgattgtcgtccaccattttctgtgtttggtcgatcaaaggaggagacacacttttggagg

SEQ ID NO: 17123 - DNA, 1435 bp, Heterodera glycines
  unsure (1)..(1435): unsure at all n locations
gatcatttcttaaattgntgaaatcattnttaaaatattttgnnttaattaattaattgatttatttttactttcaantttntcagaattctttatttatttttcagagaaaaacaatcgggatttgcagtcaaacttgcggttggttgtttttgatgtgatgactgatgaccatttattttaattatggttctttcagatgccaattttggctgctggggcaaggaaaacagagactgtgtgaagtgccgaaatttcacgatggaacacaatgtgtgcgcggaacaatgccatactgagagggggtaaataaaataaacaaagtcatgcggctcgggattagcgttattctagaccgaaattacgagatttgagacagggatttatttttaaaattttatttaactgttaacaaaaaatcaaaaaccaaaaataattttttaattttgcatagcaaatgtttccatatcaatgtttttatattcaaacattaattatttatattattcaaataatcactttcgattctgacggaacatttaaacctgagaatttgatcaactcaagactctcgatactcaatctatgtctcccatttacagccatttcattgtttcactgtcctccgctgacagtgcccccgttcggcattgccttcggtgccatgagcagtgccacgagtgctacgggccttccgcgcgtcaatgttcaaagtgtcaaaactttcaactttggctcaacaccgcacttccgctggcggacaatccgtacgtcgacgcgggcactgcaggggccgtgaagcaatgcgtggccaaatgtccgaacatgacgtaccccgaaggtacacacagctgaattctcgagtatttcagaacatttggcaacaccaagatcatgtccatgggttttggtctcacatcttggttttttcgttttttcttgagtccttagaaaatttgactccgcggaggggaggagtggtgataaaatgaacacaatcattttcagacgatgtttgcgtgccgtgccataaggcgtgccgcggcggttgcactgggccgagcgcacgtgttggcaccggcggatgtaatcagtgtaattacgcattggaaggggaacattttggagaggtaaaaaaaaatgtcaaaataattataaatatttattttagtacatttgtctgtttggtgatgagccagaaaaagctgtttgcggtgagaagaatgggcttgcagaaaattatttcatcacattgtccaccagttcatcttcgacaacaaaatatgtaaataaacgcggaaattaaattaatttaaatgaaataacgaattaattattctaaatataattcaattcaaattattatcaataagattcgtttaattggtttatcacacaatattttttttggttgattttccataattgaagttgt

SEQ ID NO: 17124 - DNA, 1064 bp, Heterodera glycines
agtgatcattcctcgcactgtcgtcgatggcgctgagttctctgcgttcaaattggcaacggcaccactgccaacggcacattcactgaccaaccgccaacgacacaggcacaatttgttgtcggcctttgccaacagtgccatcccttgtgcgacccacacttctcatgctctggcccagcctcaacggagtgcgaccgctgctcagtgggcggtgtgccgaacacacagaacggcacaattcaggtgaatgctgaaaattcacccgaaaatgtgaactgtaaaatatgattttttttgttttgtttgttcacatattacagtattccgctcataccgttgttgttacagtgtctgaccgagtgcccgcccgacttaccgtttccacacgacggactctgctacgagcagaacattgaagagcatcgacggcagcgcacgcgtcgttacattgcacttgcggtgttcacatttttcattgtggcattcacaattgcggtaagccacaataagagattcattatttaaaatatattaattaatgggtcatcaaagaaagccgaaaatcaaccaaaaataagtcgaaattcaatttggctgcgtaataattagagcccggaaccgtgatttcagtacttagccgagatttttgcactaactcaaaaaacttttaaagaaaaaattttgaaaaataattcaaaaatccgcaaattttttttccgtttccgatcttgcaattattttaaagcaaatatttcaatcccaaatgataataagggagataattttgagaaaattttttgctttttcattgagaatttttttgagttcgagtgaaatcccgactcagtaccgaaatcccgggagggattcgcgagtcacatatatcattatagttactgtgtcttactgtatctgcataaaataaatattaatattaaaaaaatttcagtaaatgtttttgttaagtttctcatctatcgctgtctaatgtatcagaagaaatatgtgaaagaggttcaaaggcatcttccaggcgagaatatttatcaattttatgtttt

SEQ ID NO: 17125 - DNA, 2241 bp, Heterodera glycines
  unsure (1)..(2241): unsure at all n locations
aaagcaaattaatttatgtatgtcaacgataatatcttatcgaaaaaatattatntaaanaataatttaatataggaaaaaaagaccttaaaaatatttatntaaattagttttgattgcacaattattttattctaatttataatttaattattaaacaaatttttgaaaaaatttattcttccgaattctttcaacggttgaagcaatttgttctggccaattaaattaatttgattcccacggaaaaacccagtttcggcgtttctcctaatgaactgttattccattcttctgtcatgcttttccttcctgcgcttttcctcggttggccaagtgcaattacccaccgggggagggcaattaagttaaagcacattttggaagaaaccaaaaaaagttttgaggaaaagcagcagcactttaaaagtgaaaaaacaaacaattaaaatacatttatttaattatttaaaatatatttttggattaataaataaaaaaggcaaaaaaaagtagacgaaaaataaaataattatttgtccgctgtttttttgccgaatttattttcggtgctccatcaatcatctttagcataacaatgcgtctaattgtttacattcctcggccaacaaaagcataaacaaatcttttgccaagccattgaccactgttttggcattttcatcaaccaaaaattacaaatttcgccaccgccccgggacacaaaactgtgccatttgagagtattcaaatgcacaaacaatgaaaattataaaacgaaccgtcgtcaaatttgttgaaatattataagcaaatcccatttttttgttgaaattaatgatttggttaatatttgccataattaattagcctattttgtcatttcacctgtcaaaaaagggaattggtgaaacggaccacctgccaattaattaattagaaaataagtttaacaaatttgacggaatgtgaataatcaaatttgttcatttttctatcattatcaattagtaaatatataaaaataagccaattttaatttattcattgtccaattcataaaaataattggaattatttcgtcttttttataaaataaattccaacttttgatctttaaaataactttaaaaataataattccatttaattttataaatttattttctaaatgatttagggtaacaaaagtgccaattttggagtgcccgcccatttccgtcgattcattaccaaaaataaatgttcaaaattaacacttttttattttaaaatgaattttgcctggcaacggtccgtccgtcgttttttggcattttccattttattaacagacagaaacaaacatcaaatgccatcttgctaattggtgtcttattgtgtttatctgttgatgtttaatataataatatttcattttaatttaattttttttcattatccaacggaatgccaatttttttccattttttctcttaaaaatgaaacattcattattttatggcatctgtctgatttattgcttggcatttcgtattttaatttacggcaggtgtgatatttttgatactttttttctttttttcggcattttattttgactaatgaaaatattataaataaaattttttacttagggtggaacataattttgatacccaaattttttccaatttttaaaaatcataactccgttatttctgcgcctatttaaataattctttttttattttgttcttcatggtttcctcttttatatcttactatcgtttcactttttatttgattgatagatttttctgccttttttcccgaccatgccaaaattgaaaattggcccactaatttttctcgaattttttatggtcaaaaaccaaagctgatataataaaatcttagtttttctatacaatttataccagtagaatccgaatatggccttaaatgcgacctatcttttcaacctgagcttgtactgctccaactccatgcatgaagttcgagctgtacaggtttgttgcgatcccagagaccaaatctaagaccatattcgaactcaacatacccgatttaccttgtttaattaaattcagaatttccaaacccacttttaaaacattatgtaacttgggggccttgaaaatgccagttttggaaaccattttcacttctcgttctccaataattaatttttgaattaaaaatttaaattttagggttctaacaccctaactttgctct

SEQ ID NO: 17126 - DNA, 967 bp, Heterodera glycines
tttgtgtaattaaatttagaatgttcacaggcagcaaaaaaggaacaaaacaaaagtaaaaaaaagcacatgccaaatgcaataaatatactgtggaatagctatttataaaattgtaacgcattaatgaaagcgaaaacaattagtaaccgattagtaaaaaatggccaattatttgttaattactgaaattaaccaattaattaatcagaagggaaattaacgtaaattggaaccaaaatataaaataaaaaagcatttattcagatatatttcggaaagtaatttaatgatttattttaacaaatttttattggccatttaacttttgggttttggggagagaaaggactttcgtccaatttaaatatttaaattttttttctttgaaatgccacaaattggccctttttgagttggagtttaaagcgtgccgttctcttccccccccccctcccccttttgctcatattttatgtttctgtctccccccgcttttctccgcttttccttccccccattttctttcgccgcttttccccctaaatctccccggagatttacccattccgcccaaattctgtttgtattttggctttatgtagcggagtaacaacaaattcgtgatttatcccattttataattttgcccgactccaaaaatatttctcctgtttctgaattttcatcccatcgatttaaaatttatttttattttttgccgaattgacaacaaaatgccattaatcttttcgtttcaacgaagaaaggtgagcaaaaaatggcacccaaagtacccaattcagagctccattcattcatccagcacaaaaagaaaaagcgaaaataaatctgccgattgaaattaatgaaaaataaaaaataaaacattgaattgtttggcataatgccaatgaattttattaagaaaagggggattaaatgtttaaaaagtgcaaatattgat

SEQ ID NO: 17127 - DNA, 988 bp, Heterodera glycines
  unsure (1)..(988): unsure at all n locations
tttttatgcgtcccaaagaacttttatgcgtcccatgcccttttttttatgcgtcccaaagaacttttatgcgtcccatgcccttttatgcgtcccaaagaacttttatgcgtcccatggccttttatgcgtcccatggccttttttttatgcgtcccaaagaacttttatgcgtcccatggccttttatgcgtcccatggccttttttttatgcgtcccaaagaacttttatgcgtcccatggccttttttttatgcgtcccaaagaacttttatgcgtcccatggccttttttttatgcgtcccaaagaacttttatgcgtcccatggccttttttttatgcgtcccaaagaacttttatgcgtcccatggccttttatgcgtcccatggccttttttttatgcgtcccaaagaacttttatgcgtcccatggccttttttttatgcgtcccaaagaacttttatgcgtcccatggccttttatgcgtcccatggccttttttttatgcgtcccaaagaacttttatgcgtcccatggccttttttttatgcgtcccaaagaacttttatgcgtcccatggccttttatgcgtcccatggccttttttttatgcgtcccaaagaacttttatgcgtcccatggcctttttttatgcgtcccaaagaacttttatgcgtcccatggccttttttttatgccacccaaagaacttttatgcgtcccatggccttttatgcgtcccaaagaacttttatgcgtcccatggccttttttttatgcgtcccaaagaacttttatgcgtcccatggccttttttttatgcgtcccaaagaacttttatgcgtcccatggccttttttttatgcgtcccaaagaacttttatgcgtcccatggccttttttttatgcgtcccaaagaacttttatgcgtcccatggccttttatgcgtcccatggccttttttttatgcgtcccanaagaact

SEQ ID NO: 17128 - DNA, 3454 bp, Heterodera glycines
  unsure (1)..(3454): unsure at all n locations
aaaaaaggtacattgggtggatcagaaagtgcatttggtgttttggttgtcacctcaaaacgccggatttgcgcgccatgcgctacgagcnaatgaaccnaatgagggtgtggctttgtgtgtgtgacgtcagatctgcgcttgagtcccgattttgtgcggccaaagacaatatgatcagctttggcaacaatatttttgtgaaaattagcggcgactacggtcaaagcttcaccaaaattactgtctcatttttccaagctgtgcggtcaaattcgccgtcaaacaattttattgttgctgtttttccggccaaagacagcagagaaaatttagagcggtatggagaggcactgtgggggaaaattgagcaaattgatgcgttggcggggaaaacagtgaaatggtagacggaaaggctaaacttttaccattttcaatttaaaggttcattggtggcgacatcagctttatttggtcattgatcggtcactgcggttcagccgttacaacttttccttccccaatttgcacgtgccgagctgatcagatgcttcatgagcaatgctgccaacacaggacaattgatcaaacagtggaactcgcggaacaataccgcgcagcattgcaaaatggcgacaaggcgactgcagcggttcgatcggcatcaatgggcatcacgaaaccgcctcttctccgttcaattaactttgatcggatcatccctgccccttttcacgtctttcaaggcattggaaatgccattgttcgagaacttgagaggcaggagggatgtgcgccgattgttcaacagttcttcagaaggatcggggcccgaagggaacaatttcgaaaaagggatttgaccggcaactcaataagaaaaattttggttcgcgctaaagaaatggccgaacttttcacaatggaatggcccaaagctatttgtaggacactcgaacacctcggcaaaattcaaaacttttcaaaagtgttttgtccgattttattgaaataaaatcataaattttaggcacaaatgttgtccccaaatgacctggacggacttgagcgatcaattgacaatttcaaagtgtttttggcagagcaggaccggatgagtgcctttctctcaaagaaacccaaggcccatcttctactcttccactttgtgccatttgcacgaaaacatcaattcattggccttctggatgagcagggtgttttaatattttcaaggtgatgaagcgcttcattcggtgtggcgaagactcgaacaatggtggaaatgtatgcctgacgcggaacaaattttgcaacaattggagcaccatttcgtcaacaattggctgctggacaccggaaggattgacgaattgaagcgggtttgttttttcaaaaggtttcccttttctgaattctcatctttagaattatgaagaaaggaagggcgaggatgacacggatgaagaagtggcggaagaaattgatgacgaatgccaaattgatgtaatttaacaaatttggattaagggatgattttcaaaaaaaaagtgaagaaacaaaatattttatcatttttgtttatttttcagaatatttatttgtcatttataagtcgttttttgcttaaaatcaccaaaaacgtccgttaacatgcatcggattcgaacctggaacccccttttggtgactagcacatataccactgagacaaaaattcaaatctttttggaactgggaggcaaaaactgaaacggtgtgtctataaataattttaatttactaataatatttattcataatatctcaaaacaaatatttaaatgtagaaaaatgaactaaatgattaagcatcaggtaaattattcttacaagaattttaatatgaaaattttatgaaatatgtaataaaaaaaatttaaaaaaatctagttaaaataaattcatatggaaaactatttaaaaaatattattaataaaaagacgaaatgttttttccaataaatataaaggcaatcaacaaaataagaggatattaatgaataaaaagggtgaaattaacactcaaaattactaattaatttgaataaaattttttaataagttttggtccaattccaactaaataatattatttaattgattttattagtttttttattttgcttatttaaaaatattaaattcgccgaccctcatttagatatttttattaaatatttccaaatatttaattttcaaatcatgcatacctatagtatgttatataatttaagctattttttaacaattttaactctttattcagtatattttaacccaatgtaaattggaaaatattcttatctaatcatatgatatggtgatatgacgaagttacaaaagtaataaagtttgtaataagtacattaattattatttaattttatttgctaaacaaagaatgatatcttagcttaaacatagatcctttactacttatgtaatttataaaaatctagcaaaaattttaaaaagttttagcttggtaggataagttttataaaaaaagaagtaatattcgttgtttctaaaaaagtaattaattaacaaatttaataaactagcggggtcagcgccttcggcgcatcccccgctaggtagtacgattgtagtgtaagattatgtttgataaaatcgactggctcggccgcttcgcggcctcgcatcctttttttgctttttctccaatcgtcggactcaactcaccagcatttcaatcaccgggactcaattctctaggagttcaatcactgggactttattctcctgcgtttcaatcactgggactaaaccctccagcatttcaatcactgggactcaaccctccagcatttcaatcactgggactcaaccctccagcattgcagtcactgggactcaacacaccagcatttcaatcaccgggactcaattctccaggacttcaatcactgggactctattctcctgcgtttcaatcacccggactcagtttttatgcattccaatcaccgggactcattctcctgcatttcaattactgggactcaaccctccagcatttcaatcactgggactcaattctcttgcatttcaatcactgggactcaaccctccagcatttcaatcactgggactcaattctcttgcattccaatcactgggacctaacctcacctggtccttcggcatcgcaatcatcgagactcaattctgcgaaattccaatcaccggaactcaattctgcgacattccaatcactgggactcaactcaccatcattccaatcgctgggaccgaacctcacctgattcttcggtatcgcaaccaccgagactcaattctcctgcattccaatcactgggactcaattctcttgcatttcaatcacagggactcaagacaccagcatttcaatcaccgggactca

SEQ ID NO: 17129 - DNA, 1437 bp, Heterodera glycines
aaattaaagtaacgggactttttagaacagaacgaaaggatttatttggttaaggataattgttggaaatcgccatagatttggaccatatgcgaaaaattcgcggtgaacgtaataaaaaaaaccaaccagcattgacttgtgcaatccgactcgttaaaataaaatgagctttaaaataattgcataaatttatggggacagtatatataatgtttttacttgtaagtttggggtcagatgcgttcagaactgacgtcacactacatagtttaatataaaaaatgttgtctgccttttttcaaatttagctggcgtaattgtaaaaaggaaaatacgaaatattaccgggatacaaaattaaagtaacgggactttttagaacagaacgaaaggatttatttggttaaggataattgttggaaatcgccatagatttggaccatatgcgaaaaattcgcggtgaacgtaataaaaaaaaccaaccagcattgacttgtgcaatccgactcgttaaaataaaatgagctttaaaataattgcataaatttatggggacagtatatataatgtctttacttgtaagtttggggtcagatgcgttcagaactgacggcacactacatagtttaatataaaaaatgttgtctgccttttttcaaatttagctggcgtaattgtaaaaagaaaaatacgaaatattaccgggatacaaaattaaagtaacgggactttttagaacagaacgaaaggatttatttggttaaggataattgttggaaatcgccatagatttggaccatatgcgaaaaattcgcggtgaacgtaataaaaaaaccaaccagcattgacttgtgcaatccgactcgttaaaataaaatgagctttaaaataattgcataaatttatggggacagtatatataatgtctttacttgtaagtttggggtcagatgcgttcagaactgacggcacactacatagtttaatataaaaaatgttgtctgccttttttcaaatttagctggcgtattgtaaaaagaaaaatacgaaatattaccgggatacaaaattaaagtaacgggactttttagaacagaacgaaaggatttatttggttaaggataattgttggaaatcgccatagatttggaccatatgcgaaaaattcgcggtgaacgtaataaaaaccaaccagcattgacttgtgcaatccgactcgttaaaataaaatgagctttaaaataattgcataaatttatggggacagtatatataatgtctttacttgtaagtttgtggtcagatgcgttcagaactgacggcacactacatagtttaatataaaaaatgttgtctgccttttttcaaatttagcgggcgtaattgaaaaagaaaagtacgaaatattaccgggatacaaaattaaagtaacgg

SEQ ID NO: 17130 - DNA, 1795 bp, Heterodera glycines
  unsure (1)..(1795): unsure at all n locations
taaaatgcaattgggaccatccatcattagtgtacctattaataatttcagcacatattcatgagaaaaaaaagaaaaaaaagacaaattgagagacggaaaaaggcacggcgaaatgtttggcgaagcgatcgcattgattgattctctccgtcatgtgatcactgctcaaagaatgtgatctgaacaaaaagcatttgcaaacagagcgatgggataaaggaggacgcatttcaaagttaggggggggggagggaacgaatttgagaggagtgagtgagtgagtgagtgggcggattggagagggcaggaaaagaaaaaaagtaagggctgagcggggggggggggagacggcaaaacaactgctgaaaattgagaaaatgatggaaaatggggggcgggagggggtgaagggaatgaaatgaaaagatgccaggcaattaaaattaaatggcaattaaggcaaggggacaacacaataacgtagaatagcaaaaattgaaagaaaaattgagaattttcaaaaaccaataaatttcgtgggaaaacactgaccaaataattttatttctcaaaaatttagagagaacaatagaaatttcgtgaagaaaatcggcagacactcggttgatgtttttatttcaaatttgtttttgcttttaatttttaatggttttcgtaacacaaaataaaggcacaaaatgtaaacaaatgccaaaaaaaatcaaaaatctcacaaaattggacacttcttttggttattaacacatgagatagagaagaggaaaattaatagatattgaagcgaaattaatcctaatttgatcgagcaaagggtcggtggttcagctggtggaactctgatccggcagaaaatcagagacgccggttcaaagccgtcccgccccattgttttccctcaaaggctttgttcattcatagaaaatatattcacacataataaataatcacatcattttcaatgttttcttcttccctttttctcttttcattttgcaatttataaaaatgcaaaagaaataaatattcgaagaacaccgatcaatcaaagaaaaatgaatgcattgggcaataattgtcatttgctcaacaaaataaccctttcactgattaatttttgtgtgttaatacacaaatttaaatttaaatattattttaaaattattagtttgatttccctccattttttgccattcctcacaatgtttcttggcatcgatctcggcacttccgcggttaaagttctgctgatcagtgctgatcagagtgtcgttggttcggcgagtgttccgctgaaagtgtcgcgtccgtttgacggatggtccgagcagtgcccttccgattggctccgtgccacccgcgaggccattgaccaattgcggcattcgaaccctaaggcaaatagtcctttattcaaatatggtggaaagaaattttaatttacttttaatttgactttgattcaaatatggaaagaaattttaatttacttttaatctgactttgaggcgttttgtgccctccgcggcatcggtctttcaggccaaatgcacggcgccgtgctgctcgatgcggccggcgtgacgcttcgcccgtgcattttatggaacgacatgcgaagtcaccgcgaggcggacgaattgaacgcggacgcgcgcttccggtcgatcactggcaacgcggtgttcccncgggttcactgcgccaaaattggcctgggttcgccgaaacgaaccaaagatttttgcaaaaatgcaaaggtggaaaaaaggaa

SEQ ID NO: 17131 - DNA, 1458 bp, Heterodera glycines
tttccgatttgtccgatgcctccggcacttgctggttggacatggcccgtcggtgttggtccgtcgcccttttgtctgccgtcggtctatccgtctcgcaaatgcctcttctggttgagagcactttttcggctggcactttgcgcactgaactgacgaaggagtggggcctttcagaacgcgccgttgtggcgggaggggcgggggacaacgcggcggcggcgtgcggggcgggcattgtcagtcaaaggacaaaatgtcgaattaattaattattctgtttaaattaccgtttaagctccgtcccggcgatgcgctgctttccctcggcacttccggcgttttgttttgtcccgtcgattcttttcattcggacggtgccgttgacggagtgcacactttttgctttttgccgaccatgtggcatcagatgggcgtcattctgtccgcgaccgattcgttaaattggcttaccaaagcgaccggggcgtcgccagatgaattgacggcggaactcggcggcgatttgaatgctcccggcgcagtcatttttttgccatatctttccggggagcgaacgccgcataatgacgcgatcattcgcggaagtttcaccggactatcgcaccaaactgatcggaaagcactcactcaggtcaattttgaattgggtaaaggatttatgggaaaatgacacaaaaaggaaaaacggaaacggagaaaatcgaaaaattaattaattaaacaatattatttcaatttcacaattaaataataaacaaaaagataagcaaattaatttgatttcggatttctgctccagagaaatgagggcattcatttgccaattttttcagcaaatcttctttatcttttttaaataataaattttgcatttcaaatccaagtggctttaggctgttctcgaaggagtggctttcgcttttcgcgattcgcttgaggcactttgcaaaagtggcaccaaaatgccttcgcggatcatcgcgactggcggtggcgttcgctgtgcttattggatgaagctaattgccactgtccttggagtccaaatagaagtgccgacagaggaaagtggaaatttaggtaattttcggacgcatttcaagttcattagcaaatcctaattaaggtgccgcttttggtgctgcaagacttggaataattgccgctgaagggattgaccctttgagtgtttgtgagccgccaacgattggccaaagcttttccccgaatgagcagctgagagaggcatttgagcggaactatcggcgctattgcgcactttatccggcactgagagcgattgatcagtgatcagaaggggaaatgctttgattggccaatgactgaacagaaatttgatcattcgttgccattcatcactttcaatgcttccatgaattgtgctttcttgtccgtgttctgttcattgttgat

SEQ ID NO: 17132 - DNA, 961 bp, Heterodera glycines
aaatataagacgaatctttgcatctgaattacgtttcgtagtaagagagtcgtcaatgatcagaaagttggaatgaaattaataataatttcttaacaaaatacttaaaaatttccactgtggcgcctgtcggcatgcccccccccacaccatctgtcccccaaaatttttttgaaaagcgcgcaacaaaaaaagagcggaaaaaggtcgttgatttacatgtccagattagcaaaacaatctccctttgactttggattaggatgaataaactttcttacaattaattgtattttcagattgattgacaagtttcaatagatttaataattttcagggaggcgactaaggcactaatcagcgattccttatttctgcaaaagtggtgtcatttttggacaaaaaactttaatgcaatcaaactgtcaattttcccagccgcgcctaccgtcaccgcctttaagttccgcagtaatttttaaagtgcgccgcaaaaaatctgtgtaaaaaaaaattgtcgccgggaaatttaaaatgatcgaatgcaatgcaattataggtatacccctaaaaatcgaatttgtacaatataattcagggaagggagtcccgtaacctgaaatggaggagagagtggggggcaacacggtcaagtagactaaattttgttgtcgctcttcgacccatttttttcctagtgtaaaatcccgatattttagtaccacggaagaaaaaaagcattgttctgttcgaaagtgagcattttcgaagagaaaagtaatcaatggtccggcggcgcagatcattttaaaatattctatttgtcgtaagttttccactgttatggaatgagaggaagttctattgaattacctttaaggggttcacgggaaccggttttcctgctgtatggctcactgggtccatgttgaatttgaaagtggtgtactcgggcaaagca

SEQ ID NO: 17133 - DNA, 2556 bp, Heterodera glycines
  unsure (1)..(2556): unsure at all n locations
aggtcctcgtccagtcttttctcgagcaaaagagtttcaatccgcanaatttgttgggttgtatatttcgtacatattttcaataccttaacgtagatttatttttttcaaatntaaaaaatggaagtgctcacaaaccgagcccatcaataacatttcgaagtgtaaaagtgtgctgaagtccctgttttcgcgccgaatgcatatgccaacgaatctgtgctgcttacttacggtgttagggtcagacattgtgacagctaacacagaacctggagaacgaatttattatttgaataaaaatgaaaattaaatttaaaaacaccaaccaacatagaattcggggatgtcaattaccatacgtctttcaaacatgtctgcttggacgagttgttcaaacaacgggtctctacgatcaagaacttcggagcgaagaaaatcaggataagcaattctaaattactaaagaataaagcgttttaatttcttccccacgggaaatcatccagagaaattgcatttatccgctcagtcgacggctgcttcacattttttgccctaacattagcaagcgtagtggccaagcgtgtagaaggaagcctttttagcaataatgaacaaactgacaaatgcattaaaattttttattgaatcttaatttgatttatttcaatgataagagataaattaagcagttgtttttcaaagtcagtaattaaaaaaatatgaattaaaaatttagtaatttctgtaactgcaaacattggaagggcggatatataagtagatttatttgggaagaaaatgaaatgcagagaaattttgaataaataattaattgtatggccttatgttttgaaatttaaaaaggctgattcgccgatttacctttccctttttctcttatctgcatttttcaatttctcatttctttccttttcttttttgtctcaaaactaatctaaggttaagaaaccaactattgcgatggctgctaatgaaaatatgcaaacagaagacaataaaaaaggaaaagtgaccaatgatgagcgtaacttggtcgtctcatttattcagtttttgcgtcacaaagtctcatcgaaccaatgcactgatgaacagattgaaggccttgaaggttttctttttgactaattgttggtggtatataaaaaacgctgcttgaattttttaatcatttcatggctttttatttattgtctataattttaatgcatagaattaatcagccaggtttctaagcaaaatctcaaatttatttcatccagtggtgaaagcatgaccggcaaattgttggaatgaataatagaacatttcgaaactggccattaaaattcaaatagcaattctatagagtacgagtcgaaaaaaatcggattcgggctcgaaaacttaaaaagcagtttttaaaatagaattgttttattctttctatcttatttttagttgctattcaatgccttgagaccgccttctttgtttctgacagaaactatgcgttccaaccgtccaaacctctcatcgaaattttcaaagcagctgaaggacttcccgatggggttgattttcagttttcccttacgtttaattgaatttttattgaaggatcaagagtttcctaagccgactcaaacggacgttgagaagtcaaacgcattgaaggaagaaggcaacgaactcgtgaagtcgaacaagttcgaagaagccatcctcaaatacaacgaagcaattaagttgaatcgcgaccctattttcttctgcaacaggtgtccattgaattcacacaatgcactattgaaatgagttttacaaatactttagagcggctgcttattgtcgtctggagcaatatgatctcgcaatccaagactgccgtacggcattggcattggacccgaaatatgcgaaggcttacgggagaatggggtaatggacattaattagtattcgttatgtttacaaccaaatccgttttagcgttgcactttcatgtcagaatcgttacgatcacgcggttgaagcgtacaaaaaggcattggaattggatcctggaaacgaaaggtatcatgaataaaatgacaaataaatttgaaaatgcaaagggtgaccactgattatttaatttaaacattaataattaaaatcgttttatcctttctacttttaagctacaaaaacaatttgtccatcgccgaagataagttgctcaagactcgcgaaacacttcgaaacaatccgcagccggtgaactaaaacccaaaaccaaaatttaaacgtcaattaaattaagaaccctttcgccaatatgttcggtggtccgggtggaatgggcggacttatgaacaacccagaaatgatgagcacaatcaccaatattatgcaggtaatttaacagtattcatattctgatggcatttattngtaattgaaggaccctagtatgcgaaatatgatgnacgcaatggttcagtctatggggcagcccggtcacaaaatcaggaccaaggncagctgngaaccttctgcaatgcttct

SEQ ID NO: 17134 - DNA, 1098 bp, Heterodera glycines
cataaaaaatgacaaaatgttatccatggtcccgtatacaatattatcgccattcggtaagctaaggattacagtatcgtcacattatttaatgcatttccaccaatgtatgcgttcagatcaaaaaagtgcagctgtattagtggaagtgatgatgtcaatccataaaaagtagaaaattatttctaaatattaaattgtttttaatatagagtgaaataaattattaaaaaattaaatttaaatatttttaaatgtttaaaatgatctcatgaaaaatctaaagaaacaattaaaaagaaattttttaagttaaattaaaaattcataacaacaaaaaattaaatgaataaaaaaatttaaaaaaaaaatttaaataaaataatcaatatttttaaaaatctttaaaaattcataataataaaaaatattaaattataatataaaataattattaaaaaatgaatatttaattcttatttttttcaaatatttttcccctctttagcacttgcattcgttttggtatgtatgtaaattattttgttaatttttctgttcattatgctcacccttttccgaccgtatcaacacgccggcaaagcaacagtactaccgtaatgatgattacattggcattataaacgaccgggggtaaagcaaaaaatatgccaaaattgtgtatcaattttttttgttgtttttgctatttttcaggtgccattccgtcattgggcgacacagtggcaaaaatttgttgacccttcaggttggggaggctggcaaagtgccaaaatttgatttgttttttacaacaattcgaaaataaatttggcgtcggttctttttttgaccatttccaatcactttttggaaccataatgaacccattaccagttttgatcactttttgaaccaaaccggtggcctatttttgatcatgaccaaatgcgatccgttttcgtaaaaattttgcccattttttgatcgtatcgtttacgatcgctttttggacaaatttcttccacctgatcgattttcgatcacttatgtcgcaacattaggtgagcatcgaatcaccgcaaagcgctcaaaatg

SEQ ID NO: 17135 - DNA, 1309 bp, Heterodera glycines
  unsure (1)..(1309): unsure at all n locations
aagccgagaattgtgatgcatgaggtgaagcaaatgcgagagcattttttcaaattatttgggggacaaatccccgaaaccggcgcgggacgggattttgcgggtcncagtcagcaatcccacattttttggaaaatgcgggatagtgggattcgtgggattaatcccccgggtcccgtcccgcaaaaattttgagttccaatcccgcagcggtgcccgcaaatttgaaatttccagtctctataaatccttcaaaaaaaatttttcgcgtctttccacacctttcggggatgataactcaatttttcaaaattcaatcgaataaattttctgggctttatttgacctgcgcacagcactcattcccctctcacctaaaaatctcaaaaatagctaaattttccaattatgacgaaaaaaattcagaccttttttttgaatactttggctataattttttgtgaaagtcagcgaattttttaacttgctaataaagcacatttagatttatcggatgatagcaagtattaaaattttgttattcttgaccaaagttatgaataatatttcgtcaaaattttccatttgattgtttattgttttttgagtaacgacccaccaccgacgaagggggcagggctaagattttaatttatataatttaaatccgtcagttattgcacattctcggacttcaccatgagcaccagcgccgggaccggtccgagtacattgacatcaacattgacaacgtaaggaaaggtgaaaaaatgggggtggcgtaagggagaaaaatgcaaaaaaaaaggcataaaaatgaaattttggcattttttcataggcaaagaaaagaattttcgcgaagaaatggaacaagaaagttggggcctgccgttcgattatgagagtatcatgaactatcggtacgatcagtttgccaagaacagagagaccaaggaccaggacgagggcatggtgatcagagttcgcaaccgcgactcattttgtaaggtgctgatcaaatttgtcgggtcgggcacacacgtgctgttcgagagtctgtctcctcaggcttggaaggatctcgaactttttgaactctctgccgtcttgactcgagaaaaagcacgaatccttgggttcacttatcggctcgagaaatcccaagggttttccagtctcggttcgtgaaagatgtcgggtttttgaggggttcccagtctcaactcgagaaatctcgcgggttttcgaagggtttcggtattgaaacgcgtgataagtggatttaatggacacaaaatcaagaaag

SEQ ID NO: 17136 - DNA, 2021 bp, Heterodera glycines
ttcgccgattttttctttatcattttcgttgttatctttaaaaacttacaatatatttattaattatttaaatttaaataaatgctttttgccttcgtttcgtgtcggtggtgccacaaatgggttgttgttgttattattgttgttttggttctgttcggtggccgccgtttcccaaccggcactttcgaattggcccgaagtgccaaaatggacacttccgtcaaccatttgcccgtgccatgtgctgctttccattggctaaatgcccattaccaattcaatttctcctatttctaattttattttttttccatttttcccacttcttccgcagattctgctgcttcttctccgcttcgctccctttgcttttcctccgccgatcgctggtgtgaggactgagacagagacaactgttcggacgccgtggtcgtcggatcggagtcgaacaattcggggtatttctgaggaatttaggggaatttaaattttatagggaattggagggaaatgggcacggaaacaaaagcaatactcgcaaacgtccatattttttaagatctgtccttattttgagtctacatttaattattttttgaaaatgtgataattgcgcacataaatcatcgattaaatcctcaaattttgcttgttgatattggcatgccgaactcttcctcaattgaacttttgaattataaattaaacatttcacttgaaatagacagtgtaatttcggataattaatttgggttttcctttactaattaaaagaaaaacttaaaatatgcaaatgttcaaataagcaatggataaagaataacattctctgattttgacttttcacctcctcaaatgcgctgaattggcccacaattgcctcgccgttgcacaaattttggtccccacaaaggcaataggccacttcgaccccattaaggtcgaccacgtcgcactcctccgccaattggtacggtttgcgcgggaaagtgacgtggtgcgcactgtccgcgatgcattccttcaccacagtgaaagtgcctaaaaaagggggggggaagcaatgaaaaacattttaaacaaaatttaattgccaaaaagtgccgcaccattcgccgttttgtgtcgcgtcgtgcgacaaaatattttctcgtcctttggaaagcgtttggcgtacccatcgcagctgaacggaaaggacgttttgcactcgccgaactcgtccaagccattctcagcacaaatgtaacagttcagagctaaaaatgcttattataacctttgctcacagtaaatggaaaatattcgaataaattattttttaaataatttcaaattaccatttgcaccgagaaaagacgcggagagaaagaaaattgctgtttttgttataagaccggatgtaatcatttatttaatcttagtaaaacaaaataaatgattaaattaactattgaaatacgatttcaaatgtttattttgaaaagtcattcaaaaaacttcaatctcagcaaaatcgttttccttcggggctttggattttcggatttgctcaatctctttttttgggctttgaccgtccgcccgaaaaacgcgggcgaggcgcacttttcgtcgtgtaattgggtggatcgtcgccacaggggatgaaatgaaatgaaatcgaatggaatgaggttggaaatccatcggtcagaaatccctcgaggcattcacgcaaaatttgaaaaaaagaaagaaaaattaatctttaaaaatgtgaaaaaataatattaaaaaataggcaaatttaaaaattaagcgattattttgaaatgtaataaaaacaattacaacatgagaaatattaagtaaagaaaggagcatcggagcaattagagaaataaagcaaaaataaccataatttttgaggatggaaaagtgagtgattaagcgaatgatcggaggaggaggcggagaggggggtatttagaggtgttgttattacatatgacatcccgcaattacttgcgattgat

SEQ ID NO: 17137 - DNA, 2621 bp, Heterodera glycines
ctgcgtttgttcccctcccaccttcatttcacggttgctccacgaggaagttgccgagtatttcgctcagagtctttgtgtctaacacatggcgaagagttgtctgtgccagcagagtggtggacgacgaaatattccccatcataacagcctgagttgcgttgaacacacggtaaaagaccacctataataggggaatattttaaacgggcatttaaaaataacacaggaagccgaccgcgtcaacggtgacagtgaccgaatctttggaaagcacttgctgaggcggcacatcacaagtcacggtgcgcaagtccacgcagcgatatctgcaaattgagtggtggcgcaccgtttgtcttcaattctaatcaaacaatataaataaaacacacgcactcatcaacgcatggaaggatgaagaacaatcctgcaaaaaaaaacattagaaatgatatttgctcgttttcttggctaccaggtccttgcgctttacgacgaatacgtcccagtcgaaaaatgacctgaacttggaaaaggatttgtgtaaagtgacattgctccaaccgctcgctcgtattgctggacaatctaaaaaagaaaacggaatggcaattaccaaatggaaaaaaggcaaattgttatcttaatgcaagagaagatagtgcacggaaaggtgaagaacagcagcacatagctcatgaaaaccaggaacattgagaagcaactgaaaagggaaaaaggcgtaatttcgtcgtttttagggtttgtcgctgttttcttactcgtccgggtcgcccatatccgacactgatgactgttgacgttgcaccgatgactgttggcgttgcatcggtgacggaggattttcggaagacattaccaattagggggacttttttatatgtataaattccttttgatttattaagcgattagaatttcagcggagtaaagaaaaattaaacacaaagaaatgaaaaagaaaagactagtgaagaggagtgtttaaagaaagaagaaattcgcctttatatacgggaaaagggactgcgtttttgtttcttttgaaatttctctcattttgccatatgctccattttaaaattattctgtaggtaatgtcaagtccatcaagctgtatttttaatgtttaattgggtgcttaaagaaagattattatgcgttttagtttttgtcgtgttattttattgtcgtttcgtgtaaactgaaatagagccaaagttactacaacatttgcagaagaaaaaaattttgagtttattagtttctttcctcttatttgtattttcatgtgcttatcagatgcaaaaacgacggttgttcgtccaactaaccatagatttgacgcgtaaaaaataaactacgtaaatccaggcccaataatacataatgctaatggtccaaatttgtcgaattggggtccgggacccgaaaaaagtcaaaatgacgtctgttcatgtcagctacttcaaaaccaccagaaacaagttttttgacaacagcgtttcgtgaaatatggcaataaagcactttcggtactttaaggtagagtgccacgggaccgggaatttttgccaaaaccgggaccgggacttgccgtgacctgagaagccgggaccgggacctcgattttttttcgggaccgggaccgcaagaaaaaccgggaaccgggaccaaccgggaaattttaaaaattcaaaaaaaatttaaaaattaaaaaaaaattcaaattttaatttatatcaagtgaaaataatacaaaattatttggttttttataataaattaaattaatgaaaattttcaaacaaattttccaacaaaaaaaggttggtttttgcgattagtcaaaaatcttttttttttaaattcacattttatacaaaaaatcactaacaatttttaataataatgactagggagtccaattatatgcacatgcatatttttttcctggactgtgggaggcctgaaacgcacgaaaaacatgtttttagcttgttttgaagcttctaagatgactttccatatgcatattttgcatatttgtgcatatttcgcgatttatgtgcatatttgcatatttgtgcatattttggcatttcgtgcatattttatgtgcatattttggcgtttttccaaaaaacctctaatagatcggcccccaacagacaaattggactttttgacctcaaaaaccggaaaattttccaaaaaaataattttttgcaaaattttcacgaaaaatattgaataaataaattttctcaaaaaatggttaatttatgacaaaaataagcaaaaaaagcaaaatttcgctttttgggttgatttttcgcaaaaaatgagtaaattttgtttatcatgtttttttctcctaaaataatttttaataccacatttaggtagccatttttgaagattttactttatgtttaacaaatttgaagaaattttgagaaattacaccctcaatttggaaaattttatgtgcatatttttcagtttttatgtgcatatttcgcaatttttgatgcatattttatgcgcatattttgcgattttatgtgcatatttttggatgccctaattaatga

SEQ ID NO: 17138 - DNA, 2083 bp, Heterodera glycines
atccaacgcagaattaacgtcccccctccagacgaagctattcccgaaggattcgagtctccccataatatctggacgggtccgagtcggggggactgccccgacaacaaacacatagatttcttcaagcgtccgcatgagggactccaacaattattaagaatgtttagatttttattcgtctccgcttttcctagtgtgagcatctgagtggctaagatagcttgagacagggttcggtgagggtcgagcagcttgtgaaaaaatatgtatgaattaggttttgctaaaaaaataaaatagtgaagctttaaaaattaataaaaaattttaaattcagaattactggagttagcatcatagcagtgcttttccttgtctttttgatgccctcgcaaaatctggttcgcttctgatcagtttataaaaaaaaagttaagcctaaaatttttcgcaaatttaaaaagcaattaaaaatttttagattttttattcatctccctttttgatagtgaaagcatcagagagccttatttaacttttaattaacatttggtgcgtttcagagcacgttctaaaaaatatttatgaattaattttgcaaaataataaataattaatgaaaaagtcagaatttcgaaaaattttaaaaacaacaagcgttggcattttttcaggttaagttagtcctttacaatggagaaggcctgcaaaatttggagagattatatcgattttagtgcgctaggttcgatgaaactttataaaaatataagcctaaactttttggcctgtttaaaaaggaattaaaaattttttaaatatttattcatctccctttttgataatataagagtcagagtgccttattcaacttgtaaataaattttggtgcgtttcagagcagtttctgtaaaaatacttatgaattaattttgtaaaaaaataaataaataatgaaccctcctccttaataatttttctgcgcccaaggtactcactcggccgcttcgcggcctcgttatactgttattgatcgtatccaactgagaatctgctgaatggggtttttggctgcgctgaacccgaatttgatgccgccgtttttataggagcccaaataattttttaggaattttattgtacctgtttcgaggtaggctttaaaatgaggcttttgccaaattagctctcgagactgtagccagacggaagcagggcccagccgttcgtccagttgactttttacagaagtttggggtggtatttttaccaatcagttttttatactgttattgatcgtatccaactgagaatctgctgaatggggtttttggctgcgctgaacccgaatttgatgccgccgttgtcataggagcccaaataattttttaggaatcttattgtacctgtttcgaggtaggctttaaaatgaggcttttgccaaattagctcttgagactgtagccagacggaagcagggcccagcggttcgtccagtggactttttacagaagtttggggtggtatttttaccaatcagttttttatcctgtttcgaggtaggctttaaaatgaggcttttgccaaattagctctcgagactatagccagacggaagcagggcccagccgttcgtccagttgactttttaaagaagtttggggggtatttttaccaatcagttttttatcctgtttcgaggtaagttttaaaatgaggctttagccaaattagctctcgagactgtagccagacggaagcagggcccagccgttcgtccagttgactttttacagaagtttggggtggtatttttaccaatcagttttttatactgttattgatcgtatccaactgagaatctgctgaatggggtttttggctgcgctgaacccgaatttgatgccgccgttgtcataggagcccaaataattttttaggaattttattgtacctgtttcgaggtaggctttaaaatgaggcttttgccaaattagctctcgagactgtagccagacggaagcagggcccagccgttaggccagttgattttttatagaagtttggggtggtattttta

SEQ ID NO: 17139 - DNA, 1691 bp, Heterodera glycines
  unsure (1)..(1691): unsure at all n locations
tctactgtcattcacttgcgcaacagacactatcttctaacagggtttcattattatttaaaanttggataggtgggcgccttttagaanaattttttaatagggttgaaaatccatttgctttctcttagggaattgaaaattggttttttgaaaattctttatttggtcatttatttcaggtacaatttgttctcgactcaacgctggacgtgatactttccacaaaactgaagggttgtgggctttactgaaccatttactttacacccatatgtaattcctcacactattataaaacatgcaaaatttttacaccgatttttttgaattgagataaaatgtgacaaatttttaaaaaaataggcctagcgaacccgtgccaatactgtttcctgctgtacttcgttgtgtcaaatgttttgtgaccgatttgccttacaataggtcattagcagctataactattgtatttcatgtgtctctgattataatttttatgctactgtttttgcttgactgtcgctattagagaccgaccgatcgctttatcgatcaacgcctaccaatgtttcgattttatatctttttcgagagcgatcgatcgaatcaattagtcggtctacagcagggacagtcttgtaaaggggaacctacggcttatttatttgctcttcggccgcaaaaaaaaaaaaaaattaaattttgtacaagagaagggctggcggttaaaaattttcaaaaagaccaaataaaccttttaggtatgttgttgctagggccgataaatatttattgctaaagatcaccagcttcattaaatttaagagttacaattcaaaacgaaaaaacaaattaaaaaattgtggttaattaactcgtttacagaaaaataaataaatggattttcatatgaaattttaaaatttaggaaaaaatttgcgaaaacatttaaaaatattgacaaaaaatattggattagaagttaaattttaaataaataattttttgaatttagcataaaactgcctcatacattttcatgtatcgaaacgtcaaaaaaatacaatacattaaaatattttataatttattataatatgagtgcgttaattatttccaaatttgattcatgagaaaaaagggcataaattttttctgaaaatatttttataatgtttatgaaaatttaaatttgagaagatgattttttggaaaattttccaacttttatttcggaaacccaaattccgatcaaagaagcctatcacaactgtccatttaagtgttccattattggtggtattcattttatttccatgcattaactgcttttggccgaaaaatgttaatttacaaaaaattaactttttggttctgattaaaaaaaaataataatttcatttaaaaattgaaaaacaaacaacaatttttcgtgtaaatcaaaattaagtcatttgcatttttttccaattttcaagaacaaatatttatgctcttcataattaatttgaatgcgtaattcgacaatctcatcgtaatcaaaaacaatcattttctttgttttaattgctcttttgtgtccaaatttgctgagccgaaaattaacaaagactaattaatgtaggagatgataaaaatgaccgaagtccccaaaacagcgaacgaagtggtaaatgttgaataaagga

SEQ ID NO: 17140 - DNA, 1363 bp, Heterodera glycines
  unsure (1)..(1363): unsure at all n locations
agtaaaaagctggttatttcatgacaaaattaccaaacctttaacaganattgggcaaattttaaacattttctgaacaaatttattaaaggttcaaaaaaaaaaatttttttttcccagcggcgcctaacggcaccgccgaactcccatttcactatattttttgaaaatttgacccccaaaattgccaaaaatagtcattttttggcagacggctatattcgtggtttttctccctagtgctgaaatttttaaaaaacaattttttttagaccgaagtgcattagttttttaatttaacatttagattttaatatttaaataacatttaaaataactgtaaaatatttatatgtggcaaaaaaaatttaaaatttccaccggtccaaagttgcgacagtccaaaaagaagcagaaaaacaaaaaacgatatgacagaagtcagcacaaattgccaaaaggcaatttccaacggtatgttcttcatggctgtctaaaattcaaaaaatatggaattaaaaaggcttccaaattgaaaacgaaaaaaaaattggcatattttgaaaaaggtgggactggagaaactatcgttattcaaaaagcatcaaatggaaactttttgaaaaaattattcataacataacttaaaaacaaccttaattcttggtatcattcaatagccctaaatgttttctattagcctataaaatttcaaaaacatttttgttgcctttcaaaaaagttatagccagaagaacgcaaaaaaacaggttttttcaaatattttgatcatactttttataaatttaagaataaaatttttgaaattgggtagacaaacaaatagaaaaaaattagggatatcaaatgaaattaagaaggagggctcaattatcgaattatataattcatgtattaaaatgattttttccttcttgacaaaaattatgggtttacgatttttttttcaatgatcgatctggacgatattagatcaacaaccatagtgcccagagtgaagtttaagccgcgtgatcttttccattaagccgtataaaaggaattaatttgcttttaatgcctcacatcactcaccacaatatcgaatattcagacagggaaatgacttgtcacttattgccaacgacgcagtcagaaagtacgcctcgccaagcgcctctatgaaacggtctcaaaacaagtggaagccgtcatgtatccaattcagagtactgtgaaaacggaaggatataacggactaaatgggaatggaaggaacctcacagtcaccatgggcaagggttatgaaactgaaacagttcattttggaaacaatgatgactatgaagaaggaacccaaaat

SEQ ID NO: 17141 - DNA, 1806 bp, Heterodera glycines
ccccaattttattaataaaaattattgagaaaaatgcatttgggattaggaacaatggtttaataaccaattaaattccgaatacaatttgaaaactcagccatttgccggtccaaaaaattctattaatgaaataattgcagagggatttttttctaaaaaattaagctccgaactttatttatttattttcttgaaaagaatttttgattttaaaattatgtgtctcattcccattttagcacctattttgggggtttttataatcagggagcaaacaaacgttttttgctgtcttttttcaattttttgtgcctgtaatcccttaatttttatgcttttttccaattttttgtgctgattttgccttttttgtgcttttttcatgcttattttgggaaaatttggtgctttttacagtgcttaatcggtgattttttgtgctgaaagagaagaaaattctaattttttggggtttccgtgtggtatcgagtatcgaagtcaaaatcggtatcgagtatatacgtgaaataatgacaattttaaggccatttaaagtcataaattcaacagctctattgttatcagaatgctaatagagcatgttaaaagcttttaagtgaagccattttgttcaacttggcaatcaatcaacttaaaaatttgactggccagacagaattggccactccgccggcggaccagcgacagtttcgggggtcgactacccgacctattgggaatgtttttaaaaatatttaaaataatttattttttaccttatcgctgatgctaagccgctgaaagaagggaaacgttctgccaatttcgaacacaaacaacaaatccatggccaaatatggcggcatcatgcacattggcccattctgttggacaatttggtgaaacaattctgtgggtgggcttggcatttcggtcttaaatttgtcaaattttcatcatttttatggtttggaaaccgaaaagttgtcggcacattcaatcaaactcaattttcgttcaaaaatcgactcaaatgcgtcgcattgggcgaaaaagatgtccgggatcttagttttcgagtcgcgaatcctgcactttccgctcaacctccatcatatgtttcatcaaaatgaaacgcgcgaagtttttttgtaccattggctgaaagtttgaaattaatagagataactaatggggagcagcacaaatttggagacattggaatatttggcaccggcactaacactgtttttaattgtttttgtgtctaattttccgggcaatgtctaagtgggcactgtttgataaccgagtccgtcaaggcccattttggtggttcgctgctttgttcggtcgtcagtgccgacagttccgtgccaatgtccgttgcttctgatgatgctgctttctccgcttggttggcattggcattttcctgctgctgctgctgctccatttgctgtttcatccgttgtgcaaatgccaatgtttcgtggacatttgatttgttgcagttaacaccgcgaggattcattccgaccgtaaggcatttgttcagtcggcaccgcttacattttgcaaattctgaataaaataacaaaggcaaacttttatttgttagcattttttgtttgcccttatgattttaagcatggaaagacgcctaaaatatttctgattcattttttttacaattttctatttacgtatttctcccttttttaaagttccatttttaatgtctttcgtatttcctccccaaaagaaatgtttttttttaaattataattggaggtcatttga

SEQ ID NO: 17142 - DNA, 1125 bp, Heterodera glycines
aaaagtacaaaatttgctaatttttgactaaatcaactcataacttttctcagacgcaaccaaatgcagaatcttggtatcatacgataactcttgaagtgcgttattagctccgctttagtccttgccgtgtcgaccgtttgttgtaagtcgagaggaaatggctaaaacggagaaagcaaaagaggaagaagaggaggcatttttgcacgatggaatgaataattatttatttatttcaaaaataaaaatgaaaaaaaatgatcaaatttgccagcatttcttaaaaagatatcatcatatcaaaatcgtctaaatcttctcctgctggcgatggacaatctttttcttattaatgctttttcaattgctcactgttccccattcccaagtggtcactgtgccaccaatggaaccgttcgatggtggcacatctctgatggtaggacctaattttataggggaatagagttttgaattaacaaaattaaatctaaaaaataaaacattcaaaagccgaaaatttaatttcttttaattgtttttataaaaattagttcatgatttaaaaaacatttagtgtttaatggctaaaaataaactcattaaacaaacaaacaaataatttatttttacctcgaaaataatccgcgggctttcccgaatatgaatagggagcaggacgactttcggatgaagaaaatttttcaaaattatacgaacttccctgttaaaaaacacgaatttaattaagatttaatacttcgagttttaataattttttataattttatttgcctttttattgccctcatcaaaatgcgatgtgctgctccgttcgtttttgtcctccttcaacatttcgtgcatctttttgttctgctccgacaatctgtcccccaactgtttgctggcactgttgatgaagccaactttgtcattatagctcatattcattggtgcttgacgtcactcaaaaaactatcaaaataaatagtaagcaaatttgtaattttaatacaatagcaccgataaaaaaagtaaaaaaaaaaatttttttttaatttttattatttttctaaatattttaaattagcttgaaaaggttttaaaaattggcaaaaa

SEQ ID NO: 17143 - DNA, 1759 bp, Heterodera glycines
tacaatagtgattagaagaggtacaacaggtatttttagaggtacaatagtgatcagaagaggtacaacagtgattaggagaggtacaaaagtaaatagaagaggtacaacagtgatcagaagaggtacaacagtgattaaaagaggtaaacagtgattagaagaggtacaacagtgattagaagaggtacaactgtgattaaaagaggtaaacagtgattaaaagaggaagaacagtgattagaagaggtacaacagtgatgagaagaggtacaacagtgatgagaagaggtacaacagtgtgagaagaggtacaaaagtgatgagaagaggtacaacagtgatgagaagaggtataaaagtgattaaaagaggtacaatagtgattaaaagaggaagaacagtgattataagaggtacaactgtgattagaagaggtacaacggtgattaaaagaggtacacagtgatagaagaggtacaacagtgattaggagaggtacaacggtgattagaagaggtacaacaatgattagaagaggtacagcagtgattagaagaggtacaagagtgattagaagaggtactaaagtctaacttgttattagatgtacaaaaataattcataattttaaatataattttatagaattaggtttatttaaaaatttaaaaaaactaaataattaaaaatgtaaaagtttattttttaattaataaacggaataatttattttactttaatttgaaatgaattattatgcatccaaatttttaaatctaattttgcttaaaaataaatctattcatcaaaagaaaaattaaatttaattaaaataattttgttattaataataaaacaaaaaataatttctttaatttaaaaaaaataaatttaaataatttaaaacaaatcttcaaattaattaaaaacagtgaaaataacccaaaaatgcatagaaaaataatgtacaccgtccgggtccgaacctgcctcttccctcctcataagggtgcctcagaatccccaatcacacaaggattctgaggtcaaaaaatttgaaaatttctagggggcctagctcgaaaatttttcacaatttccgaaaatgaagtacagccttcgatagagcttaaaaagctctacaattttactctaaggcaatttttgcctaaaaccgacccctgacgatttatgggcccgggactcaaatgtcccgctcaggccaaaatttttttctatttccgggaaaaaatcgaaatttttccgaaaaaaataccagtcgatagagctcgaaaaactatgttttggaagtggtctccatttctctgggaaaaatcgttaaaaaatcctaaaattcaaaaaccaaaaaaacgttttttaggcctaactcgaaaatttttgaaaattttcgaaattttaaaatttggaaaaatcgagctttcaaagctctacaataagtccgctggagccccctcgctcagatcaaaccctgacgcggtattcacctgggactgaagtggacaaagttggtactgaatttctcctattttttgcagcccttcctactataggtagaggcctagaattttttttgacttttagacaacacttcaacttaggttcctaccagcggaaagtttttgattcgagatttagaaaaaaagttatgggccgtcaaacgcacgaaaaaatgagaaatcagtccctggtactcagttggcccttggaccggaaaacctatatttttcccggatgc

SEQ ID NO: 17144 - DNA, 1100 bp, Heterodera glycines
  unsure (1)..(1100): unsure at all n locations
tcgtccgcttcgcgacctcaggacgggcgcttcgcgcccgttttttaatttttcggtggacattcggccgcttcgcggcctcaggacgggcgcttcgcgcccgtttgttttattttgtggggaacattcggccgcttcgcggcctcaggacgggcgcttcgcgcccgttttttaattttaatcgcacagagattctgaggtcttaaccatgtctaaagtaaaatatgattgattacatattcgtgatcagcggcccaaataacccctaaaatcatatttttggaagattttttgtgaaaaaaatttccactctcaaatcatggtcacacccctttggtcacggttcccaaaatcacttttatttctataactttttttaaaaaagtgataataagctaaattaaaatttataaaatagagcaaaaaattgcggattttttgagtatattatttatataaaatactttttcagaatggagttatgaatttttttctgaaaaatcgaatttttccagaaattctggaataacttttttattttggaagatagaaattctaaatatataccataaaattctcccaatttttctctatttttaaagctttattccactaaatttgaccaaaaaagaagagatttatgaattttcgaaatttcactggattttccggggcccaaattgtgacgatttttcaaaattttttaaccaccttccaaaaagtctgaaaccaaaaataaagtatatattcgtcttcagcaccataaattaggccataaaaatacattttggctaatttattagcaaaataatttttcattaaatgcaaaaccatggggtcccccctatggttttgaatttcaaaatcacaattaattttataactttttttaaactcgtgataaaaacatgagataaagcacattagattgggcttaaaattctctacaaaaaagctcttagacgattttttgataaaatcaactcctgacgagttattgcgcaagaactngaattgaggcctaccgaccaaaaattntctatttccaanaaatttttgaaaaatttttctgaaaatgacaccaatcgatagagcatgaa

SEQ ID NO: 17145 - DNA, 2458 bp, Heterodera glycines
tttgccaaatttaataagaccattgaatttgtagaagaagccaactcattgaaagagtcactgcttttgggcagacataacagagaaaggttctcactgatggaatcggacatatgaaaacagtagaaggaaaacccaaataaaatgctaaaaaacaaatttaaaatgaaaattatttttttaaaaatagacatcagatgaaagacgactattatttttaaagtcatttctgaattatagtttttacacgaccaattaacactttcatttggccatccatctattaagtgaatacatctatatattattaacaaaatttgaatacatcaataattcaggaatttattttatttttttaatgtacataatagtaattcaacaattctttggctaaaaaacctttatttatggaaaagcctatttgtttttattttttagatgcttaaaacgatcaaagataaaatctaaaaaacataaactatcacaaaaacaatcacatattaacaagtcacaaaatattaatcaattttcaattccgccaccatttcctttccttcgagacaattgcaaatgttctgttcggtagtcaaagccatcaaatccctcgtcgcatacgtagcggaaccgatgtggggcagaataactaaattaaaaacaattcattaaatatgctctttcagaagcaatcaaattggttggctaatagtaaacgttctgtgtccatgttataagcgttagtttaactgcacttcttaccacaattgtccatgcgaaatagggaatggtcagtcggaaatggctccgggtccgtgacgtcgagcccagcggcgccaatgagtccatttttaagtgcttccgtcagtgcctcaatgtccaccaaaatgcccctgaattattctggtgatgaacatttgcaaagtgtacttctcatctgaacaggaccttgaaatgttgatcaaaatcgaatcttttttcattttggaaaatgcgcctttgtcaaatattttgacattttctttggaaggcgcagcgcacacaatcacaaagtcactttgttgaagaagctcgtcaaacgagacaaattcgaacggagagtctaaaagtagtaaaaacattgtccaactaatgaaaataaccgtttgaatgatttccaatttaattaacgcaccagtcacgggcttccgattgttgtaaataatgcgtttcggtttgaatgccacgattttattggccatgcaagtgccaattttgccaagcccataaatgccgacaacggagtcaacgagtgttttgccacacactgaaaatgaataacaaatgacatcaaaggaagggaagcgtaacagaggaaataacgtaacgaaagtgagactcactgtaatacggtgaccatgtcttccatccaccgcttaaatattacgacaaataaaccaaacggatgactgactcacttttgcgcagatctcacagcctcaggaactgtaaatatttaaggaaatataaaaggaatatttatgaaaaatacttttccgcgccgtggacagcagaagtgccatgcccaactcggccgtggcatcggtcaaaacacctgctgatcaaatgacaatccatggaatggagagactaacctggcgtgtatccaatgcgaatcccactgaaatccaataataaaacgggataaaaaacgactcatttagttttcggaggctttatggatccaattcattttgactttaagcaaacgaatgaaatgtttcaaaattgtcctatttttctgtgcttttcccaccgttttttgcatgcttccaaatcaatgtgctcatatccgacactcattgtgctcacgacttttaattttggtgctcgtgccaacaattcgtcgtcgattttgtccctcaacaaacaaaaaagtgcctccgcgtcggccaattctctcaaaagcatttccctcggcatttgaccattgcccgctgaaaatgaagagcaatcaaagaacaaaagttagatgaggaaaacggacaaaattggcaaacgtcgccgaattcggccaattttttcaccgaaaccgtcgaatcggtgacaacgattttcgctttggtcgatgagttttgcgccatcgtccgccttaaaggattgtgaactgaaaacgcaaacagtgaaaggagttttcgcatgctaaaaaagtagtaaaatatttgtcacttccattttgattattaaactgacgaaaaattgataacaaaatgaaattaggtcaccaaaaagacaacaattgttaacaaaaatgggagagacccaaacttggtggcatttatacttttgttacgaacgaagcaattcaaattaaatgacatactgtaaaattcaagttatgtacagtatttgtacccttttttggtatttggcttggaatacgctatttacatgaatatttctgctcatttgaatatttaaaagt

SEQ ID NO: 17146 - DNA, 1209 bp, Heterodera glycines
aagaagagaaaagaggctgaggagaagaaggctcagaacccccaccgaggctaaagccaagaaagacgcagaagagaaggctaaaaaggatgccgaggctaaagccaagaaagacgcagaagagaaggctaaaaaggatgccgaggctaaagccaagaaagacgcagaagagaaggctaaaacggatgccgaggctaaagccaagaaagacgcagaagagaaggctaaaacggatgccgaggctaaagccaagaaagacgcagaagagaaggctaaaacggatgccgaggttaaagccaagaaagacgcagaagagaaggctaaaacggatgccgaggttaaagccaagaaagacgcagaagagaaggttaaaaaggatgcagaggctaaagccaagaaagacgcagaagagaaggctaaaacggatgccgaggttaaagccaagaaagacgcagaagagaaggctcagaaggatgccgaggctaaagccaagaaagacgcagaagagaaggctaaaacggatgcagaggttaaagccaagaaagacgcagaagagaaggctaaaaaggatgccgaggctaaagccaagaaagacgcagaagagaaggctcagaaggatgccgaggctaaagccaagaaagacgcagaagagaaggctaaaaaggataccgaggctaaagccaagaaaaaggatgccgaggctaaagccaagaaagacgcagaagagaaggctaaaacggatgccgaggctaaagccaagaaagacgcagaagagaaggctcaaaaggatgccgaggctaaagccaagaaagacgcagaagcaaagaaggaggaagaaatgaagaagcaaaaggctaaacccgaagaaaagcctgaggcacctgccgaaggcgtagcggtagtgccggaagcgaagaaggcggaagagacaaaggaaaggctgaagcaggaagagaaaccagtggaagtgccaccatctccagcagaaaagaagagaaaagaggctgaggagaagaaggctcagaaggatgccgaggctaaagccaagaaagacgcagaagagaaggctaaaaaggatgccgaggctaaagccaagaaagacgcagtagagaaggctaaaaaggatgccgaggctaaaaccaagaaagacgcagaagagaaggctaaaaaagaggccgaggctaaagccaagaaagacgcagaagcaaa

SEQ ID NO: 17147 - DNA, 2016 bp, Heterodera glycines
aaggctaaaaacggatgccggaggctaaagccaaagaagaacgcagaaggagaaagcttcaaaagggatggccgaggctaaagccaagaaaggacgcagaaggcaaaggaaaagggaggaaggaaaatgaggaagcaaaaggcttaggcccgaaagaaaagcctgaggcacctgccgaagggggtagccgtagtgcccggagcgaaagaaggcggaagagacaaaggaaaggctgaagcaggaagagaaagcagtggaagtcccaccatctccagcagaaaagaagagaaaagaggctgaggagaagaaggctcagaaggatgccgaggctaaagccaagaaagccgcagaagagaaggctaaaaaggatgccgaggttaaagccaagaaagccgcagaagagaaggctaaaaaggatgccgaggctaaagccaagaaaaaggatgccgaggctaaagccaagaaagacgcagaagagaaggctaaaacggatgccgaggctaaagccaagaaaggcgcagaagagaaggctaaaacggatgccgaggttaaagccatgaaagacgcagaagagaaggctaaaaaggatgccgaggctaaagccaagaaagacgcagaagagaaggctaaaacggatgccgaggttaaagccaagaaagacgcagaagagaaggctaaaaaggatgccgaggttaaagccaagaaagacgcagaagcaaagaaaaaggaggaagaaatgaagaagcaaaaggctaagcccgaagaaaagcctgaggcacctgccgaaggcgtagccgtagtgccggaagcgaagaaggcggaagagacaaaggaaaggctgaagcaggaagagaaaccagtggaagtaccaccatctccagcagaaaagaagagaaaagaggctgaggagaagaaggctcagaaggatgccgaggctaaagccaagaaagacgcagaagagaaggctaaaacggatgccgaggttaaagccaagaaagacgcagaagcaaagaaaaaggaggaagaaatgaagaagcaaaaggctaagcccgaagaaaagcctgaggcacctgccgaaggcgtagccgtagtgccggaagcgaagaaggcggaagagacaaaggaaaggctgaagcaggaagagaaaccagtggaagtaccaccatctccagcagaaaagaagagaaaagaggctgaggagaagaaggctcagaaggatgccgaggctaaagccaagaaagacgcagaagagaaggctaaaaaggatgccgaggctaaagccaagaaagacgcagaagagaaggctaaaaaggatgccgaggctaaagccaagaaaaaggatgccgaggctaaagccaagaaagacgcagaagagaaggctaaaacggatgccgaggctaaagccaagaaaggcgcagaagagaaggctaaaacggatgccgaggttaaagccatgaaagacgcagaagagaaggctaaaaaggatgccgaggctaaagccaagaaagacgcagaagagaaggctaaaacggatgccgaggttaaagccaagaaagacgcagaagagaaggctaaaaaggatgccgaggctaaagccaagaaagacgcagaagagaaggctaaaacggatgccgaggttaaagccaagaaagacgcagaagagaaggctaaaacggatgccgaggttaaagccaagaaagacgcagaagcaaagaaaaaggaggaagaaatgaagaagcaaaaggctaagcccgaagaaaagcctgaggcacctgccgaaggcgtggccgtagtgccggaagcgaagaaagcaggagagaaaaaggaaaagctgaagcaggaagagaaaccagtggaagtaccaccatctccagcagaaaagaagagaaaagaggctgaggagaagaaggctcagaaggatgccgaggctaaagccaggaaagacgcagaagagaaggctaaaaaggatgccccggtgggagccaagaaagacgcagaagcgaaggctaaaaagga

SEQ ID NO: 17148 - DNA, 786 bp, Heterodera glycines
accccctccattccctccaccagtcatccccctcaccgtccgcttagtctctctctgcccctctcccccgctccctctgcctctctgcctgcctttctctctctgccggtcgcccgatggaatgatttgctcgccctttttcttccccttttattcattttccttttaattccccactcactcgcttctctcacccacccgttcagactccaaattccaccacattttcttttacacttttcactctgactgctcattcctctgctctttttccctaccttcccaaatcattcctctccatcatccagcaagttcaccacattcattcctctgatcaaaattctataccgccttccaccctcctcctcctcctcctcctccttctcttctcttcatttaacgcctttggctcatttgtcacccatcaatctcgtctcgtttcctttccatccatcctttcatttccaataattttttcatccatttccgatcactgaatttttctcaatccccccacctttcttttgttcattgattgatccaattctcacaacaatttaccccgtccatcgatggctttcctgatcggtcgatctcttctcttcaatggtgtctcttcatctatgtgtgtgtgtattacccgcttgattttcaccgataagctccccgtcgcctcgcttcccccccccccccccctcccctcccttcgtcatttcattgatacaaaaaatattccccacccctttccccacctcccgtttcatcgacagatttcaacataaaaat

SEQ ID NO: 17149 - DNA, 1428 bp, Heterodera glycines
ctcccccccccccgtcgttacccatcctgatatgcacaacactttgaatttgaattccggtgttggccttttcctaccaccacaaaaagcttgcccttgattatcaaatttttttagttttctcaatcgatccactgcttcgttccactatttccttctcagcaactgatcccccactgcccctcccactcgatcacatttctattgttcacaagttgtcatcggtggggcttttaattctcctccagcaacatattctcgagtcaacgtttcatctccgtttctctccgcaattcaaattgtccagccattagcgactttttaccgaacgaacaaaagaaccctttcatcgcataagcaacagaaagtacgacgccgtcacgagaaaagacagctgagcatttcgtacagtgcacaattcgcaaaccatcgaagaacagtatcacaggagaagaagctctgagaaaagctgaaggagcaaaagccgatgcagaggctcaagaaaatgaccatagggggcatcgccacttcgaatgtgccccaaaaacaacagccacaggcagtgtcccccgacagcaatggggacaaagagagaccgcgtaagtttggggtgggggaccaatacccagcggggctttcaagccggtgattttttagtttaaggcttttgggtttttaaaaaaaaattgacccaggttaagaatttgatatgcgttttgcctaatccctaatctcgataaaacatctgtttagattcacttaaactctaattaaattaacttatgtgccaaatttgtggaaaataaaatgtgttcgaatattttaacaggaggaggcaattgtcaatacacattgatgggggaaacattctgtaatactttggctaatgggtgttggaacggaagtgggatatttgctgggattgatcattactcgtccgattcactagcgcattcttaggatatcataggaggaaaagtgggggttgaagagagagggaaagagagtgggggaggggggagagagggatggaggaggagagaagaagagagtgggagagaggggggaaggaatgtactgtaggagactaaaatagtgtgagacgtgaaattacgacgaatactgcttctgataagaaaacagagaataagaacaataatagtacacaaaaaggggccattaaactaaaagaattttccaaatttgcgaaactttttcaaaagataatttatattatattaaataaatttttcaataaatgtctgaaaaaattaaaattcatcaatatttatttgttgtcattgaatataattgatttgttagagccaatttcctaaacgattcacatgaaacagcacatggcatttatttttctcgtatacacccatatattaaagtaagataaggttaggcgccatacatattttt

SEQ ID NO: 17150 - DNA, 2233 bp, Heterodera glycines
  unsure (1)..(2233): unsure at all n locations
cagtttcttgatcatctaaagaatggccaacatttgccatctccccgtatcacttatccaccccactcactttatacatcgcagcagctttgctgtgatatttcacttgcgcatcattcgactcgcatccgtgctgcttgaagaaagccaccttaatttgtttgtcagatgctttagcaattattcgaaaatggagcgattcaccgcatttgcatttcctccgatttgcatggcactaaattttggaaaacaaaccaaattataaaaattgttattgaaccgaagctgaatccatgacctgaaatggcaaaagagtgtgcaaacattcgagtcactgtaccaatttgtgtccaaattggtggaacggacgaaggacaaatggactccgaggttacggtggacagaagagcaatcgatgcaaatgaaaacaccgtatgtgactgaagaccacgttgggtttcgagcaccacagtcaaaacagaccttagaaagaaaaagattaaaattaaaaatgggttgagactttgttggatggattcgctcgtagtcttttaaaaatgttctcaatgtccggaggtgtgggagaaattaattcatttgccataataaaacaatattttcgaccttgcctgaatgtttaacaaattatctgtgaaataaaacaaaattataaacaaatgtttgaactggttattccacctttctttcatagacaaaatgaaaagccatcaatctaaacaaaaaaatgagaaaaaactgatccatcttagcaatttgtctgtgcgccaattcagaaagtccgaccaaaattataaattgtcaattacaacgcgcaaataaaatgaacaaattgactaaaggaaatcgctttaataatttaattttcaaaataaaatgcagacataaacgggatttctccttgtttcatgtaatgaatggtcattagatttcttcaatttccatctgctgttgtatttggtctttgttattggcggcttgttccacgtcatccaaaacattttcaattgctcgaatttgaacaaacccgccatgtgaaggctcacaacgaaaataccttaaaataataaattcaaaaccaaaacatgcaaaaagaaagtaaatttgtattgatattacctgtgtccatcaagtgaaccgtcatttttcccagttgcttcgtcataaattacgccaacccattgagtagtccccggattttcgccaaaatgagtaggaccgacaaaagcaatttgggcttttcgtggaggttgatcacggagttggacaatacagcgcttcncaggctttatggacattagaatggattatatttgtgtttatgacgtttatctaatcaaggtatttcaagcagaaagaacaaaatattttgctgggcacacattattcgagaatttttttgcaatttatgataattaaattttattcaaatcagataactaaccccaattttatttggcacttgctgctcggatcgttcgactaaaaagcgattggtccactaaaaaggctattaagtttgtttaccatcggttgttgtcgttgcagttgtcataagttgttgtttccattttcgagctgtgtctaaaataataagcatcgttttacattagcttgttgattatcatactattgtattttcacttttttaaaaagtctaaccttttctattggcgtatctctcttcgggaattacataaaatgcattggggtcattcgtggaattatcatttcttgtttcactggtatcgcaaacattcacaatgcactgatctcggactcccaactgttgaaaaaattcgagaataaaataaaaggaaattacaaacttcttctaaggtacggtcgtcgccaattaattctgaaataaatttcccttcgtgcgaacgcaattcaagcttcatatcagcagaataaattcctaccacaagctccaattttaccttaaagatcattattgtaaacaaacaaagttttccagaaaaggatttttttaccttaaattcaaccaaagccattgttgccggataacgcaccaaataaggaaattcggttttatttgttgagatggataaattaatcattatttcaataattatgtaaaggatttaaagattaacttattaaacataagtatatggtacatgataaccgaagggaaaaacccaactcgtactgtttttcgacagaaaaaacgtcacaacttttgttaaag

SEQ ID NO: 17151 - DNA, 3429 bp, Heterodera glycines
  unsure (1)..(3429): unsure at all n locations
tgaataactcgcaaatgtaacttattgaattttgttaaaagtagtaaaactttacgaaaaactacttactttttcctcaaattttttatgtccatgatggacaatcgaaaaaaaatcatttgaacattttaagcgtgttttgaataaatttagtaaaatgaagcattttgaaccaaaattagttgttttttttcttgcctgccaaatgccaaataaggcttttgaaaattttaatcgaaccctgcttttaaataatgccaatttagggtgagtggaagcaataaaattaaattcataaatatttttcgaaaagaataggacatttagcacattattattaaaacagatgaaggcgaataatttaaaataaaggttcatttttgaactctttcagggcttcattttttagcaaaacgagtaggaaatgttttcccatttggttatctaattatatggcggggggcatttattttttgtaaaggcggccgcgccctttatctaaatttatctaaaaactaatcggaaaaacgggggaaattgctctttattcattgtaaatgccgcctccataatacataatttagttaacccaatagaaaaacatgaatctattcgttttacccaaaaccatgaatcccaaaagagttccaaatgaacttttgtttgaaattattaaaatatattcatgaattattttgtatctctcatccagcaccctaaaattggcattatttaaagtgtgtgggggggggcgatatccactgaatattgcatactgtatttgatggaatacggtttattcaataatttaaaaatgaaaaattaagttgaaaatttttttaaactaataagcgttgaaaatattttcaggttaagttattccttacacttatgaattcacaaattggtgttgtataaaaaaattggaagattcatgaaccctggcatttatttcattcaacaataaacgaaccaattaaatgataaaataaacatcatttaaaaattttaaaaaaatgaattatcaaattggggtcgtggcatgcttcaaatttccagcacattatttgccactcgtcaattcattcagcaaaagcgaaaattggtgctaaattaattaaaaattanaaacaaaatccatgaaatttattaatgtatttatcataccattaaatttttgagtttataacgttcaatcaaaagaagtcgttctaagaatggaatttccacacaattggccaaatggacgccgcaacgctccttcagccaatcaatttggaagtaatcggcaattaaaaggaaagtgagcacattttgggctaaagtgaaaaaaaaacataaaatcacagaaaattgaaaaaaattaaatttatagttttaaaattatggattaatttgaataatagtcccaaaggagactaattggtgtgctcatttttatttcgaaattgtaaaactttataataataataataatatctcattaatatatataaatatataagtgctaattgccaaaaaaaaaatatttacgatttgggaagaacggttgacccaaggacgaaattgaaatggcatcagcaaattcgctgaactgctccattgtgatgcccaatccgtccaggttgatcgcccgctgatgcttctcctgcatctccacgctgagcatttgtttgaccattggcgaaacggacataagccaatgggcagaaatggtcaactgacgatcgccgatgtgcacagtcaaatcgtcgtccggcgaacaaattggcgggcatggactgagtaaatggaggggggcggggatgtacaaaaaaggatcagtaccatagccagataatttcggagtaggggcggagggctaactaccattcccctcaaagcgtttttttttgcactttataatcacttaatttttgatttgagtttgttcacaaaaattatttaaagtgctaggatccggcggtggcaaaatagacgccgacgagtaaaatttcgccgcttttaaatttttgataagatgacctaaccaaacggtatcttttgccaaactctttctttattccctttatttttgttggagtttcccattccaccaccggcatgagcctgaggccaaacaaatacggcaatttggtttacatttaataattaactgtattacttttcgatcacttcacgttttttgagaaatctgatcacaagagaaactggcaaatttgtttcaccttcagcaccaattgttcctcctttcttcagcataaaggtctaaaattggtgcctaatttagaaaagaaattagcaacaaataaatcaattactacttttagaatggtctgtgatccctgagaccatttccacaaaataatttgcgccaacaattcggaaccgttctgcagtgaaccattgctaatatcggtgattgtcaaaaattctggcccataattattataattatttttgtaatgccgatttttcgtgaattcactaaatttagtaaaagtcttattttaaaatatgaaagctttttacattgcagaaaattgggatttgactttgagaattgaagctttattactacagcaattcgtggtaaaattgaccattttttcgtcaacaataagataattattgtaaatgtccatccatctaagccagttttatttctaaagaaaaaaattattgaaaaatttcctaataaaaatttaaatataacataaaaatgtaattaagagttgatgtagaatataaggtgcacataattatgtgaatgattaataggaattattaatgtaataaaaaaaatgcattagataaagagatgagtgactttctttgtctctttttggtgggataggtcagcgttttgccgatttgtaaaaaatgcaaatagaatttatgcatttataattaaacatatatttattaagttaattaaagttaattaaatagtcatttttaggcttagattttttgggagcagggatcggggtcggggttcggggttttttaattttccgtatttttttaaaattttatacaagcaaaaaattcaaaaaaaaagttagtcataatcatcattaaaattaattaaatgatcagtgaaattgaatttgatcacatttttttttgctttccaaaacattttttcgcgcacgcttttcccaaagacttttgaggagaatgtggggcgcagctggggaaaatttttgaaaatttgagtgcaatttgttaacaaaatttcaccaaaaactgccaaatttttacgattttttttaataaaaaacgacgcttttttttgcggcgcactttttaaaaaaactttttgggagacagggtggttcggcggtgccgataggtgtcgccgggaaaaattttgttaagtttaatgctatttgttaacagatattgtctataaaaaatgaccaa

SEQ ID NO: 17152 - DNA, 2456 bp, Heterodera glycines
ttatttcgtaatgtgcacgtgactttttttttgttccaactatttcgcaatatgcgcattatttgggtcacctgtcaataaaaatgattgatgtctttcaaaataatgaatctccagacgattttttttacatttttgaataaaatggtcaaagctgtcaagaaaaatgattgatgaccctctaataaagtagacccagacagtcacgtgactagacccctcccctttttatccatttcgtacacccggccaaatcgcaaatcattcaactaaatagttggatttcattaaactcccttccgctctaatttattttactccgctctatttttctacattttatttcaaatctactgctattttcctccgtcaatttcttttcaaattcctctgctttttaattctgcttcaatttcgcattttggtttttaaaatgtcttttaaacgagtgaactctgtcaaacccgccgtgccaatggaaaaaatgggatttccgctcaattgggtaagtttaacaaatcttaatgtataaatagctaatccttttaagaaataatttcctgatggagccctttaaacttattgaccaccaaacttcaaaatgcaaaaaagtttggttttacgaaaaacataacggaatttgtgatcaacccggatgtggagcgccccgatgaaacgctcccgcgaatcatcgagagaaactccacacaggcttgtgaaaaaagttgaaaaaagtggtgaaaaaaggtgaaaaacgcatggataaaggtgaaatttaatggtgaaaacctatggggggaggggggttattgacagccacacgtgcaagggtataaagacgccccgcttcttacccccacctaaacccatatcttggtccatccctttttcatgtaattaattataaataaaaatttgctaatattttcgttatttgtgaaaataattaaacatcttctaatcaattatttggtccctccattttcaaattccattatttttggtctcctcctctctccttctgttccctccctcctctgccgccgcccgccaattatctccgattttgatcaaaaaatttatttcaaattccacatttatttttcgtcatcaaagtattccgtggcgtagtggttatgcgcccggttcgctctctcagtgctggtgttcgagttaagccccctcgggggatggcgtgtttggggttcacgccttcgaacgtcccccatgcgcaccttcgctgagagggacgagcccagctcggacatggtggtaatgcataatgaacccagttgaggaccagtccaagacaaggggtaccactattttttctattttcatatcattattttttatttttatttaaattttcataatgttttttgcagatattatatttctttttatcatattttattttctattttcattgaatatcttattttttgttatatttggcatcactattttcatcattatcattttttacactattttttctattttcatatcattattttttatttttatttaaattttcataatgttttttgcagatattatatttctttttatcatattttattttctattttcattgaatatcttattttttgttatatttggcatcactattttcatcattatcattttttatctacgaattattttttattaaaattcctttctgcagatattatattactttttaccagattttattttctattttcattttgtataagatttttgttacatttggcatcagtattttttaatctttattattattatcttttttgttatttggaaaaaaattaaaatttcttaatctttttgttatttgtgaaaataattaaactttcatttaatcaattctttggtctcccgttttcctcattttcacactaacatttttgctttcccttaaaatatttctcaatttttattaaaaattaacaaatgaaaaaaacaaaatggaaccgtcaaaccaatcatttatcaccaccgcccgatgcggccaccgaatatcttccagcttcgactgcgagctccattcccaacgtaggtccgcagagtttttttaactcgggaattgacctaaacaaattaaataatatttaaatatatatatatatatatatatataacaaaaaatgtcattattacatgctttttcgaattcagtttgtaggtctccaatatttttttaaccagttcgtgcttttgaagcggcccagcatcatgcagaatcaattttatcatctaaatttagaaattacccctaaaaataaatggttaataaacagaaacgcacaaatatatatggtgcaggttcgagacgggcaatgattttaacaatttaaagacaaatacctgaatttacgataattttaatgaaaaagaaattaatttgcacattgtaaaaaaagtatttgtaaaaacgatatgaaaaa

SEQ ID NO: 17153 - DNA, 3453 bp, Heterodera glycines
caaattcaggttgcaaaaatttttttcgacgttcaatttcgaagatgaaggaatataattgcgataatggaggagaatgtgatattgaacaatgtaatattttaaagttaaatggtatattagataggattaaaattggaataaatgtttaatttttatataaacaagataaaacatgtaaactgtgccggctgaacaaatgcttaacggtcggaatgaatccgcagggcgttagcgcaacaaaattcagtggtcaacaaatattggcatttgtacaacaaatgaaacagcaaatggcatcattagcagcagcatcaacatcagcaaatttgacaggatttgaattgtgcgcacaaaccaacaccacaacaaaaaatgggccacaacaattgggatcactaaattcggttgtcaaatcaaagacagaaataagttaaaacgcccggttaccgtaacccgttttcaaactttttatggtaactgatcggtaacggttaataaaattttttaattatttttaagtcaagtccaactcggaatgaactgattgaacgggaaaattttctctttttttaataagccgaacttgcaaaaaaatttagatttataagatcttctgaaaaagtgcatataattgttcttaggccaaacaataaaactccgagggttttgcacaagttctggtcaagtacagttcgaaccgatttttccaagaaaaattattatattttccataattcaaaattttacttctttcttaagtgcaaactttaaataaaagaatatttccccgatgaaaagcaggctagaattgttttaaagttttcttcagtttttgagtttcggcaatagcatcttgaaaaagtaaaattgaaagaatgaaaattatttctttcgggaattttatatttcttgcaaattttataaaatgaaagtattttgttttgatttttttttaattaagcttagcttttcaggtaaacaatcattagcatttgtataataatatgagtatttaggcgctggaacaaaaagattcgatgggtttcattatgttgaaacatttgctggacattgagcagaaagtgcgccgaatacgcttctcaccgacaccgattccggaatttttttataaacaatgcgattcatttgaggcaatttttgcacggaaattaaatttgcttgatttgacgcgtaaattttcggtgagcaaattatttaaaatgggttttaattttaaaatttaagacaaaacagtcgaacgtgcctaaagcaatattttttgaaaaaatacgtcaatttgggcccttctttataaggccagaggaactggtcagagatttgttatttgtattcgaaattggcaaaagttttcctttctttgcgcggcttgacatcaatgataaggtaaaaaatatttttcaaatttattcaattttaatttcaatttaaagattgccctgtgcagtaatattgcgatgccattgtatgtgttatgcaacggtttctactcagtccaacaaaattgtgaagttttttgtaatccagctggtatgaagcccattcagaaattcaaaaattcattctatcatgaagacccaatgtatgcatttatttaataattttcttaaaaaattaaattcagtgccatgggaatgggtgacacattgttgtgcaaagccatagaaccattccgccgtttaaaactgagcaccgaagaatttgtacttattcgagcaatcatttactccaatatgggttagaagttttttataaaaaatttctacaagaaaatttatataattaatgacaaattcaattaaatttttagtttcgccagggcttagtgaccaggcacagaaattgttattatctgaagcggagaaatattcttcactgttaatgagcattttacaggtaagtaaatgaatcgagttaatttgcacatcttaatgagtttcgcgccacttagaccaataacggtgctgcgccgggtgccctacggtacgtggaactgatgggactaatcgaaggtctcttcaacatgggcgccaaataccgccaattgctcacttacatttcaaatgtgttggatccgaattttgaccgagtgatgcctcccgtgctggccaaaatatgcaccaaaaggcccgtggaatcgcacaaattgttaccgtattaaattgaaatatgctatttctaacattcgggcttaggtccgacatgctatttgtgcttatttcttcattattttgattttaaaaacaaaaaatgtgattttaaaccaaaaatttataaaattgattattttggtgcaaaatctgttaacaaatcgcataaaattttcaaaaaacaaatttttaaaattgctctttccgatggacctaatagtttttgtattttataccccagtagcactgccgtgcgcggtatacgtgctggcgttgggatttggagcttcaaatttggtaggggaattgggtgcattggatttgcacacacatactcccgacggaaaggccatttgttgtgatcagacccagtgagggagatcccctgccgctctaagacccgcacacttaatgggataagtgactttattctcgggagactaaacacatatctctaaatacaagtgaaaatttaaagtgaccgttcactcacaatcggggagaggggcgggcgatacgataaacaaaaatgaaatcagaaataaaatgaaatttgaaagtgaaactcgtgtcatctcaccaatttcgttaaaatcccccatgacaactcgcaatctcaaatgcgaaaaggattttagggcattttaaaattaatccgcacaattacctcaccccttttaatgaaccttgagaaactttaaaagattaattactgttattgataatttcctaagaaaaattcctcctattactttttatttaccgtacctgaattgccaaatctgtaattatctctctcaattcttgtttttctctgctccaatcacccatagcatggtcatcagctgattcttcccaatttcgcgtattttctgaattagatggaccaggaaaatgtaagctaccaacaaaatggatttgcactaaaaggcataactttttgctcttattatagtaagtgtaaaaaaaaaatttgattctggtcatttaattctgtgccgcaaatgtcattttgactgggcgccgtatgtgtcgaaatgtctacaccacaattatcagcgccgcaaatgtcagcgccgaaaatgtcgcatcaccgctggcggcgggacttttggtgttttcaatttgcggggaggcaattagggacatttggggtaggacattcacatactccccaaggaatggccacatgatttatcaggaccatgggtctcagcccactcttgatggacacatttgagaagataagtggttttattcagggttccacaggaaaaagaaa

SEQ ID NO: 17154 - DNA, 2343 bp, Heterodera glycines
caccgatggactccaccttgtacacgtcgtgctcgtcaatgattgcgtcgaagatggtgtacaggtcgttcatcagattgaccacctgcagcggccgcatttggttggacagtgccgcgaattggacaatgtccgagaagaacaccgacacacagtcgaactgctcgggctccacggattggccgagctttactcggtccgccacttggctaaaacagttgaatattgaaagagctccccccgctaaccgtggcatcatccgatagagcaaaatgccctacttgcgcttctcccccgccaactcgcgcgtcctttcctgcacttcctcctccaatttgttggcgtactgctccaacatttcgaacacgtggtccatcaaattgatgctctgaccggcgttcatttgccgcaaccgttgaagcacttttacaatagtcggccgttcgtttggggcttcggtccaacagtcgcggatcagatgaatctgatgagtttaaacagtaattgatttaattaccgaaaacccaaccattttctatgcacatggttcattttcattgttttagcatttagtcatttcattaattgcctttaattaccaattccgggtgcaaattatccaaagcgggccgtatcatcggtctcaatggcaccaatccgccccgcttcaccaaataggcaatttcgtccgcgttgcgtccgcgcgttgcgcctgcgacgtgccgcgtcgcggtgcctctgctccaccccatttcttccaagtcgcgcgtcgctccgccgtcttcctccgagtcgcggccctcctcccaacacggggccatgttcaccatcgtaaatagcaaataaattggcaaatttagacaatgagttaatgtccgtttgtttacttccgtgaaaatcaatgccattgtgtaaatgtccgactgttttgagccttcggccacatttatttcggcgccgtccgtcgctcttcgcaattgttcgggagacagccataaaaggtctacaaaagaattaattcattgattaattattgtaactttttcaccttttgcttgcattttttgcggacttttcagccatcgaagcccaaaatatgagattttcacttgccatcgttcgttgatcaaacaagcggaggatttcagtcgaccatggaattggagtggcgaattgtgcaggaactgaaggccctggaaggggaaaaaatgctttttacttttataattttgaaattaataattttaattttcatgagttccttagaataaaaccaattttaaactaaatgccaatttatttaattaccctcaataacaaaataaatcaatctctcacttcgcaaagctccttgacggccgattggatgaacatcacatctttgaccatggcattttcggacaaaatcacgtctctgatggacccgcgcatgcaaaagttccacacggccaacacattgggcccgtccaaactcagccccaaaaaccggttcatattctcgtggtcgaataggcgcatctgaaaattttaattaaaattttaaatcgaaaatggcattttttgtctttttcttaagaagctttatccttgctgggggatacgtaccccattaaccccttgggatgttccctgccccttggccatcctttccccgccccctccgccaattcaccgctcggcactcggccatttcagcgacagacaatggcgcggcggctgtcattgacccaaacgtgcaaacaatgcacttgtccccgttgtaagtgtacagagagaagtttttggactgggccaaactgtccatcgtcgaatgggtcagcgcggaaacgttcgtttggttggagcggagggagtggtgactccgctcggcgccatgcttaaatagggggggggataaaaattagaaaatgatttgggatgaattataaaactcacccgttgcttcactcgcttcatcatcgcaaatggaatttgccacagtaagttggttttacggttttcaacaattttcgaactgaaatttaaacatttaggctacagtaatacttcagcaacttttttcttactgtattaaatagaccatgataagcaaactgctgcctatgattagcacgaagagaacaattccgcttatgaagtaccccttttgaatagcaaataaaattgttaacgttacagaaatatatcgtactttgtacaactcaaacaccgatacggtacaaccgttgccatcgaagccgcacgggggcaccgcctggggaatgaccccaccacgggtatcccacatcacagaactggcatttcgcaacgtcacattctgacgattgagagaatatatcttaa

SEQ ID NO: 17155 - DNA, 2588 bp, Heterodera glycines
agacgaactcaacaattgaataattttaaaattgtattctctacattgatttttttctttataaaattttttttattgataattaccgaaattcggattatcattctcttttagtttcaaggtctgaatataataaacatagtttgtccaaatttatccgcgtagaaaactttctattatactaaatcttaaaataattatgaaatttttaaaatattattcgcataattatttctacaatcattactgcgggaatatgcacttgacgacaattggacccggataaacaaatccattaacaccctgccacacagtggacatcaaatggtcatcaccagccaaagccaaacataatataattcatgaatttaatataaaaactgaatttaagttttatttgatgaatataacacaggagaataataaataatacacaatgtttttgcttaagtacaagtgtcacgatttgacattgtattgaagaaatgtaaacaaaatttacagaaattaaaataaataaaaccgtgaattatttataaatttaaatacgctaatgattagtgagtggattatcctgcacaacttaaagtttttttaaatgttttacaaccgattggaccgaatggtgttcaaccatttccgccaccaaatggatccataccatttttataacaatctttgcaatttattctaaaatattatattaacgacctttaaagataaaaacttcatctattctcgcaacataaaaaaattaaaaactttagggtcgggtaggatttggcgtgggaggggggggtcgggtagtcttgtggactccataaaaaggaaggggctgtgtagacctctgcctactctttccaacggtggtgaccaagatgaacgacgacaagctaattaatgggattaccgacgatttaaatatcgccatgttctctactcgaacgaagaactactatatccatcattcatagtttgtcaattaaacaccagataccaaattaatttttgattaatttaaattttaaatataatttatataagcccatgataattttataaaaggtaaagaatacaattttaattgtaaataaataaataaataaatcacattaatagaaaaaagtttaactgttaaacgttattaaccatgcataaaattttttaacctactcaattaaaaattgaaaaccaaaattttacaacggattagaaaataagtcatgttaatgtcataatttcaaatttttaattattacgagaaaaaataaatatataaaaatttaagcttaaatgaatcattagcaaaagtaaatttttaactactcgcattcctcaaacataccttaactattgatatgacgaacacacttagtttcttacttaaatttatagagtaaaatttaaaagaaaaataaaatgtttgttagacaaaaaaatcataaaaaaagaattaaaatcaattgatatcacaaaaaatttaaataaaatgaataaaaataaataaataaaatattaagcatttgcaatgtactaaaaaatttctttgtcttgttccatgacggcgattaaacggtgctgttagatttcgacagtggtgatctcgacagtaaagcttatttttaaaaaatttgttctatatggcataagtctcgttaaattttgacaattaaaatgataagaacatggctcttatacttgtagaggggttcgagattttcgaattcttgcttaagagcctgcacatttgaattttggcactcaaacccggcgttagttagcagatttccccacacgatttgagaatcttgtctaagaaatttgttgtatttttgactcattccagcaagagatatttgtatagaaaaagtgaaagcgataaatttttagcaaaaaaatcatacaagtcttatttttattacttacttcaattataaattttgtatttgcaaagtgtatattaatattaattcaaatatacaataaatcatatagaaattaattaaaaagtactgtcaaaatcaactacgtcgaaaccaatcactgtcgaaaatacctggtacggattaaacgactttattaaaacgagtgacatgagatataacaatttatatatagcaaaaaagataaacgaatgaacatgttaatttttatatgcaatttgttaaaaaatgtaaattaaaaaagtaaaaaataaataaaaactaaaaaaacaactcaattaggttaaataataaatcattgacttagtcttgaagagagaacgaatgtaatttttataattaagaaataattttaaaagctttgaaataataaaacaaaaatagttaattaaaatgattataattggtgagttaaagtaatttaattaaattttttgtggaaaaagatcgacaaaacggtcccaaaaaatggaagaaggaaaagaacgaataaattaaaatgggcccagcgagatcatgaaggaaaaattataaagtaataatgcaataaaactttagtgtatagtttatatttatttaacaaaattcttattaaataaacaatagaggacccaaaaaatttattaaatttaataaataccattt

SEQ ID NO: 17156 - DNA, 1858 bp, Heterodera glycines
gatgatgccaaggcgcaaggccgttctgcaggcaaacttttcatttcatgtgcctttcttgtgcccgaaaatgcgttaataagaccaccgagaatgactcaattcccgcgaacaatgttttcgggactgactgacagaaattttgaaatttttttcgaaaacatttcttatttgtttttttttcgcctggcaacccatttgacggaattcgactaagcctatgtacgaattgtcacgaatgacaccacttgccgaagttggggggggggggggcggcggttctaatcacattcaaatataaaatttttctgcatttctttttaattagaaatagtaatgcatactttttattgttttcagaccggcgcactcaattttcgaccacctctcagccgttcgcgcagtgtgccacgcctttgttccattgacggggaaaggcacgggccgaggaacaagaggtacggtaaatgcctgcttataccgtaaatatgtctctctctttctcttttcccctctctctctctatccgtctcactctcttaactttcgccatctctcgctttctcactaatctatacccatgtttaagtctctcactctctctctgcttatttctctcgttcatcattttctgtaaaagtgttttctgtccatttctgagatcacgtaactcaaaatacatatgaattattacaggatgactgtgatgagactgtgaaggatgaagacgaagatctgcagctttcatcgtctgatctgtactcattgaacaccgcggttcattaccagccagtgccaaccgctaccacaacgatggcaaacgcaatggtctcccatgcctgtgtcgctgctgatcatcagaccatcaacgattatcactatttttttatttttgctcctcatttccattttttctttcttttgccattaagtatttactgagttaaatactgtacgatgcggtgtatattacgccgctgctgtaaattccaaaatatttccgtatatcatacgggtttttatttatattttttaggcaaaacatatcattgaattcaacctttctgtcatacggttataaagacactaaaaatgtttttcatagaaaaaatttataaaaaggaaattttcaaatgaaaaaacatcaatttgatcaaaattaaaaaatgccagcattaagaattgcaaggcagctccgacaaaaaactttatcaatccctctgaagtcgccttcgtgctgatactcatgccggaggagttcatcacgattaccgtcaggcacgatgaccttgcgcaacccgaagtcactcatgcctacaactttgtccacaattttgctgacatactgcacttggccttcgagtccgattcgtcccgaaaaggcaacgttcattcggacgcaacggttgatcatgagtgaaaaaaaggcggcaaatgcacccgcagacagcgaaggcccttcggtcaagccatgcggagaacgcgacacaaaaatggggtgggtgacgagaatgttctggatggccgggtgtcgctgtgcaaacaatgtccgcgcttgatcagctgcattgctgattgcttgctgtaaacatatcgattgatgataaatccaaaaataataaaatttttaattaggcttttgttcaaaaaatagccaaaaatacattttattacggctctagggaaaatccgacactggaaaatccgacaccggaaaatccgacactgaaaaatccgacacaagcggaaaatccgacaccgctggaaaatccgacactatcggaaaatcctacactgaaaaatccgacaccgactttagattttaaaaataattttcgattatttgagtaaatatctg

SEQ ID NO: 17157 - DNA, 2528 bp, Heterodera glycines
atcatttttttattattatttatttattcattcatccccccttttagtcactcctcctttttggtataaaaaatttttctaaaatttcaaagttctaaattttacaaaggtcacccattcgagtttggcaatttggttttgtctttgccattctgttaaatgcagcggcaggttcaaatgcgatcattctctatattaacaggtaattaattattcgattatttattaatatttaatttattcttatatttataaagaaataaatatttaaaaaaacaatttttagcactgaatatcgccatgaattcagaaaaatattgcgttcgctgaccaaatgtttttgtaaaaataatggtaatggataacttagttgaaaattttcaaatcctcattagcgcaataaaaattattctgtgttttggcattaaaataaacagcaaaatccctatatttcttgcaaaatatctctttatattttttaaattagtatttatgcgatatgtcaagaaattttgacaaaatgccaattttcggccgaatttttgccaaaaaccaatcaaaaaatccctctttaaaatctcaagttggggataaagcctcagaaatggttcagccttattaaatcacatttttatttaaatttgtttttagctgtccacgacatcgccgcaattcaaaatcgcgctgtcaatccgaactttatcagaccaaaccaattaaatgctttcaatccatccgaccgatttagtcgttattaattgtcctcaattgtcatttatgttgcttttttataaatatttttgtaaaaaaaacattataaaatttccccatgaaatcaattgaattgcttatgaattgaaaaaccaaaatttcattaaatttttcaactcttttgaaattaacaaacttccatgaattaactttattctcgtattggcattttaaacagaaaatatttatttttgtagtcaaaatttaaaattataatgaatttcaaatcgtttttcttaaaaatgacaaaaattattttcgaaaaataattttgatctcaaattttcacatggtaagtttttcatatttcgtgttcccgacttccgttcagtactaaatttttttttgacttttattatttaaaatacgtacaaattgccattaaattaaatcgagtgtcacggaaatccgtgagccgtgatcacggggctttaaaaaaaatccgtgacccgtgatcacggcaccccaaaatccccgtgatttccgtgatccgtgagccgtgatccgtgattataaaaaaaattttctaatgattttttatttaaatttatttaaaaaacggaatttaatcgcgggaaaaattcccaaaaaatgttttaaagaaaccaaaacatataaaccgctttttttgcggcgcggcgaccttttccaaaaaatgactaagtttacgatttttggcaattttttgaggataattagagctttttgtagaaatctccaaggaaaattttttatttttaactaatttattaagaaaatttttcaaatttttcttaaatttaaccaaaaatctatttatgtaaagaaaaaaatttcctctaatttgtaagctaacttttgatgctgaaaaaatcttttggaccaacatgctcagtccttcatgacgatctgaacaccccaaaagatactgaaattcgagaaaattttagaaaaaattcttagagggttgggaaaattttctgaaaattttgattaggcctgtcgttttaaatttaagcgacggagagaaaaaatagggtttttagcagtttatatgccaaaaatggtaatttttctgccattttggggtcaaaatttcaaaaatacggtaaaatgggggtccgtctgccggtgctgccgacaggcgccgccgggaaaaattttgaaattttgagtgaatttgttaacagattttgtccaaaatatgtccaatcattggttaatttattggtctatggacgttttaaaaaataaagaaaaaataattttcaatgttatgaaatttcttgttaattaaatttcaattaaaattatcaaaacaaaatatataaattgtcctatcccaatggggaattgaacccaagggacagacaacgaaagacagaaggtttaaccaccagactacatatatatgtttactttcaaatttgtaagcagaaaagaaattatttatttttctcaaaaatttcttcacaccactttcctattttcgtctcaataaaaattccctatataaaatgccaatcacggatcaaaatcacggaaaatttgaaaaaatccgtgacccgtgatccgagatcacggcaccccaaaaaccccgtgatttccgtgatccgtgagccgtgatccgtgatcacggccagccctgatacaaacgctaccaaaaaggtactgatctatattttcgaattagcgcgcaaagtgactttttggaagttctaaccaattttgtcgaacaccgggttagacccttatttgttagagcaaaagtcgagccc

SEQ ID NO: 17158 - DNA, 1687 bp, Heterodera glycines
cattttggaggtacggctacataaatattgaaatataagcgcttgttcttgccattcccctcgcactcgaaggacgtgttgtaaattataggtgaaatttcgatcaaaaaattccaatgcatactttcttacatttctttgacaaaagtgcttaatgctgtacgaagaaaacgaaattggctgttgaatgactttccacacccttacagtactaatcgcacattcatatcgtttgatttttagggttattacaaaaactcatcaatttatttgcctattttccttgatacggcacaatcggtccccttcggcgacggcattttattatcttttagtgtaatttactgtcggattgtccactgtcggaatgtccttactgtcgaattgtccactgtccgattgtccactgtccaattgtccactgtccgattgtccgggagccctgacccctactgaaagcagaggggacatttcggcattcctcccccaaaattcaatttttaattcaaagctgacaattttggcattttcgactcactgtgtggatgccttcgaagcgcctcgaagaaaaggttcaccgacacattgatcacttccgttttgccaattgtgccatcgatgggaattcggacgttgattttgtcaccggcccgtaacacaccattgtcagcattaatttcaacgaagttgagcacatgctcctgcccaagtgagacatttgcatgccgtatttccatgccgaccaatgaggcgttgccttcgcactcaatctgaccgacaaaataattaattaattcattactaatgatcatttttgcccaaactagggtggagctgatcagaagataaaagaaaaatgcatatgaaatgaaaagatatattcagacaaatgcttattgttacttatattaaaatatgccacaaatttccattagactaaaaataaaaataaaaattgaattttacttattaagctaaaaaaaccaaagttttcacatgaatgtgatctacggcccatggcggatatctgtgttccttgacggaatttctagatctaaattcttccggaaatggatatgggcaattcatttcgaagtcgacttcatcaattttgatgacgaaatgttccgccgtacaattaatggacaaattgaatttttggccatatttattaagcaaatgctcaacagggcgcccatttgtgatataatgatcaaaattcttgtgctcctgtaatttaatagggtttttaatcacaaagaaattgattttaacaaaatttgaaaaatgtttgatttaaaattaagaaaaattaaattataaattcgaaaaaatttcaaaacgtcgaaattgaggtaattttaattccccaaagttaattaccaggttcaagtagtattggcactggatttctgtatatgaaaaatcgaatgtcaaagcaagtatcgtatcgccaactgaaaacgaaaaaagtgcactctctttacatcagggcttccatcgaaaattttttaaaatcagaacatcgggcacaaaaaatcatattttggggtcgaaaatcagaacatttcgcgaaattgcttcaaaacagttatatttacaatttatttgatcaaaaaggcatcaaatattatatctttcgcctcccattatcggttttaacaattttggaggggaaataagcaaa

SEQ ID NO: 17159 - DNA, 2013 bp, Heterodera glycines
gctgtgttgaggattttgaatttcgaaaaaatagtaaatgcaaattaaaaaaagtttttaaaataaataaataattgtccgtattaaaatccctttaaattaaaaatcgttttttttgtcagttccgttatcgcaaaagacatttagaccaacccaaattaattagatgattgccaattaatcaaactttggttcatttacatatatatgtactaaacacaaaagggcactcacgtcttttgtcgaaatattttgcctcgtgcatcaaagcgatggtcaatttgccgatttgccttttgatgaggaattccatgcgaattacgtccccgtaattaagcactgtcattaatcgcttggtcaatggcaatccgtctttctgctgctgctgtccctcgtttgcctctgccaattgcgtatcaatgccaataaacggcttttccatcaaagtgatgccgcctttgtatttgttgatctcttccacctgtaataattaggcaaaaattatgtttaattattcctttttattacatttcattagaatattaccattttgattgagccttttatgtaaaaagaattttcccacgttctacactttctgaacagaaagaaaaaacttttgtgcaaccggtgcagttgattattaccggggacccattaattgtatttaaatatagcattaaaaattgtaatttaaatatttcctaaaaaagaatttcccagaaaactaatggaaattattgcccatcacttttcactttttggcattacccggacaaaatttgtggcccaagttggcatttctgacgtgtaattcctcttcaaaatgtcatttatttgaattgtgatcttgtcatctttgaacaaagtgatgttaatttccaatgctcctgctttgcttagatcgatcgaatcttttacgggctctgatgacttattttcctttaacggaatttaaaatttaaaaaaattgttaaatgaagaaactcttttaaaattaaaaaaagtaaatataatttgtttttaattaccactgaaaatgacgtcattgagatatgtgttggcctaacattcatttccattattgtagcgccgactaaacatttttgcgttttgattgttttaattggcaaaactttgtcgagactctcgaccctctaaaaacttactgtcctcatttttctctgggcgatcatgcaacagagagataatgaagccaaaagattttacattgttcagttgaattcggaaaataatatttttcgcgtattgcaattttctcaaagtgttgttaaatggtaaatccatgtacggtggtttctgtttaatgtaaagaaatatcttgattaattaattaattgatcattaaccttccgatgaattaattaattatttttcttacataatttgtgtccaaagtcacaaaatccatcactggcggcggatcgttcagcaacaaaaatttgccttccaacttaaacaattaattggtgaaattaacttagtatttttatttattaaatattataattttcatagacccttttgggcctcggtgagcctgtattttacatggacctgatttttacccagatccaggtccaaaatggaatcccggtcaaagtccagcttttcttaaaatttcgactgttcataatgataatcagtgctgggactctctcgtcaatgtgcttctgaccttaagtgtcgtcattttttcgagtggcaatccttgccaccactttagtggcacatattcgcggttgcagctcgacggcgtcggcaagtggtcgtttatcgcaatgccaacagcgaatttagtaaaagcaatcttgaaaacaatttcatgattggcactaattgttttgttgatgaaatcggagcatgacaagctgatgctcagggctgacttaagagacttgcttttcaaaccaatattgttccctaattatatgcacagttttctcgcgcagaacaatttttgtcacttctgattcatggcgtattgctttc

SEQ ID NO: 17160 - DNA, 3053 bp, Heterodera glycines
ttcgaatccgggttcaggggttcgaatttagggccaaactgtatgccagaatcggttttcccgaccctggaaacccctaaaaaaagtttattttcagaaaatttttttttgaaaatctgcacatagataatacataagtaccatatattgtggttgcctgtattcaatttttgcacatttattatcaggtttattacacacattgaacaatgaatacaaacattgtacatacacacaaataacgaatatgaagcagcaaattaatggatattatacatacatacatattttgatcacattaggaaggtcgctctgatcacatggaatatgtacaaaatatggggaacggacttcacacaaacaacagcaagcagtaggggggactgatcgtgaagggagaggtcgtcgtgcaccgtcgtcgttctcatcgctggctattcgtccgcttgggtcgtctccgctgtgctttgttctccggcgttagcggctggctcggcggcgtccttcttcttgtcctttttgtccttcttcccgtgcttgtccttcttggaacggcggttgctgtcgtcgctcttcccctccttcgatttgtgtttgtccttgcgcttctcctccttcttgtccgccgcagctgcgccgtcgcctttcttgtccttcttctttgccttctcctccgcgtcgccgccggtcgtggcttcttccttcttgggcgcttctttgtcgtcttcgctcttcggtttctccatgtacgtcttcgcgaagcactgaaaatttgaaaaaaatttgtttgagatgtaaaatttggagcgaaaaacaaaaaaaaaacttaccattcccgccccgaaggctgcaacgccgacgagaaagtgagaagtcattgtgttgttgttgggcgcactgaagtcgttcgttcgttgattgggtgtcgtgtcagcagcaaatgtgcaaatggacaaaaattcgcccattttatatgcattttctgttgcactttttttcagtgggaaatttgaatataaaaaggcgtgaaattgagagaaatttcattctcttcacattcttaattctattctctgcactattacatctaatttctgctgctcaccgactccatcgacaacgacacgcgatggaagaactcgtggcgctctcccctggaatccgcgtcggccgttggacgatcacaaagaagctgggcgccggagcattcggagccgtctacctgtgcgtgaacgaccaaggagagcaggccgcgctgaagacggagccggtcaacacgccacatccgctgctcgtcatggaggtaggcgggggaggaggggcgaaaggcaattcaatttaaaattttttttcaccacccaggctcacgtgatgaccaagctggacacccttcgagacggagacgggaagcacttctgccgctgcttggacctcgggcgcgatgagcaacaggaccaacaatcgggacaaatgaagaagttcaactacatcgtcatgtcactcgtcggtcgtggcctggacggagtcgtcaaggatgccggtggccgcctcagccttggaagcgcagtcggcgtctcgatccagatgctcgccgctctcagaggactccacaccgtcggctacctccaccgcgacatcaagccgggcaactcgaccatcggacgtccggaatcaaacgagatccgcctgctctacctgatcgacttcggaatggcgcgcaaatacaccagggacgacgtgagtttgagtgaagcgctttgaaaaaaacaaaaataatttgttccctttccccccttttcaggggagccaacaccgcccgcgcgttgccaccaacttccgcggaagcccccgttacgctgcgatcagcgctcatctcggacgcgaatacagccgcaaggacgacatcgaatcgtggttctactgcatgatcgagctcttcaaaggcgcacttccgtgggccagcgtggggggcatgaaagaggtgagcaaatgggagagggagggataatcagaattctgatttcatcgttttagatcggcgaggcaaaggtcaaacgccagaagaaacaaccggaagccgttcgacgccaggcaatcgccgacttgctctccggatgcccgaacgagttcggccaggtcctcaaatacatcgtgagttcgttcgttcgttttttccaaaattaataaactaacaaattaaattttgcaggacgacatgaagtacaccgacaagcccgactacgactggatcatcgcgacattgcgcagcagcctcagcaacgccggcgtccaggaattcccctacgactgggagacgggcaagcgcaacgcggcaccgggcgctggaggcggcggaggaggagggggaggagacagctacttcaactgatgagccgtgcagcagcagcagcagaagaatcgccaagaagcgtcaccgtgcagaattgatcatatgaccactattactgtattgtatgtattattttgtgtccatgctgccatccccgatatacacatgtattgtattgttgacatatgtattgattgaaattgttgttgcataactgtgtttgtacatatgacttttggcgaaataaaggacattttgtatgtttcgtcaagttcattttctcgaaaatatagcataggtgtattgatctcaactataggagaataagaccatttaaaaagtgaatgaggaggaaaaacggagcaaatcgaaatgggcaataaaaatgccaatgtgattgcacaaattagggatttcgatcgaaatttctaaatgagcgaaaatttttctgtcttggaaaaaaaggccgggaaaaaaacgcggcacttgcgagattctggcggcgcactcccaatggcattggaacagttgtgggcggacgaaatccttccaaaaagcgtcaatttttcgtcagttaaatattttaaaataaaaaaattgaaataattcacagatttcaatggcattatgggaattgcaacgaggcgtcggcattgggccgatttacaaatatgtgaaggaattcgatggcgacgcaatcatc

SEQ ID NO: 17161 - DNA, 1480 bp, Heterodera glycines
aaaagaaatcttaaaaatttaacatatttctcaatctcgcattgcaaacggaagaaaaatgtcggagaacacaacggaagcggagaggagacaaatggaaaatgaactgtgtgtctttttctagggatgtacgggtccgagaattggtgcaaaaaccgggtccagatattgccagagggtccagaaaagccgagtttgggtccgagcccaagtttttcaaccgggtccgagtacttaattaaaaaaaattaaatatttcgcgaaatattttgtacataattaacaattattaaaataaaaatttatttttttttgaaattgatagcaaataaaaatctgaataccaattttataattttatagaagataacgtggctatcattttttttttgcttttcatatcttttttcagtctttttaggaaacggcagtgatccggcggtgccgacaggcgccgctggcaagatttttttaaattttggaaagatttattaattgctttttatcaaaaaatgaccattgatggatatttggatcaaatttaagaaaataaggtagtttggttacagcagaaccataaaggcagctctttccatacttaagacaaagtggaagttttacaaaagtcgtaaaaaaaagtaaataaaatccaccggtatgagagtgttttccctttccctcaaccttgatcatcaatttgacgctcacacccattcgtactaatatttttctgggcccggttagacccggacttaggcccgggttttcttgaaaaaaccggttatccggctctggaccgtgtaaccctagttttttaaatgaaattttaaaattaatttgccatttttcagtttcatttgtgccgattgttggctttcagtcttccatttgctgccgccttctcaacttggccttggcattgcactgctcagccaccgatttgactgtttggtggacgaacacttcaaaacgcgcaaatggatgttgggagttattgcgattggaaataaaattggagaaaatggcaaaaaggaaatgaaacttcagcaatgtgcaaatttttgggaatggagaacagtgccaattccgcaaaatccgttgccgaacaaattcatcggatttcgacacattctgattacgtaaaattggccgatttaaatgatttacgataaattactaccattttcagatacattgattccaatgtgattgcttttcttcagcgttttcgttctttttttgcttctcatcagacaaatttgtcaattacaacaaaaagtggcgacagccattttttggaaaatgttgtaaaaaacatttggccaatgatcaatgacaaaattggtgccattggtttttcgtctcccgacgaattttgccgttttcaacaattggtgccgtccattctcagcgacaattgttgttgttgttgtcaatctcttcgggcaatgattttttacactggcgatttgccaaattt

SEQ ID NO: 17162 - DNA, 2436 bp, Heterodera glycines
  unsure (1)..(2436): unsure at all n locations
tagttttttaaatgnaattttaaaanttatttgccatttttcagtttcatttgtgccgattgtggcttnncgtcnttccatttgctgccgccttctcacttggnccttggcattgcactgctcagccacgattttgactgtttggtggacgaccacttcaaaacgcgcaaatggatgtggggagttattgcgattggaaacaaaattggagaaaatggcaaaaaggaaatgaaacttacaaattttcctgaatggagaagaatgccaattccgcaaaatccgttgcccaacaaattcatcggatttcgacacatccggattaggtaaaattgaccgattaaatgatttgcgttaaaattctaccatttagatacattgattctaatgtgattgtttttctccaacgttttcgttctttttttgcttctcatcagacaaatttgtcaattaaaacaaatagtggcgtcagccattttttggaaaatgttgtaaaaaacatttggccaatgatcaaagacaaaatttgtgccattagtttttcgtctcccgacgaattttgccgttttcaacaattggtgccgtccattctcagcgacaattgttgttgttgtcaatctcttcgagcaatgtttttttacactggtgatttgccaaatttttgcattttgccaatttttggcgatttgccaaatttacccgctaatggctgtgccaatatgtcgactgaccaatcggttatcaaatggctattctcgcctcgcgcagacggtgctccgaaggtgctccgatacagtctccaaatgaataataaatttccgagaaaaattgacgcatttaaaagggtgactaatttaatatttactgttttgaaatttccctaattaaggcatttgccaatgccttttctcgtgccaatttcatcgtttacattcgctttcgcttttctttttggagtgttcgggttggtattccgacctttgaattgttcaacaattcaactggggagcgattgacactgaaacagatttatgataagtatgttattaatcttacatatcaatcaattgggttgatgggaccgcattaggccaaaaacccaaaaaataaaatttaaatttcaaaattttaaatttcatttgtaattttttcttctaaattgttttttttaatataattcacccatcctttcgtgatttttaacgtaacttttttcagtcattttgtcttattttgaagaaaaaaaaatgcgaactctggtttaaaagagtttgagaagacttaatcatttgttcatatataatgttctcttttttacattttttaaaaatggaaagtccattttatggaaaattttaattattttattgaatttttgctaaaattttgagagaaaaatatctttaaaaaacatttttgtttactaatccgctccctagtgataagcgtagctttttgctgattcgttgtccaatttcgcgagatgagcacaaatgggccaagtgggaaagggaagcgattgaatggatattcgatgatcagtggagccatattaatttgtcagaaagtgatgaagatgatggatatgatctcatcagtacatggttggtactaattattagggatgatatttttatgtttttacctatttttcccctaactcccagtgacctgataagcacgaaaaatatgttttttcagttgttgttaagctacttttgaagtttttaaagcccatttcttggtttttactttttagaatctaacctaaaaatttcgtccctactaatcactacttacatatctatccaatcactttcgtttttttcattagtttggtggacacaacgccaggcccaagtggtcagcagaagtgaattgccgttgctttgtctttatttggatgggcccaatctgagaaaatttcaatccgatttgaaatacttaccctttttcagcctattatctactttatgctttcctttatttgttaaacataataataataaatttaatattcttttaaaaaaaaagtgtttttgggggccaattctatcaaatattggcaaaaaaaattttccagcgacgagcgcctcagaacggccggatccaaatttgaatatgttttaagtttattgttagcaagaatcaagggcgtagccagacccttggcttcggagggggctgaagtcaaaaattcgatttttaggggtgtatttttcgattttttgaaatcacgatttatggggtggggtgtatcttacaaaatttttcgccaaaaattactattttttgccattttggtctccatttttcaaaaatatggtaaaatgggggtccggcggtgccgataggcgctgccgggaaaattttgcgtattttaatgcaattttgataagaaaattgcataaaatttcaaaaaaatttactgaaaatttt

SEQ ID NO: 17163 - DNA, 1235 bp, Heterodera glycines
tttctcttaaacccaccctgattccatgcgtatccccctgagccggattctgaagaatagggctgaaaaaagtcgaaatttttgaattcgtctgtcatccataactcaatttaaatttaagctatagtaatgctttatagctcattcgaaccgccagagtcttctgaagtgccctttctccaagccgaagaccctatccgcaacacccggcccgctacagacccttttttgacacatggtcgaaaaatttgccaaaaattttctgaagaaagttttttttatttcgacctttaaaaaaatacttttcaccattcgataggaagaaatccttaaaaaacagctgtgctcttttgttcgaacccgatccgtgcacttactgattttcatctggcaaccctgcttttataggttttcttaggcgctgagaacgataaacagcttaaaattgggcacagaaaagcatttaaaccggtttttgaaccggttcaaaactcgaaattgagggaaaaagggtgttcctgaccttttaaaagggtcaaacacagacacatttggtatcattcgaaagctcttgatgagttctaaaaatcaggcaatgaagtcgaaccgaagccatatgagcactgggacaactgagtcttagttaaaatggacatttcagtacaaagaaataacaaatatgatttttcttcttttaatacatatgtacatgaaatcattttttggacttgaatactgaatattgcgctaaaaaccgccgtacactcgactacggcggccagtaggtggggcgagactacgggctacggaagaagtccgcgcgtgatccgcaggcggttgactgattggcggttttcctcaccagcactttcgtccaattccaaagcgcatttaacccttttctttacacactttttgcaacaaaattccgagaaaagttggcaaaattagtgaaaaggaagcaaaaacaacggaaggacaatttgagggacaaaaatgaccaaaaggcggagggaagagaagagaaaggggaaaagatggaacaaaatgggcacaaagccagcgcaaagtcgagtatatcatcattgggaggaggagtatgaaggaagaggaggaagaagagacgaacagatgaggaagaggaggaaaaagagagaaccaagaggaagaggaggagagataatggagaggaggggacaggaggagcatgagagaaccatgaggaagaggaggaa

SEQ ID NO: 17164 - DNA, 816 bp, Heterodera glycines
  unsure (1)..(816): unsure at all n locations
ctgaaatgtccattttaactgagactcagttgtcccagtgctcatatggcttcgtatcgacttcattgcaagatttttaggcttaactcatcaagagctttcgaatgataccaaatttgtctgggtttgacccttttaaaaggtcaggaaccccctttttccctcaatttcgagttttgatccggttcaaaaaccggtttaatgcttttctgctcccaattttaagctgttctatcgttctcagcgcctaagaaaaccctcttaanagggtttttatgcgattttgtgttggtaccgtattcggcaattttacccattttttgtatggggcctaaaactgttcaacttctacatcgtaaaaattaaggaaataatgattgcattgctagcgttaattctaagttcaattgcatttaggacaatgttgaggtatttgtcgaaatctttgtcttcgactcgtagtgccctcgttgatatttcttcagtgcatttttctttttatcatctatttttttatgaattcaaaaattttcaggttggaaagccttcttacccttccaaaacgtctagccctaccggaagtttgcttctcagcgaaggcgagcattccactgcgtctgggtctcttgttaacgtccgaatgccgaacataaaaggtgaagctgtgtcaaaatccgattaattaaacttcgaattaaagtcttttctgggtcttcacatagcgatttggcacaacgaatttgcgacagacttcagcttgaagttgcaaaagccgctttaaagagattcagcaataaggtgggcttagagaccgaa

SEQ ID NO: 17165 - DNA, 2492 bp, Heterodera glycines
aagcatacatttatttaaaatttcgaagtattaaaagtttttattggaaaattacaatgggaaagcctgtaaaaatgattattgtttcagtgaattctctcgtccactcgtcgaatgatttctttttttgttgataatttctttgtacgtttatcgataagctccgaattacctccttccctctaattagtgtcctacaaaatcgattaactaattgctttttgttggtttgttgctataattcactaattattttcatcggcgtgtaaaaatggcacggagtgaagcgaacggtcaccggcaaaaaagggaaagtccgccgacttacgacgattggcttggcacaattcggcaggagggcggccaattggcatggctttggcggaagagttgcggcgaagtgcacaatttggggaggacgaagcagcaaatggacgaagccgttctgtcctcaaagagaattcgggtgaaatcggaaaaaagcgacttttttgaacgtttcgccaatgtttttcaaattttatttgttaggacgcaattcgaactttggccgcccggggggaaacggtcgacgccgccgtccgagccgaagcacagcaaattctgtcgacgatggcactcgactttcgctttcattccgccgcacaaccaattggctacagtttggccaccgtttttgaagtcatttcattcattgagtcgatgattgtgttctcactttttgactgttcagcgcattttctcccacatttgggtcaattcggcacggatgtgccaaatccgacaaatctcagctgaccgatcagtgcccatcgtttggttgcccacgcatcgaagtagcacaagaagcttttgtcaaactacctctctcccgctttctctttctctctctgctactctctccccacacacacacactctctctctctctctctctctctctctccactctttcttctacttcctttctctctctcctcttctctctcccccactctctctctctctctctcctactttctctctctaacccctttctatatctctccttctctctccccctttctccgcccccactttctccctcaacctcctctccctgttccattaggctatctcgactttttgcttctctctcttctctcctaccattaccgtatccaactcccggccatttgtgccgccgatgacttccgcgcctcgcgccttctcggcgaggctttgcgccgttgcggcgcctttttcatccgtcgctctttcagagaagtgtttacttacttccatggctttgttttgctctcaaatgctttctctcccttttatgatttgctctatcgctctgttttttctgaatatgtccaacaaattctctcccacggcgaccgacccatcgaattttttatcgaagtttcgaatttgtttttggtctcctctaagccaattcctttgtcagggccaacgcagtcggacggccaaaagtgttttcccgcgcgttggactgctccaacttgtcgtggaaccgttcatcagagcgcaagtgtacgacacggtagcgacgaggcaattaagctcattaaggtccacttaagattttggtgcccgttaccatcgattacgaccgaattttggaggaaaaactctttgcctgggaattggtgggcttctcaaagccccgggaaaccacaatgggtcagtgcaaacggagtgaacggctgctttattcctccgatttcctttaggccttttgcgtgcgcattcgattttaagtgacaattttggcgatattcgcgtcacagttggcgagccgatttcccttcgcaaatattttttcgataaatttggccatggcttcgacttccgattggaaatggtgggccaaatgattgcaattggagattaaatcactcactaatttttatgtgcagaacaaatcagattcggacgagagagttcgcgaaatggtgcacaatttggccttggaaattgtccatttgcaaaatgccaatggcactttgattctttggccttttgttgcattggcaattcttcaaactctcaacgaattccccttaaattctcagccaatttcgcctttttccttcactttgcgctcactcagaaccaaatcggaaatatttctgcgtttatttgaaaaatgttatacgaatcgaatttggagaagggcggaagagattgaggaggaaattcggtagggaaaaaataaatttcaaatgctttccttttccatttgctttttaatttgtcgactctttgtccccatttgtttccgttttaggcattttgtccatctccatcaatcccgtttgtctctttcttcgtccggcgattctgtccgatttgattgacttttctccggacactcttccgccgtttttgctcgattccgtccttttagccaatcattccaataatttagtccacggggatggcgccgttttggtggggtttaaacttttttgttggcccatgac

SEQ ID NO: 17166 - DNA, 2068 bp, Heterodera glycines
ggtcgacaaagaaaaaagttatagcccaacaatttggtctggcgccgaaacatcggcgccaaaacgaccatttccctttgtaaaaagcaaaaagaaaactcaattaggccgtatagcaaatgaaaagaagcaggaaagccattaaacaggtgtgctttaagttggagcagactaatttaaatataatacaaaatttggcactgtgtaaaatcgaatggcagagaaattcaaattatgtggccaaatgccgtaactttcgcgcatttatatggccggaaacgcgccgccaactcaactcacataatgttgtgtgaacgaacattggcgcaatgtgaaaatgggagaaaagaattgttttatcgtggtaacttttcagtttggccaatttctgacaaacaaaaaacgtgagaaatcgtatcgtactggaaattttaatttaatataaaaattgtagtttgccatagagcccggcgcgggattttgcgggctcccagtccgcaagcccacatttttttttggaaaatgctggatttgggatttgagggattaatcctgggggatgccgtaaaattttgagttacaatcccgcagcgggatccgcaaatttggaatttccgagctctagtttgcaatgcgataaattttggcaaaaatttcaaaaaatcgtaaatttaaattattaaacaatcgttgggatttggatgccaaaggcgtccttgaaaaccgatttcatccattctgtgagggttaacaaggttgttaaaaacagaattttcgtcggactttgatccaaaaagttaatttttttggcactttacctatataaaaaaagcgtcgccttagaggtgaggaattttcatattattctttaaaagaattttggcaggtattaacagaaaaatggaaatctccaaaacattgttttaaaagtaaaaaattttaaaattttaaattttttccctggaaaaagccccaaaataacaataaaaaaatttggtaatcatgggtaaataattgtcataaatttaagtgccctcagtttttggcacagactaaatgccaatggcaaaagtaaaattttgacagcagcgctcaattggtaacggaccttgcttccgctccaataggcctacaacaatttccccacttttccgcgtctccgaattgtgccattgtttaacaatcgcctaattaccgtgtcgttagtaattagtcagtctattataataaagtgcccgcggcaaaaccaaaaacaagaaatttttcgaaagaaaataaattcagcaaaaaatgaattaaatttcagcgaaagtactgcaaaaaaatgactctaattaacggaaaatggcctaattacatttaaactgccgttggaccaaaaaatataattaactttccaaagacaaaaatttatcgattataaatgtttgaagtgaaaagcctttattattaaattaacaataccaaaagccttacacataattaatcagattgcctcaggcgcccacaaatgaataaaatttaattggcatggccacaattcacaattattcaattaaatggctgcttagccgaaggaaaagcgcgaaaatgaatgaatgattgaattgaattgcattgggccaaaaaagaaaaatatttgaaccgtcccggacaaatttaggagcaataacaaatgtcgtaaatgaatgatttgattgaattgcctcgggcaagaaatttttttttaattatttgaactgtatgcgggacaataagcatggtcatcatcatcatcagtctataattacgacttgtaaaaaaaaaaatttcaaccaccagcagagcacattaggagcggtgtctaatttttgttcctcttttcatgccattgtttttgtgccgtgctgtcgtctctcccggcatgaggtagaaggggagggggcagggcttaacccaattttttctttttttggggttaggtgccattccggcaagaaagccaaagaaagccggcataaaaagcaggccaggctttacctctccaaacgtgcccggcgattttgagggggcttaacatgctaatcat

SEQ ID NO: 17167 - DNA, 2573 bp, Heterodera glycines
agtctcaaaaagacgctacaaaaatgttcaaaaaaatattattgggcccaaattgcactcagatatttttcgctggatcaaacaatgtcttgtctgccagctccggcataatcccatccccatgttccgagctgaaatgaaatcggtcccttccaacactctctttgccaaaattggtttagatttagctggccccctccccatcacagaaatgggaaatcgttacatcctaaattttgtttgttggttctccaaatatgtcatctcagtccctgtccctgacaccaaatctctcactactgcaaaggctctccttcgacatgtttacttaaaattcggtggttgcactgaattaataagtgacaatgccaccacattcacctcagacttctttaaatctttttgttcccttctctatattaataaatcattctccaccccttactggtcccagggcaatggtgcaacagaaaggacatttagaacttttcataatattctgtctaaatatatcaatcccaaagagcccaatttcgatgaatttctagatgcagctaccttctgttacaatacttccattcatgaatcaactggcgaaagccccttctttctcgtgtttggcagagaccctatctttagtattgatcaaattcttgatccctccgtccatctaccactccctcacaatgacttagctgagttcaaaaccctccttgtcctttccctaagaaaagcctggaattctgcagctgactcaattaaagaggctcagaataaatcaaaagtgcaatatgataagaaatttaggaatcctaacatttccattggggaccgtgttctgttacggaattatactggaaaaccgggcacttcccaaaaatttcacaatccatggaagggcgttttcagagttattaacatagaagaactccatgtcaccatcgtcagttgttcctccccacaatccaacccatttaaagtccatattaatcaactgaagaaactttttgagatttccggtcctcccagcacctcccccgtcctctcttctgctgaaaaagctgctttagaagcagcagaagccaccgagataccaaacacgataggcttcaatcatacccctgatatttcaccaaaaaccctccctcctgatacccaaaaatccaatgtaccccaaattttacctacttctattgacaaagaacaagcggttttccctcagcgggatctcttgcataaaagtaaatacaatctccgctctcgcccaaggtctaacagttttaaacaataacaaatgcacttttctccttacccattttcatactcacaattaatttttaacttctcacaccacttttttacaacatttttccccttttttggtttcattccttcacaccgccttgcacccaaaatttttatgattaattcgcgtttccctcccttccccaacagaatgatccccttcctgtccaacatccccgaacacaaatacctctcccaacttctaccccgcccccttcttctaccctccctcctcctgtcacttcctttcgtcagagcaatgttaccaatccacaaaagcaacattcttccaaagatacgacatagacaccgaaatcctgaaaaccacctccccagtcgtagcaaaacgactcggggctcgtgcccaaaatgaagctgaccccgcagcagtaaaagtgtggcacagcacgaagcagtcaaagatggaagagattctcttccacaagttcgaccagaaccccgccctggcagagtgcctcatttcaactggggagaaatttttggttgaagcgagtcacgctgaccgattctggggcgctggtgccaccattgacgacattcgtcaatggaactttactgggcgaaacaccatgggccaactgctaatggaacttcgtgaaaaattaaaaggttttaggattcctcattccccagcgtcccttctcaaataaacatcataagtctcacacctttattccccccccccccatcttcctctttcccttccaaaagtatcgacccctcctttgcactccaagttctccttaaatgctttgttttgtttgtgttactaacaatgctttaccatacttccacattgctgtgttgttttctaatctcgttttgtcctctcctcgaatatctcttcactgccacattaagtatgccgaaacgacaatcgaaaccctggattccaaagacgaaatgccccagactccttccgacaacgcctcttgaagaatcgctccaagctctgacaactaatgctgattcgaccatcactccggcagcatctcctactgaacctgctgactcttttgatcctctctcacattctgttgtcccttcatctcctctatcctctatggagactctgttggcccttatctcggtctcttctccttctgaaaatcagaatttgtccaacaatagtccggctccttccccaccacgaactgaaaatcaacccatgtcttcttcctcggacccggatataatctttttggaagaaatctcaccccccaaaatccaagaaaatgctccccttg

SEQ ID NO: 17168 - DNA, 602 bp, Heterodera glycines
cctttcttcttttcaaaaaatttctctttttcattccctcttttttaccgtttttcttctttctttccaattaattcagactgaatcattttcatcgagccatcaaatggcgcattttttgtatcgaaaaagccatttaaaaaagaaagttggattaaaaaatcaaacgcctttcaatttatttaataaacgaaaagaatatttataaaaggggaggggggggggggggaatgtgccgcgatcattgtcatgccaataatgccaataaccgttaattcatgggttccttcctcaatttgaccacccatcccaaattggacccccaatttgcccccgacttttcacctctctgcgcccgtaaattagagtggtacctgtggagtatcgtgcgatcgacatggcctatgtttatgcgagggaagttatttgaatctcctgtactgatcgtatctatatccgcagtaggtctctgaggagaacaggctctagtagatagattaatgaaggtaagggcagcaggaaaattatattcgaaaattcgggaaaagaattggctctaaaggtcgggaaagacgggctgttgagtgaaataggcggttttt

SEQ ID NO: 17169 - DNA, 2937 bp, Heterodera glycines
atctgtcgccggccgatcattcggattatcgaaacaattctttcaaaacgtttccattgtttcctttgaaaaagacaattttgaagcaattgtacttaaaaatgctttacaattatccaaattttaacaaagttaaaataaatgagttttcattgtttttcgtctgccaatttgagttggcactaattacgcccttcgggggaaatgagcggtgacgtaataattgaattatacggacaatcattggcacatttaagcagaaagcgtagaagacaaatcgcgtgagaaaaaagcattaaaattcgaaaatgacagacaaaagcaaatttgaaagtgaaattcgactaaatttgcatttttaaatgaattttccattaattccataatcccttcttttggaattttaattccaatttcttcgcttttttacccattgatttgtccattttaaattaattttaaacttttacttttccttctttcaaatttctcaaaatgtttccaaaattcttctttgggaattatttttctttcacccgttccgatgacaaaaattaattatgtttttttaggcaaaacggccaaaattggcaaattcatgggatggacgaacacaaaattcgcaaaatgcctcacattactccccccccccccgcccgtgccatcccatcagttggcatttggccctttcaaatgacgcttcaaaaacatattttgacctttgttttgcatttggcatttgcaatgttcattctttatccattcaaatacgaattcgaggggaataattaattaatttccattgcacaaaaagaattaattaatgaattaaaataattaattaattaataaaaataatgaattagtttaatttgtctccgcctcagcacgaccgaccgatcccaacaccgaagtgatgtaaagggagagaggggtaccatcttttttttttgattttacggttcgccggtgccatgctggctacaggcaaattcgggttttgctcggatttttaaaagggctctcaatttcggattgcgcgcaatcaaaatccgattgcgttctgcccttgtgtcctggtgccatacactcaccccccgcctccggcaattttcttccctaattttagaaccttccgagcgttttttttgtcggaactttttttcactctgagcttcttgtgccttcattcatcttcgaattttctttatccaaatgacgtccgccgatggatgccttcggtcggtccttccaaaagtgccaacgcattcctttggctttttggccaatagcatcggatttattttattttttgctttgttttgcacattttggtcatttgacggtgggaattggagatgaattcgttaaatgggttggggacattctgtgattattaaggaaaagaaagcaaaatgggccaattccattcattctcctcccatcactttgctcttcaactttcgtccttcttttcttcctttcctcctcttccacatttctgttcctccgttttcctaatttggttttggcattttttctgttcggctcgttccgccctcttcctcctctccgccccctccctatttattacccctcattttcctgtacacctctcatttttgtctttagtccaattcgccctgattggtggcccttttggcataattttgtgccataattccacaattggctgatcacttctccgatcttcctccttctcatcatttctcccttttcccgccggtcaatccacttttttaatttgccttatcaattaccatattcaggcacttatcctgataattattaattaactatcattagccccaattcgtcccttctctctgccgatgctttcgccttcgtttgcgctgtttctccgtacgctttttcttctccttgcgatgattttcctctccgtcgccttcgaattcgatctccgcgacgatggccaatccgtccgctttggtccttcctcttccggtggcaccagcggcgcatccgttgcctcccaactgttcgtgaactcggaggacaacgcgggtttcattggcggaattccgggcggatccgcgcggcgcagactcatccaaccgccgccgctgaaaagggatggaacggcgctgccgtggggggcggaagaggcgtgggcacggatcagcagaagcggggggagaaggttctgattgaagagcggagagagaaaggaagagtgatcggacgaaaagggactgatcagaagaggaaaagccaccaaagaaaggaatcatctgatcggtggcacccaatgatctttggtccaatgggcaattcgacgtgataattctcatttcggaaaatcaaatataaaattaaattgagtgaattttgtttatgtttctttttttattcatttagaaattattgcattcaattctgtcgtttgatttccataagaaatgagagaaattcgatgcgaacgatggaaaaaacaaaaaaacagctgaaaacgccgtcttagagcagcagatttacatttgccgctaattccaaatttggcaattctatcttttgttttttctcgcttttatctttcatttgtttgttcccccgcgggcatcaaatttttcttgtggacgcgtcatcacctagtcgtgggctgatgacaaaaaaaaaagaaaatttggccaaataaacgaaggattggccaaaagtacaaatggccgagggaaaaggggcggagaaacaatggcacaatttgcctcactaacaaataaagtatttttctcacgggaaagaacgaaagacgaattcaaatacaaacaacgaattaaagaagatgagataattcaaaacacaattttggaaataaataaaaagaaaaccatttgataaaaaagcgacaaataaattgggaatgatctccgaaagttgggaccctgccaggccatgcca

SEQ ID NO: 17170 - DNA, 1541 bp, Heterodera glycines
  unsure (1)..(1541): unsure at all n locations
tttgaaatatgataaaaaaattaattaatttatcctatttttgtnnnacnttattnaaggaaaaaattcaacgtgacgccaaatcgacttntggccgaatctttgtcagtgagtgtaaaaacgaaaaaagtggcctcttggaaggcattgctgaaaaaataataattttaaatcaaaaattttcaacaaattaaatgctataattttacttaccgctttttcaactgccgaaatgcggaaccgttaaatgacacgcacccttcgggttggcaaaaatatgtgacatcacggggcaactcgaaatcacgatggttttcgctgggataccttggaaaataattaattaattaatatcattcgttcaaagattattagataatgaagttattggtatctagcatgtgaaacccaggaaaattttgttcgtgttcgttaaagaaaaaaaaaaattaagaatgaaaaaatatatttgcattaaaaaattatgttcaaaaatgataaactttttcgaaaagaaaaattaattaaatcatatatttttaattaaatttttcaaaatattgatactatgacatcgcttagttggaaatcattcaaaatttcgttaaactttgtttcgtgcaccccgaaaaaatatcttcctggggcactcaatgattgttgacacactcttttggccaagtccattcattttccgtggccatcagaccttctcagcaattcgggatgactaacagtgccaccggggattgccattggacccgctcccccgccggctgtcacattgacataaccgccggctgacggcgggtgccgtcgtcgtcgaacggtggcattaggacgacggccgacaattacaatgtctgaaaattaaaaaattttttttaatttcatttttttctacggatttacaatcaattaagcgggggcaaagcgattgttctgccgaaattcgaccgggctggaataaacgagacttggcatcgtgcattttcaaatttatttttttttatgtaaaagccgacattcgatttttttatctaaaattaaaattggtatttaagtttggtcctttttgggttaaaattttcatattttttcactttttgttgtcaaaagtgcttcaaagcaacaaaaaaatgcaattggatcaagcaagaattggcacacaagatcagttttttcatatgcatttctgattgtaagaaattaatttccggggcgcagatgtccgattttcgcttgggacgaaaattcccgaggcgtaaaatgcctggggcgccaatgtctgtaatcccaataaacacaaaataaagtttttaagttactttagcaagaaaaagaaatgaaaatttttgaccaaaaaggggacctaaaataaattaatactctaaaatttcaatttgaaatacaaatatagtgaaatgaaattttaaacagaattagaaatgaatttttcgtttaattaatgaccaatggcttccagcatctgccagcactaattaaatttggcaacggacaacggaatgagcggggggggg

SEQ ID NO: 17171 - DNA, 1249 bp, Heterodera glycines
aatcgaacattagcggggggtggggatacttttttcgctaatttatgttcctatgtgaaaatgcgaaaaataaataaataaatgaaatttttttttaaataattaataaaaattattccgcccattaaaatgaatgtgcacatacatttttatttatgtacatatgtaaatggattggatttgttcagcgggccagcagaaattcgttcgtgcatgtgacagacgaattttatattatttacatgcatttttatccggcccaaaagtttcataatttttggccataaagcagctaatgttgagataacaaaagtttatcataaaaaaatcgctttaccctttaattattaacaaaaattgaaggttgaattctacagttgctaagttaccctggaagcttaattaattttcatgggaatgtacaatcatattttttcgttaaagctgcaattaataaatagttataaaaaattgaaaaaaaaattgtaaaaaaggaacctgtgaaattctaaaaatataaatttaaattaaaaacgcaatacattttttgggtaccaaaatgaaaaaattcctattacaatagataaacataaacaaaatataaaaaccgctgacaaatgaatgcttcttcacgttcccaatttacgaaatcaatccattttagggaatgggtgagagaggagcagtggaagcaggcgacatgtcgagagtgagtgaggatgagaaaaagcggaatgagttagagatgtgatggaataagaaaagagtgatgggagggtggtaaagaggaagaagaagtgaatgagatgaaaaagaagggaaacagagacgggtaatgaggaagaaaaacgaacgaaaagcgaggggggggggaaaggaaagcgagagggagggggagaaagaagaagcgaacgagaagcaaagaaaaagaaaagtgggagaggaagaagcgaactatggaaaaaccaaaaaagggaaggaaaagaaggaaagaaaaaaggaaagtggggaggaaaaaaggaaagaaataagaaaatcaaaaagaacggaagaaagaaagggaaagcataaaaacagccaatgcttgcacagcaaactatgtgtgctgcatctgtgtacatatgtatgtatgcttctatgtgcttcaacattcttcccatatttgggttgatgaagcttggccagaaagacaaagaagagagagagtgagagtaagagaccgagagagagagagagagcgagagagaga

SEQ ID NO: 17172 - DNA, 2896 bp, Heterodera glycines
ctctcaattttattaccgatttatgcgtcattacagtactgtttattattttattttgtctcctaataaatttggtttccgatttattgcaattatagtaatttgtgtctcaaataatttttgatttgattacataacttggatgatttggtatttcttccactccttcctcctttgtatgaacagtaatattaaacaaaaagttatctagttatattatctaatatgctaatccaataaaagcggcaaattcatttggtgcataaggccgtcggccaaatgaccttgttttccgattctcctcccattcaccacccaataaatatgcataaaaagcacctatcgtcttactccattcatttccgtttgccaaaatagtaaataatttggggttaatatttagaaatgaaaattaatcgccgcttcaccagtaagccgagtcgtgcggaaacgacaccccttttccaaattaaaatgaaaaataagaccaacaaaaagttggcgacctcaaaaataatgaaggcaaaagaaaaacaacaacaaatgcaacacaaccagccaaaaattgatgatctcctcaagggcttggcccgactccagctcgaccaatcacagcaatcggccggagttttgatggccgtgccaagcccgcaaactacaatgtcaattgtggggccacattcgactcagtcgtgtttgatggagctgtctcggtcgacagcggctcttctacccgccaacattgcggggggtagaggtcccgttgactttggtatgaaattgtttaagttatattaaaaagatttttcaaattcgttataatttatttataattatcaaaatttatttttgtgtcttttcaaaatgttttttccagcctcggcctttgccgaggagcaagtacggagcaaaaaaagcgcgttgctcgattgcattgcgctggcggaggagtccgcaaaacttctgagcacagaagggcgaattcggtgtctcctggatcttggagaagagttggaactggatttcaacgaatacttagtgggtttttaaagaaggaaaaatgatcgggggaaaatcggaaacgatccaaatgaacagttcacagttagttaaacactttgataaaaataacttttaagcttcatttattttctcattgagacttttctaaactttattaatttatttgagcttagaaatgattttaaaaatgaaaatttaaaaccaaaaataattaaatttaatattttaaattcatcatatcaaaatttgcactctgtgcgccttggcctaacactctttctcattgccttcgagagtgactgaaataatagtaagtaaaaaacgataaatttataatggcattttcactcaccctccaattcctgatcgataatttctttgtttgccccgtcctcgtcattatctcggatcgccatcggactccccaattcgagcaccacgtgctcctgtaaaggacaaaaatatttataaacaaataatttaaaaattttgactcatagaacaaaaaaaaatgtaatttggaaagaaaacaattaagtttaaattacgtttttttgaaaacattttcacctttccacgacgataactgcgcaagatcggctctgagcattgaggacgacgacgtgggcggcgaacgcaaaacatggccgcgagaacagcacacttaaattttttgattgataattttgggattagagttattgtaaactttaaaaataataatgaggatgaaaagcagaagcagaaacgggaaaacatcaaatcccccgtttccggtgctcatcggaggcgaaaggaggtgggcagtgacatttgagagcgagcgggggtgaatacactcaattggcttcgtgtatggcgatggtcttgcacatacagtaatcccgggacaaccggaacaattttggacaataatccattcgagacgggtggggaagatagggacagagacagacattactttcgagtttcggtaaagtttcaccggaatttaaattaggaattaataaaacataagttattatttatttattataactatttttattattaaatgcggaatatttgccgatttgttggagatttggccattgtgaatgtcattggcgctgcgtcttgtattcattatgtgtccgcccaccctctccaaatctcttttgtgaacaacaaaatcaaaatttatgtgatccgatccatagataaattctttattgtgttgtgaatgcaaaagaaaataataatattttaaataatttatcattttttattagtttgtattaaaatcggttagtcaaagtcttcctttcttataaattaatgtttgaaatgaaaagaaattatcaaaataattgattgattgattaatgattgagaattttgaattagccattcagcgtcccgggccaaccgtactccataggcacaggagtccggctaaccatcctcaaaggataggccgcggtgaataagccattataaattgataaaaaataaagaattaatgaccatcagcgtccctggccaaccggaccccataggcacaggagtccggctaaccatcctcaaaggataggccgcggtgaataagccattgaaaagtgataaaaaataaagaattaatgaccatcagcgtccctggccaaccggaccccataggcacaggagtccggctaaccatcctcaaaggataggccgcggtgaataagccattgaaaagtgaagattttagaattgatcgagaattgagaatgaataataataataataataattttaatattcatttaaatgacaagttacgaggcaaagaacgccccatcgtccgctgtcgacagaggcggattaatttgcttttggaaaattataaaaaaaa

SEQ ID NO: 17173 - DNA, 3721 bp, Heterodera glycines
  unsure (1)..(3721): unsure at all n locations
actagggctgggaattttatttaaataaataattttttcctggattctccatgctctgaatagtaggaaaaacactttcttttttgtgtttgcgaacaaagttggacttttatttaaatatttttacatattcgggctttttatacatattttacatatttcgtgattttatacatatctggtacatattttgtactttttttctgacatattttcatatttttttttacatattttgaggattttttatggaaatatatggaaaatccttaaaaaaaaatccaaactttcggcaaatttttcgtacatattttcattttttttgaatattttgagaagttttgaaaatttatagaaatttcttctgaaaaaacaacaaatacttatttgaaaatgtactgctaaaaatatcaaaaattaatttttaaaatacaaaaagatgattataagcctaattaggttacattttgtgcctatcttaccctctacaaaaaaatttttccaaaaaaataacaatttaaaacattttatttacatatttggtacatattttgggtttttcttacatatttcgggatttttttttacatatttatgtacatattttgacatccctagttggaacatttcgaaaatggaaaaaggaattgatgccaaaataccataaaagtaagagagtggtgtcgccaaacgagacacattaaaattccgttcaaattttaattaattttgccgatcaatttccttcgttcgctccctcagttaattgtgtgactcattgtttttgctcttcatttcgctatgagtcatcatttttgtgggaatattttccgtttgcttgtgcacatttttcacgtacctgtccccgtccccattgatttgtgagggtataaaagcccggcccatttccattttcttcacttatcaattttctatcaagtctgcaaggacagttttctgtccaactaagccaaagggtgtatttaaattgtaattgtgaatatttgaataaagattaagaaaaagtgtcttagtcttatcattcattgtctgtaaaagggaaattcaggagccctttaatacagaccgtaagcagtgaccccagtagtatgtcaatagttggtaaacgaaacaaatatttattaagaagtaaattgggaagcggcggaaatattggggtgtaaaataagtctttgcatagctgtgaattgatttgtttatggattttttaaaaatcggtcaaacaaattattattaatttggattctttccgagactcagccaaattaaaaaccaattatgtatattttttaagggctatttgttatttatctcatggcccattcagattttcttaaaaaaattcccacggtcatcataaattgttgatcagcaaactccaaaaagtgtttggatggcataactttttcaataagagaccgattcccaaaatttcatgctattgttatgatcagacctaaactttacatacaccgaatttttgaaaatttttgaaacaataggttagaaattctgaaaaagcaccctttatcaaaaatctctcttgggccaattcagaaaacaatgtccaataaaaaatgaaaaaaattactttttttcgacaaaattttgcaaaaagccaaaattttttaccgtctcggtaattaacaaactgtacttgatctccaattttaaacacaacccgatttgctccgtgtttcctgtgataatgaactttggatttgattgcgttgcttctcttgattgttccttgcatgacaaattgtggaaatatgcccctgtctaccacagttgtggcggtggcgctttgccgatttgaatgttttgcaacattttcatgaactgtgcctgctgatcagccaaaatggctttaagttgctccggggtgatagccatgatcgattggaaagatttgagtgatagtgaatagatagtgaaatttggccgtcaatgataattttgatttgaattttaattgacagtaaaattcggtgtttgttgagtgatattaagtgtcctttggcgagtggaaattgcgaatttgaactgcacgcagcggtcgctttgacttgcgtgttcccaaatccgtctttcctttaatgggtgttcacagaagcctacttatcagcttgtgaagccaataaagtcttttccttactgttgacgaaagcggtctacttatcgacttatcggtcagtaagaatgtgttacgggcaaaggtggacacaaatgaattgaataaaattgaatttggaattaaactgccaagtgaattgtattttaaaaataaaagcctatgctgactgcgccaatttgttgtgtcgtttatcaacaacaacaaatnataatcaataacaaataataagtcagaggagaagagagagataaatatgtgtggggtgaaagaaaatgagaaatgagaatgaatgaagtccgaagcgaggaaggagagaagacatcagtatttatgggcgatgatggtggtgacgtgccaataaacataatgccaagaaaatatgaaatggcaataatacaataaaaccttcactaaaacaaaaaaatttcaaataacaatgctatatttttgagcccctttcttcaatatgcgcagaaaaatgtgcaaaactctttcctctgcggagtaatatttcattaatttaccaaagataaagttttttgtaattccataaaattatttttcaacgttttactaaacagaaacggaaatttaaaaaatctaatttttttaaatccattatttcatttttctcgatgaaataattttttataattttataatatatgaatttataaaaattattttacaaaaatgtaaatgaaatatttgttaatcaattgcataacaattaaaaacaacgataaattgcaattaatttgataatttatactttatgaaaaatatttttccaaaattctataatattaatataatatatatttaatattataagctgaaaattcaaatttattattttgttattactaaaaaaatgctgcaaattaacttgatgattgttttcttctcatttttattcgtactaattgatggaactgatgaagaattatttgatgatttgtgtgaaaaccttcagccatcgacctcagaaaacttcaaaaaaacaaaactcgaagaaatgaatgccataaagaaagaaattgttgataacaatgaaaataccgaaaaacaaaatgccaatcaaattgaaatggaagacataaagccaaaagaattgcaaaaaattaaaaaggaaaaaatattggaagaacaaaatataaaagtgacgaaaattgaattggacaaattgagcgaagaatcctttgaaaatgagtttgatgaacaagctgatcagaatgtttcgtctgctgatgctgaaggctacaatgatatggtaatataacagataaaataacatcattcctggaataaatttttttttataaattcgctaaattctcagatttttttgtttagaatacagaagaaataaatgaaatggaaattttgaacaaatataatttgttgaaaaaggaattgcgaaaagaaaatgtttataaaacgttgacaaaaactcaatttgaaaatgaaattgcaaaaaagttgggcacaaatcgaagcaaaatttataaattaaagaaaaaattgggacaaaaaagagtgaaaacggaggaaagtgaagaa

SEQ ID NO: 17174 - DNA, 2448 bp, Heterodera glycines
  unsure (1)..(2448): unsure at all n locations
gtctcggtacattgtccgcacttacngtccttcnaatgcattaatcactatttctctgtcgttaggatgattcagttgctcacgcagtgaaccgacacttgtagcgagcaaatgagcacaaaaagaactgacaagcatcacttcaatgagaaatgaatgtgtaaaatggttaatcaggcttatttatagtcgcttttaagtgtgaacgaaacaaagttaagctatggattttctttaaacactatgcaaacaatggtgacccaattaaattaattgttcctaaaaatctatatgacctacataaacccgtatttaagcgcggtttgtttaataagtttcattcattctcattaattaatatgaatagcagcactattgaagagcaaacaaatgtaggacatcagctgcatcagcagactatgaacttaaactgtgactgtaaacatccaattaccaataaaagatttgccgggtctattcctactggggcttttcattccatccaagacgaaccaacagagcagccaccaccaccagttaaaagaccagaacatttgtggaaattgaccaaagcaaattcgttctgctcttccgtctatgcaacttgtgtcaaaaccgtctctacaacagtgaagacaaaacagtgcgtaacggggaatttgttgatgtgaagttttcgctgtcccaggtcgtggcatgaaaaagtttgtcggaaaaagggaggggacaaactggggggatggaagggaaggaggagattcgagactcgctcaaaagagcggcgacgcagattggcgatggagaaggcgagagaaagggtgtgccgctcgttcgattttgggggggtttctcgccgtctgtgtccacatttcccgtgtttcccgacccctacccaaaggcacctctttcaacaacaatttatttgaagcaaaaaaaggggggggaggcggttaggattagaaaattgacgcagagcaaggcaacggttggaaaaaaaggagtgattatatgtgtggaagtgagccgcccgggggagacagaaacacttaaaaagaccaacagaacggggagggagcacagtattatgagatgggccgtgattatgcaaaagagaagaaaaaagggtgcgagcagcagatgccaacgaaagttggccaatgaatacaaagagaaaggaaaaaggggacaaagggacgaaatcggagagagaaggcgaagagaaatcggtgcagattttgaatggacggaggatggcgggtgaattagcacaaaggggggaaagaattggcaaactagaagagggggaaacggttggggtgaaggacagagaagaatgggggggaacgttaggaaaaagaaaaaacattcaaaattaggaggaaaaggtgagacacaaaaatcagaataaaatcgtttctcatcgctccctcgtcgcgactttcgcgacattttccccaggcagcgtctatcggcatcgccagcccctaaaagtcctttattttcttaaaaatttgctcaaaatcgcaaaagttggccttttttgtggacaaatctgttaacaaatcgcattaaaaattacaaattnttccccggcggcgcctatcggcaccgccggccccttattccccaaatttttttggaaaaagcgccgcaaaaacattcaacttcgatttttcatgctagaatttcacaaaatgcttatttctaataataaattgaaaacacatataacatttgcacattttaaatgtgttttgaaaaaatttgtaaaaatgaggctttttgacccaaaatgaggcttttgaaaattttaatctggaagccttgtttatgatgcgtattctgttaagatttttttctgcttttctttgatggtccgtccattcattttggccaaaactttaaaatgattccaaatatatataaatttgcatcgattaacgaatttaagaatttcaacagaatgccaaaattccaaaagaaaaaagatacaacacgaagaaggcctcaagcaagtgtttcaaatgaaaaagaaaaaatttccggcaaataaaattattattttttcattatgaaaaattttaaaaaaaatgaacaaatttcggtgatgaattagttttagatcacgaaacatttaaaataaattttttaatgaaaatgggcaattttaaaaagttctttctttttccttaaaatgttaaaaattaaaaacatttaaatttagcccaagcaattttgttatacttcagcttatcaaaatgaaacacttggggcttgacaacagaactgtagcacgaaatgcaaaagtcatattgccgtaatcgtaatatcgtaaccatacagcaaattatgacgacgatttacattacatgcgcagaaacaaaaaaacagtgcacagatcagccccacagctaataggaatgccccataagataaccataacatgaa

SEQ ID NO: 17175 - DNA, 813 bp, Heterodera glycines
tactagggttgctccccgacccctcggggggcaaaatgtcgggggtcggggcggggagcagctcaattgtcgggggtcggggaccccgatcggggaatgaccaaattttattttaacccaaaaaaccaatttttctttttaaattctcgtaaatcttcctttttgtcagtttaataatctgatttcgttagaagctggcctttaaaccagggcttatacattgttcttatttataagaatttctaattttggggtagcgactaaaattgttctgatttcttaaatatatttataattttaaaattttattgcataatgtcactattttatcaagaaattttaaagtctgacgcaaatttttttttgatcttttggtcccaaaagtttgaaaaatgttgcaaaatgttcattttgattaattgggattttcaaaaataattaattataattatttaccttttaataaagtttcataaatttcaacaattttgcttgaattgttaaatagttttttaaacatccgcttattgttgtcattgagcatttgatcttttgctatggctttgtccatttggcttttgtcaaatgttttcttctcaatttttgtcgtttgaaatattttggtcattttttcaaaatttttattttcaaatgatttacagaattcattttgcaatttttggagactcttgtccattttcaattcaaattttccattgcacaaaatgccaatcgcatttttctgcacccattcagtggccaatttggcaccaaagtttccctcttttactttgttaagcaaactgtttgcat

SEQ ID NO: 17176 - DNA, 1454 bp, Heterodera glycines
tttgaagctgtgtttgccgtccttaacaacacacaaaaatgaaagaccttattaaatataatagaaaaaataaattaaataaatatccaaaattagttttataattagagcttgacctggatctgaatccagcttggatttttcttggatccaggtccagcccatttttcggcaaaatggatttctcctggatttgggttttggtccaagaaatccaggtccaggctaggcctggttaatattttattatttgttatttcatgtgacttactatgttttattaaaatatcaaaaagaattaggtaataaatttaaaaacacattattattataaattaaaatttttagatgttcttaagcaattaattgattttttcgaacatttgtttgcctttaaaacaaatttcaaaaaacccaggactatctcttgacaagcctgggtttttgtcccggaaatccatgttcaacatggaatccaggtcaaggctttttttcaaaatgccgagctctagttatatttccgttcgatccagggcttaccccaaattgttgtaataattgttgctgcttccgccattactgctgacaatgaattttattttactctataatttaattttctttattttttacccataattattgtaattgctttgctccaaaggtctaaaataattttatttattttcaattttatttaccattttcttacctttggttgtaattcaggcttctgctgtatgcattattattgtaataattttgcgatgtttgttgctgctgttggtatccgttgttgtaatttgctagggcaaaaaattgcaattattattgttttttaattgcaattattattttatttttttttactattttggctgtttcctcctccgctggtgatctgtcgatctattaattttattattcaaaaatgttttaattttcttttaatttttccgacttttaatcgccgccgggtatgccacccgcggttccccgtaagtccgtccatcgatggcatttgcatccgaaaaggcgggcccaggcggtgcgtcgtacgcgcgccggaagtccgagaagtcgtcgttgtgcaccgccgcctgcagattgctggtctgcaaaatgagcaaattaatataattaatcttgaaataagttgtagagaaaaaaaggcgtgtcaagtttaattcggcaccttttatatgtcatttgatcgtttgttttatctcctttggtctgatcacttttgatcgtttccgttcccctttttcaccaattaatcactccactcactcagaccaatttagccccctttgatcagcttattattattatacccttttctcactaagttaaccatttttgcaactttattcaactctgatcacttctcctgagcactttcgttgatcactaagctcctctttcatctaaactctgaactctcttttctc

SEQ ID NO: 17177 - DNA, 991 bp, Heterodera glycines
atcattctatttgatccctttgcccccctttcatctttcttatttctctcttttctcccaaattgtctctcatatttttttctctctgctcactcactttgatcacatttgtccctgctttggtttggcttcggtaatttttctcctccgttccttcttctgtccccattagtcgctttatcatttctttgtccactccggcttccactttcaattttaaattagttggcttttccttttcctcccctcccttacattttccgccactttttggcctcggtaggcacggcattcgcctgacagagacttcgtagaaaactctgaaattgtttttttattattatttttcgattttgcttctcgttttcaccctttggcgtccacgtgtctctgcacatttgcgatgtaatcgaaggcgaattggcgttcgccctccatcacttcaccaccgtacacaatttgaccggcttttacaatggcaacgccacggtcttggcaagaaaaagaaagggattattagcatgggaaagaaaacggacaatggcaaatgaaataaaggacaaatggcaaaaaaaggacaaatggcactgtgatgaatgaatcacctgccgaatgccttaaagcggagtaggaacagcaacggagttggaagctgaaaaagaaaataaaaagatgacagaacggacggacggacaaaagggaaattggcagacaaatgagcaaataaaaaaggaaagtcagaaaatggaactttcgatttttttctatttaatgttatttctatttctttagccattgtcatgcttaaaccctgttaattggtggtattactatggcttaggagatctgttccacatttggaaatacgttgtaatttgtgaaggaaattgagagttctgcctacataaaaacatatattttccaaaacccaaaaaactcttaagaaaagttgtaaatttgccactttaattaaaattgaaggaatttttcg

SEQ ID NO: 17178 - DNA, 2330 bp, Heterodera glycines
  unsure (1)..(2330): unsure at all n locations
catcatttcacatcactttccactgttcacagtcgtaaaatcggcctccgcntaatttgcncaagtccatccgttgcatcgcgcgcatgtgctcatcgcgcaccaactaaaggggggttggccaactgtttgagaatttaataaaagccaaattaacggcaccaaaatcttgccaatattttatttctttttttttattccgaatcttgaattcaaaattttcgtgctgtgcatttcctaaaatctattctataatttggcacccttttcaaagcaatgcttaccttcaactgctgatgttgttgggattttggcggaatgtcgtcgtaatcgtagtgctcatcagcctcatcaaggtggtcgctgttgttgcacacgctggccaccaagccgttcagcagtttcctgagctgctgacatgacatcacacgccgtggacggccattttttgtgagaaacaaatcatccgtttgttccacaattactgctccaacatgtggggcgcgttgcatgaggaaacaaagtgacaactgcttaacttttaaggagggcttttcatgatactcttgtaatgtaccaaagggaaaatggtctctttggattccgccctccgaaaattttgtggtacagcaggaacaaggaaatagaattgacccagagattctggaacgaagccttatatcgagaatcaagaacaaagcttaacccaagatttgaacgaaatttgacccattatacgaatcttatcgagcatttttagtagagttgagcggggccgggaattttgggcaaaaccgggaccgggactagccgggacctgagaagccgggaccgggacctcgattttttgaagagcattcgaatttgattaggagtaatccctaatcaatgataagattttgactaatttaaaatccgtaacccataatatgccaatcatcactcaccgatgtgccaattttgtaaaatgatgctatgcttttcagcagcaaatagcgctggtgttgctttaggtaggaaggtttttgttctttgtatgcaaaaatgctgtgggcctttaaaagttaacaattaatggattttctttttctgaaatagagaaaatattaaatcaattaaaaatttaacttaaaaaaatttgtctgattttatcgcacacagaaaagcattcttaagcttttagagagcttttctaggaccatctagcaccatatcacaaacccgagaaacagacactcacaatctaaacgcaaattgtcgatattttaagtatttaggttatacttagaaaaaatttaaggtgcttttgtgcccttggtgcaaattttgtgccgcaaagtaaattataaaattttaaatcggcttaacaatttaattttaaaaatttgtttgatattttgttagaaaattatctgattctctgatgcattttccactgaaccttccgatcacaacgcttaggggtttttaaatttattttttccaaatttgaccacctgcaggaaaatccctgcggatttacagtaatcaagcagatcgtcacgctgtaagaatgggtgcatttcgcattggacaacggccggcacacaatgtatgccattcttgactaagtattcgacatggtctgagtcgaaatttgccacgcctattgaccgaatagtgccaatgtctgttgaagagaaaagggatttgtatgtatttatttatcccggtggcgcctataggcaccgccggacccctcccatcccctgaaatttttaagaaagccgcaaaaaatagcacgaaaagtgaaaagattgtccattactgatggattgtccttcactgacggattttccggaccccgaaatgttgggtccccaaattactggtatccaatgttataaatccccaaatgtcgcgccattgaccccccactgacccatgtaatgttctaacacactgtacacttcttcacggtcacttctgttatttgagcaagtgtttgacacatttttagaaacatccttcgcatagtgtaccatgcacaagtcaatgtagctgaaaaattgttgaaaatgatttaaatatttatttactaaataaatgcattttataccaaaatgtttaattaaaaagaggaaaaatttgaaaaacaaaaaagttataattttagagaatttaaaattcctaaataacaaaatataaataataaaaaagccacccatcaaattggtcgatgcactccttcacgctaaaatgtgcgtaatcggaaactgaatggaattggtcgccgtcaatttcttttttaatcggtctaaagcagggggttggaatttgcagttattttt

SEQ ID NO: 17179 - DNA, 2718 bp, Heterodera glycines
tccccctttttctgacttcgtaattttccgtcggtgtcacgcgaatgtcgaaatctgtgaatgaaaaggcaaatgcgctttctaatgacttatgaggtggttcaccatacaagcagtgtatttggaggggatcacgttcatttgctgctccgccctaaattttggtcaaatttacgctggtcacgtcgcccaattgcaaatccgaatattcctttcacgatattcgttgaaactgttcagaatggagccctgaattaaactgtttgattaagccgatcatttaaaattggaaagaatgcgaaaaagaacaaatttgatggttttgaaattggttttactcatgctttttcggcttatcctataaaattaaaatttaattaatatataattttcaaattcgcttttttactgcgtgtaaaaataaatgattggtctttatttaccagttttggaccaggggccttatgctcgtctcgcggtttagtaaaccacggttaacgcattaaccacggtttcgttaaccgtggttaacgaccgaccttaaccggtatgctcgtctttaaccatggttaagtaaaccatggttaactcaaccgtggttaagagaatttatcttgaaattgaaaaataattaatattaaaaaaatataattaaattattataataattattttttgtttatattatcaatattagcatagattttattaaaaaaccccgaaaaactattaaatcaagaattggttttctaaaaatttttggccataacttttttaaacacagcaattttttttttaattttgcaaattaatagaggactcttggggctatagaatgataccaagaatgtttaatttggatgcttcaagaaaaagtttgctgcattaaaattgtcaaattatttttttatggccgtgtgaactgcaatggagccaacatttcttggtaatagtgcattacaaacaattacgttgttatgcaacatgctacaaacagcagcaattgagtcggggtcgttttggcgcccacgttttggcgccgacgttttggcgccaaggtcgttttgggccgacgttttggcgcccacgttttggcgccagggtcaggtttttaaattttgtctatgtttgaataaatgaaaatatgtattcgtcagttttctgagtcgctaatcacgaatattgtattcatcttgacaattgcgaagcccggactcgatttaaatgaaatacaatttttgaacatattagatcaggccttctatctgttttgttttatcaaatgttttaatatggtgggtccaaatctgagaaaatgatttaccagattcaaaaccgtagttgtacctgtttcaaaaaatggcctgtacctaaattttgtcaccttttttaaaaagccattttagcggtttgggcgtgtgcaaattttttgatgaaataacactaatccgtcaataatttatatcatagacaaaaataaaagtcagattctttttctgcatgtaaaattaccctagaaaaaatttatttatttattttactatttaaattattaaataaatttacgttaaccacaactcgagttgtggttaagattccttaagaaagattaaaccacggttagatgagcataccggttggaaataaaccacggttaacgcaagttaaccgtggttaagaagggagtaaaccacggttaactcaaccgtggtttatccttaaccacggttaaaaagggaaggacgagcataccggttaaggatttttaaccacggttaacgccgttaaccgtggtttagctctaaaccgcgagacgagcataaggccccaggagttcaggtcgcttatcacgaatttgacatccatttcagctaattccgaaccccggacattggtgcctttcacaatcagttttttataggcaatctcgagaatcctttagacttgtttttagactttttggaaatgttttttttcattggccaaaatggtaaattcttgtgtaattcccctcctccgtgtccttcgcttaattttgtttccattttatccttttcaatatattttgttgcacaaaagttcccattaatcatagcgaccgtcatcattcgctttgctcaaattagtgattaatgggcatgcaaattgtgattaatcttggtctttgcccttccttgccggaaagcgggtaaaattgaagtgaaaacgcaagttaacctatggtcgaggccatcctttggcgaagaatgcccgtccattgcctcaatcagcggaaggtcgcgtaacacatggaaaagcgacggacggagggactgcggtgggtcgcttcccggtccgcccccccgaaaacaaaaaaatcgattttttcaagtgtccgtttggggtactcaaacaattatggggagcaaaaatccaacgcagaattaaagtacaggctatagggaagctattcccgaaggattcggtctccccataaatctgggcgcatcggttcggggggactgccccgaaaacaaaaataaatcgattttttcaagtgtccgtttggggtactcaaacaattatggggagcaaaaatccaacgcagaattaaagtacaggctatagtgaagctattccggaaggattcggtctccccataaatctgggcgcatcggttcagggggactgccccgaaaacccaaaaaaaaattttttgcataaaaattatttaaatga

SEQ ID NO: 17180 - DNA, 2069 bp, Heterodera glycines
cgggattcgaaatatgtggaaattgatgtcatattcgtgatcagtgcccccgagtacttcaccgtattgtataaaacccctttttaatctctctttttttaatgggaccaataaaatacaggattagcgatggtcgtctcctgccggtgattaattccatattcaatgtatgttggaagggacagtcccaggggggagaggaggtcccccatccacactcgaaattttaagtgaaaaagaaatgtgtgccggaaatcctcggttttcctattgatgacactctccaaaataaattttgctaaatatccaaaaaatttaaaaatgtagcataaactgcattttattaaatgaggacagatagagacatgttacattaattgggtggggaaagaaattgggacagataaataagtgaacggaagtgaaaatccgggcataatagggttggctgagtgccatggaaagtccgtagctacggaaattcatttccaaaattcgttattttggcactcaaacaaaaagaaacgctgtggttttgtataataacggcagccttagccaagattcaggaccatgatttttaccgggattttgaaaatccgaatccaaaaatccagtaaaaaagggcatttttttcttccaaaatttgatctgtttccaagtccagggggctctctatctttcaaaatttgggctttctatatgaatttagttagttataatacacaatttcttgttggttgacacagtccgtcagttgctgttgttgtccaacagttcgtcaagatgtttgtccaattcgtctcccatctgtccgtcctcatcattcgcattgtcagtaccgtactccttgccatcgtccaccaccatttcaaactcgtgcaaatcgtttaacagttccttctccagcttttcctcctcatcattttccggtgtcgcatcagcagttgctaaatttaccatatttattgaattacaggcccctggtggctttgtgtgtgtttttcaaccttttcacctcgaaaaagggagtggactttatttcagagcgaaaattaaaaaaaaaattttcaaacctagaaaaaatttttttgcaaacttttctaggtattttaacaaaatattatgactaaatcttttcgtttttaaaaaaattctgaagctttttgcgggggggggggggctcgatttcaatagcagttttaaatagggttacgaccctgatgtcggggttggaagcgtcggagtcgggtttaaccccgaaaaatggccaaaaaagtcggggttgcaaccctagttttaaaattagaaatcgaaacaaaacgccacgcactttgttgtagtttttgtggctgctgctgctgcttgtgctccgtttccacacattttttgcttttatcctcctccttcgctgaaccctgtcgttgttcagacgtcgttttttcggccacaaatttgcggaccaacgaaattcggtaggcgtagttgcgccaaaatttgtcctccggaactctgaaatgaaaacagggaatggttatgggttaagaggatgaggaagagccaacaacaaattcaagatgtataacccaaaaaaaaaaaatgccggaatttttgttttttactcacaattttggcacaagttcaaatctgagcactgccagccgagggtccagtcggaagagggcatccgcgtactgtttgaccagcgcaatgtccgagtcgagtgcgaatgtgagcggtggctcgtccgtcaaatttctgggattctaaaaatgaataatcgaatttttttccgttttccctttcccgggaaacatttaaccgcgttagtatttattagaaaataaatttttgcaaaataataataataataatttaccgaagaaattgcgatgatgtgctgttgagcctcaacatccgccagcagtccgtcaagtccaatttcgtcaacacatttgccctccttgcgcaactcttccataaacttttgccgttccttttcaatgttgccgataatggtctaaaacggagaaaaaatttgaatacgaattcatagctgtgcaaggggg

SEQ ID NO: 17181 - DNA, 2417 bp, Heterodera glycines
  unsure (1)..(2417): unsure at all n locations
ttctttctctcagttcaattcctctctttttctntcgtaactcatcactccctcttttctttctctctacttatttctctctctgcctttcattctctctctctctctcttactatatccccccctccatcttctcttctctctccatctctatttctttctttctctcagttcaattcctctctttttctttcgtaactcatcactcactctctttttctctctacttatttctctctctgcctttcattctctctctctctctcttactatccccatctccatttttcttctattctttcttctcttcctctcttcacctttctctctctatctcatttcttcttttctctccctcctcttttaattgactctctctctttatctccatactttctttctctctctcggtacctcttctctttcctcattctttctctctcacattgatgtaaacaactgaaaaataattctctcttttttgttttgtttacctgtcactgtcatgagaagttattgcaaaattttctttttttctttttctaacgctcttttttgatttttctttcttttttattaatgaacaaatcgccacaaatcaaagctttttacgccaatttaactcaaccaaaaaagtgggcggagcttcggctcgcttattatatagtcgtctcccttgaatatgggccgaaaaccttcggactcattcaccagaatctggtgctaattcatcaaatcaaaatttcataattcaatgaggtcatatttgtttacctccgtcgatgtagttgtcaagacttggaaaataagtgggcgccgcacttgaataacgggccgctttccaaacgcgaattttctgcgggtcggtggaatcatcggaaaaacgtgagcggtaagtgcgaaatctgaccaattcggttggcaattgcttaattttcgtcgcagtaacaaataacctgcaatttttgacaaatttattcaaagaaatagcccatttatcattcagtgaaagtgaccatacattaaaagagagggggaggcagccatgtaaatcgacgacctttttttgaatataaattcaaaaatgatcaaattaaaaaaaaattttgtccgatggtgccggtaaacttccaccggaaaattttttttattaagaattctgaacgaaccatattaaaataagatttgtgaaatctttcagaaattcccctctttccccttcgctggggaacccctccccggccaaccccgccccctaaaatgtatgatagtgacgataatttaactgaaataataaaaaatttatttctcaaaaccaacttcatcttttctccacaccacagattggacatccttttgttggacccaaattgctctttgaggaactcttccaaattttcgggcgcgtagcagccaagaagcatttttggaccgcaaaaaacggcgtccttcagacgaaagtaaagtcgcaggcaattgagcaatgacgagccatccgcaagtgctaaggctacaatctacaattaacatgaattttaatgagcaaaataaagaaacaattaaaaagaattagtggaatttttttgtacacgaaaaagggagggagtgaggttaaaggcgaagaaaaaaagtatttcacgaaaaaatatccctggcagcggcttaagaagtaccaaatttaaaattttctctcagcaacacttttgcttttaagtcataaaataaaaaacgatatttttgaaagaaaaaatttcaaaaaagaaatttgaaaaattttaaagttttttttctggaaatttgtgatgaatgaataattttttcagttttcatcaaaacccaagaaaaattcaaaattttcttttcttgaatttttgaaaaatcttatgaatatgataaaacatttggtttttctcaccgctcctgtgcttgttccgcccacaagattgaagtgtttctgcacaaaatttggcgcattctccggtaggccatctggatagaggcgtttctcgatctcgagaagcatctgaaacaatgaaagagctaaattacatcaaaaaacacagttaaaaatttattaacaccattaaaaattcaaaaaatttttagactatttttggtgaaaatctgttatcaaataacacccaaaatgtcataaaaattttcctgccggagcctatcggcaccgccgacccccccccctgttcctgaattttatttttgcaaaaagcgcgcctaaaacggtttgaaaagtaaaaaaaaggtcatcgcggcggcagaccccccttcgcaaaaattttttttccgacaaaccccctttaacgtatgagccggggtaaaaaaagttgcgacacagaagccaagctgtggtcacagcaagggagggtgtcggaggtggcggaagcgttagtaattaaaaa

SEQ ID NO: 17182 - DNA, 3067 bp, Heterodera glycines
atatggatataaaatcgcgaaatatggccataaaatatggaccaaaaatcgcaaaatatggacataaaatggcaaaaatcgcgaaatatggacataaatggcaaaaatgtcaaaatatggacataaatttttcaaaattgaatgtaaaatttcttcaaatttattggttgaaattgcatatgagatacatttccaaattttttgactcggtaaggcgctttgacaaagacggctttcgttttgcaattagtcggtcaacattcggaaattggtctcgaattttttcggcaattacgtgcaatcattttaaaagaaaaaaaacataaaagctaaaatttattaatttttttagcgcaaaatcaacaacaaaagcgaaattttcgcttttttgcttatttttgacataatttattaatttttaagaaaatttaaatttattcaatattctcgagaaattttggcgaaaaaatgattttttgaaaaatttttcgggttttgggctcaaaaaggctaatttagctgctgggggccattctaatagaggtttttttgaaaaatgccaaaatatggacataaaatatggacaaaatgccaaaatatggaaaaatatggaaatatggacataaatcgcgaaatatggaaaaatatggaaaatatggatatagaaatccttcctagaagcttcaaccaagctaaaaacatgttttccgtgcgtttcaggcctccaataatccaggaaaaaaatatggatttccatataattacacgccctaatcataatgaaccataaaaccgtgttttcttaattttaatgcttattaggctatcaggggttgaaaaaattcaactttgagtccgattttggacataggcgtaaatgtcggggccgcaaaagtcggggctccataataccgccccgtggcgaaaaccatttttttttcttttaatgccatttttgctgagagcttttttttaacttttaggcggagggggatcttggcgcggtaaaaatctgaatttatcattttgtaacagattttcatgtaaaaattgaccaattttgtggatttttgaaaaagagagaggggttcggcaatgtatggcgctaaaatttttattggggaagggcatgaaatatgaacatgaaaacgcaaaatttccaacaaaaattgcttgctattccaacccctcggcacggcatacactcacacctcccacattgtcgtagatgcacagcggtgcgagcattgtcgtggacgatttgccatcgttggcggttgcgccgcgcgtggcacggaaaaaatcgagcaaaatgcgaacttttgacggggcgtttggtcgccacactttttgccgcgaccgccaaccgatggaccaatcgctgctccaacgcgtcggtgcccaaatagagggcggacagcacaacgcgacgctttgcggactcaacgcgttgctgaaaaagcgggagaaaatgggggagggattggcatttttaaaagaatgcaaaatcgaaaaatgaatgggtttgtccttaaaaaacataaaaagtcgcccagaaaaaaacaaacatcataccattctgggaaaccttttttaaatttaagtacttggaattttaaaaaaaaaatctggatataaagcgcttttggtaaaggttaatttataaaaaatgcattaatcaggaagaaatcggaggcgggtcagtaaattgagaacaaaataaattaaattataattctcatttttgcttttagtcttatcgaggcacttccgacccaagtgatcagtgtgaatgtaactggccagatttcggtacttttcacaaaaatgtaaaatgaaaaaaatgtgattttgaaggcgagttcgcgggtgtcaatgtgcgactcgaacatgcttatggcctgcgcatcgaaggccgattcgcgcggatgaccagggtaaaagtatccgctcactttagcaatagatttttatgaaaaattcaagaagttcagcgattttttttcaatttttgaaaggactaccctgtcgcgtgtatgtacctcccccaccaaaaaacacccctaacccgccgatattttgagaggaaaaggatctttgtcagaaaaaatgtacaattaatcgtgcataacgaattcagagtatatttagaaaatttataaaaagcaaaatatttcaaatttctgtttttcatgaatttttcaagcaataattttcgatgaacaatcttattactctttaaaagtttagataattttttgacctgttatttaaaagtctgttgtctgaaagtttttcttctcagcggtcttcatgactgccttccatcttgtgtgcgattacgccgaagctgaacttggaccggcggaacaaaaattcatgcgaacttaccgctttcgcatttcgataccaccaaaagatgaaaagaagtggggtactagcctcgcttctgccgcctacatcggcatggttgtgttgttgacaggccgagcagtgcgcgccaattggtgtgtcaccggcgcactggatagcgatggagaagtaaatgaagtcgctgggatcccgcaaaaagtggcggcggcaaattttaaacttaagacatacataagaattgaacgggaaatccaagttggatatgttgtgcatgcgataatttaaaaacaaaaatagatgaaatcataaagctaatgtattgttattttagaataaacttgctttcaatttctgaaattttttgttttaaaagtattgcgaaaataattttttaaggaaaatctaggaatggtatttaaacataaaattattagaaatcaataatatttaattttttatctaattattatatttaatcgaatataaacttactttattgtaaaagattatttttgagaaaatttataacaaaatgataatgaacaattaattttttgtttttcaaataatattgtatatcattttaaatatgataatatttgtccgctttaagaccggaaactaatcaatataaatttagaaaataaataaaataaattttaataaaattaagtataaccgaaaacttttgctt

SEQ ID NO: 17183 - DNA, 2017 bp, Heterodera glycines
tcaaacgcttttttcgtaatgtttgcatttgttaatagttttttataataattttttttaattttttgaaatctccttatccccccccccatgtgagcttagattagcaggtcacgcaaaaacatttaccaatctccaaaggaaatttggtttttccgtctttagctcagaatctcatcctctttactaattttttagtgattgtccattcaacgaaaactcatataattctacgaattttatggttaataggcaaacaatggagaaattcaatccgataaaagcaaaaaacatttataaatgggaaataaatgggtttttggtcaaattttatgccatggaaatgtaaatttgtccgacattcttttggtaacaaatgagggttatataccataaaaatttgctccctttcttcttctcttttcaatcgttcctctcataattctgccattttcggcttccgttttgtttgctcaatttgtcctaccgtactctcttgctaatgagtcatcagtgtcgccattactgtcttctgtcccttctgcttcccaattgatcggactttctgtcgtagtggtcacaaatgtctcttccgcatccggaactgagtcaattgttggagggattatttgctgcggtaattacagcaaatgagacgatgaaaaagggtaaaaaacaaaaattgaacaaatttataggctgaactttcaaaatttttcagtccaaattccattggaaagccctggaaagcccccgccgaggggagaaggaaaacgagccaaaagcaattttaattgaactaattgacatttataatgagctgaaattggatgattataaggcaatagaaagttgccgaaaatgtgacaaaaaaggaaaagaaaatgggaaaaatgaaagagaaaatcatgaccataaaaaacggcgctttctccgatttgtcgcgcgatcattggaaattgaatgggactcaaatgcattttgtgctgatggacaaaatgacaacgacgatgctggtaattaagtggatttttctgcacccgaaattttttacgatttttatgacccaaaattcaaaaaaacgaaatttaagtgctttatggtattcccacgtaacactaaaagtaagcaatccacatttgccacattatttatccacattttaaatagagaccggacaggagcgggatcccgcgggattaaattttggatttcgaactcgggaaccgtcccgatcgcttttttaaaatcctggattcatcgggatctggatccggtcgggatcacttcgatcccagttgtacgttatcacattttggatgatgcaattggtagtcgtcgtcgttgtcgtcagaggcgtcgcaaacgaatgaataattcgccggcgccgatgccaacaaattccaagcataattcgaatgatcgatttgctgatcggtttattctgatctggcttgcggtgacgctcgttgttatggttttgctcaagtgtcgctgtcgttgttctcgtccacccgtaatccaaagccaaccacgtgcaaatattgtggcattaatgccaccccaaaatgtggttagaatgccaccgcaaaatgtggttagaatgccaaaaaatgctgacaccaaagtgataatatcaacaccttatgatggcacggaaaatatcgaatgccaaatttaattttgatcggacttggaattgcaaacccaaacaatgaagatttggaatcttcaaaggatattatgtggtaaagtctctggaagagaaggcacagatggagaaggaaaaattgagcaagtacaaagttcaaaaatgaataataattacaataatatgatatttaatgtgattgaaaggattttagccaatgtctggcacaaaagtgcgaattcaattcaaaagtttgaacaattcgctcatctgctcacacccatgcacaccaccgtacgtcgagatcgaataccgtaccgacaaaatggcgcaaggcaaaaaaatgaactaattaattaattatta

SEQ ID NO: 17184 - DNA, 2533 bp, Heterodera glycines
atgattttagaaaaatatttaaaattcaattaaatcatgatatgagttaaacaggtggcataaaggagattttgcgcaatatcgttgcctttatgccacctgtctgactcatcgtgatcagcgaccttggaaaccccaaattacgaattttggaatttttttgaggggggggggcagcataacccggaagtacctaaattgaaatgataaatgtataaaagcaatgctttccataaattcactcaatttaagcagtacgctgtgaccgaccagcgcaaggaggaccagaaaactgttgactcgcaggttatggaagtgatccgcaaacatcccgagaagaaattcttgttcggctaccttggctcacgctttcatctcgccaagggaatgcatccccataaaatggtcttctgattccttttacgacgaccgtatacgaaattgttgcttgctttttcgaagaacagctcgtgaatgcacttattatttttcattggattgataaaatttgttgtagcaactctagttctgtgcatggacggtaaaaaacgaaaaaaattgccaaaaaataattggcgtaaaacaaaacgccaacacactcaaattgaaaaacaaattatattttcatctgatcaaatgttttaaaatcgtaaaaactcattagaaaacatagttttttacagcaaaactaaacatttattgtaatgtgagggcaaattatttattaaatataaaaaattgaaaaatgtatgaaaaataacaacaaaaagtataataaacttataaaaaaaactacaaaagactgatcagagttcatttgaatcaaaaatggcgtttcgaatggcagattctctagcacagaacatcaaaatatcgtggagatctttggtgtttgctttgcgcgcgagatcgtcattgaacaacgcgtgaaatttctccacaggctgctcactgagaaggccccaaaatccatggttttcagcaaattcaggggcatggtggaccaaatgatgaaattttgaagtcgaacagtgccgacgaaagtgctccaacatgtgaacacggaattgatcagcagtggcgcggaaatcagcgatttgatcagcagaaagcaaatcggcgacggcaaatgattggagttttgccaagagttcaagagccatcaaaatattgtcgcggcgtggtgattgtggcaaaaactcggtaacatgcataggcccgccaccgcgtaaaatgttcctaaaaattctcgatatttaacaaaaaagcaattttcgaactgaccgcacatggtacccgctgtattcctggtaccacgcatttttgtaagcccccaatgcccgcaaccgcatctccagctgttcctcgtactcagttccatggcgtgtgcaaaggtgtctcaattctttgaaaatcccgaaaaaaactccttgacaagcgacgatgtgcagcgacggtggaattgtcattgaaggctcaatgttgaaaaatgggctgtaaaacattcaaaattttgaaaaaattcaaaataaatacaaactcaaattgcattcctgcacattgtttgctcatttgtgtcacatttaccccattttgaacgccttcttgaaattgagcagcctgttgcctcatgcgctcaagtgttcgttgacggcctggctcggatggtaaattttttgcttcacagcaaaaacaaggattggcactggctgctccacggtgcccaaagatttttgagatgaacatcaggtcgccggtgaggaaaaattgggtcgaaaggccatcaatttcacatatgtcggccaattgtcttgccacgtccgcaaaggcaacgcgaatgcctgcacttgtttctgcacctataaaatgcacatgtaaatgttaacaattggcttgctcagaaattacccctgtagcacccaagcaaagtaaaatttgaagctgccccaggggttgccacatttccaattaggaagcccagtttcatgaaattgccaccaaaatcaccagcgagacacaatttgagcgcattgccaggaagaacacgcaaggctgatcgatcggctcaagcggcggacaatggcaccggcaagtaaacgcttggaccttggcgaatgttggtctacagaaacatgcataaaagtgaaattagcaaaattattttctcttactgagtacgcttgtgagttggcatatgtcagctctttgcgcgcttcctttcttttcggcgaatcgctttttgggcctccctctgggcgtcctattttccttgtcgtcgtcatcgttgggccttttctccggttcacggactagtgaaggtgttcgctgcagctcagccaattgttgccgcagctgtgcaacacgacgttgtagctgaaattggcctcgcaaagtgcactgttcccaagagcatggatgttccagtcgggttggggtgagacttccattgtttgtatcgcgcattggactcccgcttctggctgtgcgggccagggcggcggttggtgatcgtcaatggcccaattcggcgaca

SEQ ID NO: 17185 - DNA, 898 bp, Heterodera glycines
aaataaaattcaaaaaatccaaatccgtaaaataaaattcaaaaaatccaaatccgtaaaataaaattcaaaaaatccaaatccgtaaaataaaattcaaaaatccaaatccgtaaaataaaattcaaaaaatccaaattcgtaaaataaaattcaaaaaatccaaatccgtaaaataaaattcaaaaaatccaaatccgtaaaataaaattcaaaaatccaaatccgtaaaataaaattcaaaaaatccaaatccgtaaaataaaattcaaaaaatccaaattcgtaaaataaaattcaaaaaatccaaatccgtaaaataaaattcaaaaaatccaaatccgtaaaataaaattcaaaaaatccaaattcgtaaaataaaattcaaaaaatccaaatccgtaaaataaaattcaaaaaatccaaatccgtaaaataaaattcaaaaatccaaatccgtaaatcaccttatatggtttttcaccggtgtggatgcgcatatgattgaccaaagtgttcgaatgcgcaaatgttttcccacattcagcacactgagattttggaaacaaaataaacaaattttagggatctcaacaaatccacaattcacttggtacggcttttcgcccgtgtgaatgcgttgatggcgatttagacaatccattcgagaaaattttttgccgcaaaattcgcactgtttttaaaaatattaaaaataaattcagaaaaatatttttaattatttaatttattattattatttttaccaaaaaaagcttctcgcccgtgtgtttgcgcaagtgtctctttaagtgtgtttgttggctggccataactttttggacaatgtgcgcacgagaagaggttcctataccgtttttgtgtcccaacgaatgat

SEQ ID NO: 17186 - DNA, 1770 bp, Heterodera glycines
  unsure (1)..(1770): unsure at all n locations
aaatccaaatcncgtaaaataaaattcaaaaatccaaatccttaaaataaaattcaaaaaatccaaatccgtaaaataaaattcaaaaatccaaatccgtaaaataaaattcaaaaatccaaatccgtaaaataaaattcaaaaatccaaatccgtaaaataaaattcaaaaatccaaatccgtaaaataaaattcaaaaatccaaatccttaaaataaaattcaaaaatccaaatccgtaaaataaaattcaaaaatccaaatccgtaaaataaaattcaaaaaatccaaatccgtaaaataaaattcaaaaatccaaatccgtaaaataaaattcaaaaatccaaatccgtaaaataaaattcaaaaatccaaatccgtaaaataaaattcaaaaatccaaatccgtaaaataaaattcaaaaatccaaatccgtaaaataaaattcaaaaatccaaatccgtaaagcttttcgcccgtgtaaatgcgttgatggcgatttagacaatccattcgagaaaattttttgccgcaaaattcgcactgtttttaaaaatattaaaaataaattcagaaaaatatttttaattatttaatttattattattatttttaccaaaaaaagcttctcgcccgtgtgtttgcgcaagtgtctctttaagtgtgtttgttgaatggccataactttttggacaatgtgcgcacgagaagcgttttgcctttaccgttttttgttgtgccaacgaatgatgctggaaaaaatggggcacattaattagcgcattggcatttttcattgtccagctttttcgactgtttttttatctttacttaccaaaatgccctttttccgcccaatttgttctccgtctcccgcctttcttttcctccatctgattcctcttccttctcctcctcactgtcaaattcctcctcctcctcttccgtcgtccgcttctcctcctcctctccctcttcttcttcctcctcttcatccgttgccccttccaattcctccaaaaatgcttccattccatccttctctttttcttcttcctcaatccctacaccaacaaattcctctcgttcatctcccactttttcctcttcttcttcctccttttcctcttcttgctcctcctcttccctatcatttttccccaaaattgcctcctccttccgttctcctttctctcctcctcctccttttccattttctttcttttcctcttcttcagtccgcttttcctcttccttatccatggtgttgttgttgttttgtccaaatttctgcttcaaaaattggtcgacaattgctttgatcagcaaaagcgtaaggcaaacggcggcgatcagaaggaatgccaaaagcaaaaaatggacaattctttgatcagttgcgatgagaagtgactgaaatttgaaaaatttggggagtgaaaatcgaaattctaccaatttcataaaatattattttattcactcacctcatgttgagtcattttttcgtcaatcgctgcgctgagaagcgactgaaaatttggaatattaaaaaaaaggaaattttatttttacattgatccctatttttgaattttgtcaaatattttcctgttgttgctccaatttggccacatttttcgtaagttcagtcaccgcgtcgataattgactaaaatttttaccattcattgcactgaaaagtcgagccgacggaggtaaccaatctgaaggcacatcatcattccttgtgactgggagctcaagttc

SEQ ID NO: 17187 - DNA, 3268 bp, Heterodera glycines
  unsure (1)..(3268): unsure at all n locations
tgttagacaatccgacacaagaagatggcgaaaccgaggagcaggacgatgcttattcggacgacgatgatctgagttggaaagtgcgaaaaagtgctgccaaatgcatcgaagcattggtgagcttcttagctttggagttgccattgatattccttttagattacatttcgaaccgagaaactgagcgaaagttacggtaaatgacattaaaaataaaaaacctttccgtcgctgcccttcccttttagaccatttcggtccgctgctcatttcacgcttcagagaacgtgaggacaatgtcaaatatgacatttttgccgcctattcggctctgctgagactgaccaaacagatgaaccctgaactcgcttctttccaagcgcaggtccacgaaactcacgtttaaaataatctggggaatttagaatgcacaagggggaaacgaacttcttgttgaatcatttccgccttcgcgttttgagcaaattcgtaaagacgaatttagcaaggagcaaaaagcagtctttgcgaagctacaaaaacaagataagcatcacaaaaagcacatttgagaatgaatgacggttttatcaaaatcattgtaattatatttaactaaatgattcaatgttctgaaaataccttctcccatttcacttccgtcgctaatgcgcgcgcttcaaaaacatttgacgatcaaaaacatgagaacacgcattagtgccttcactgttctctcgcaccttgtcaggtatttactgattgatcaatgaactacatgataatgattgcttgtttcagaactttcccaggaattatgaacgattacttgggcaccattactataaacatcacaaaaactttgactgatagtgcggcggacggaactatgaaaattgaaattttgcgtttcatttcgctgttgttgaacacccacgaacctgaggtagaaagccattcggtggtttgcataaattgatagatgggtcttacaattagtttcgctaaataccctccccttctttttagtgtttcattttcttcaataatttctaggcaattacttaaggtcccaggactactctgctttcgtttattttggggttgtctcattcgcaatattttgtgcttagtattgcaaattttctttagcggctcgttccttttgtcgagacggtgcttcctcatttggctgctgcggtcggtgaccatttctacaaaattgctagcgaagcacttttgactactcaatcgcttttgcgagttttacgcgcccaaaagacggacttttcgaaggcattgcccgttatgtattcagctgttgtctcaaagctaaaaattgctgacattgaccaggtaattttgagttattaaatggaaaatttggatttacgttaaggaggttaaagagaaaaacattgctactgtcggactgctggttgctctgttttctgctgaacttggaaagaaaattgtactaattttggtgttttatgcctttttttctctcgttttcagaccgacgaatgtttgcctcttcttttggaaagactgcgcaacgaaatgactcgacaaggtgcgcatttttgggtgaccgttgtctaaatgtgcccaaattttagtggccctccgtgccatcaatcacattgtgcaaagtccaaccaaattggaccttcagccgatgctgcccgaacttttgtctctttgtgccgattttttgcgtaaaaaccagcgatctttgcgagttagcacattttcttgaaacttacattgatttctcattgtgtttagctgaacactttgactctgttggagtctttggtgtgccgtttttcccacaacggactgcagggaccgaatttgatcaaagtggtcaaggaggttcccgctctgatttgtgaacaggatttacaaattgcattaattgcggtcactttcattacaagtaaggcttttttggtgtgatctttttctctctctctgtttttaactcgtccgtactgattttcagatgtcgttaactcttaccctgaccaaattttggccgactcattgaacaacatgttccagtaataacccatgcttgtattacaatttcacttaatttcccttttcaggtcactaatcactttggttcacagttcactgctgcagggcacgacacttaacgtgagacatgccaaacaaagaacctttcccactttttaattttccgtttaggcgactcttttactgttgtcttctttgataaaatcacctctcccgaacaaaccatcgtttaaggtattctttgctttttggcatttaactatttttccattaaagcaaattttggagcggatctctgagccggtttacaacactggcacttctcaatttctccaccgtcaaacgtacagttccattgccaaggcggtacggagctaataattttctgttaaattttatttatttcctaagactgcgacagtggcacaatcgaatgccgaacaaactgattcgcgcactttggtcctttccttgcgcgacgcctttcggaatgctgggccagtaaatgactcgggtccttgcttttctttaaattagcaaatatgcacttaataaaatatcccaaaatttagttcgtctcttttctgttttggcacttggtgaattaggcagactttgtcgctccgtttttgagtcacttcaacgcgaaataaagtcgtaatttaattttgttattattcagaacttaatttagtattgaatcactgataatcgaagcatttgaatcgcaattggaagaaataaaatcggccgcaagttacgctttgggtcagtgttatggactttgtccttttgaataatcgtttttaagggagtctggccaccggaaatctgcaaaaatatttgccatttttattgaaagaaatttcaagagaggaggggaggcgacaatttttgttccttcatgcgttgaaagaggtcgttattcgaaaataacgctttgaattgcattttttaggtgattaacagcgaatgcggagaatgtggcactgtcggagacgctgacgaaatattcaaaaagggcgttgaacaaatttgggagcttttgatgaaatactgcgactcggctgaggagagcatcagaaatgtcgtcgccgagtgcatcggtcggcttatcatggtcaacccgcaaaattacgtcgaagaacctttttggtttagtcaattgtactgctcgatcgtagcgtanatgccttttcagcgacattctgccgat

SEQ ID NO: 17188 - DNA, 1064 bp, Heterodera glycines
agtcgatactatgggtggttcaaggtattgcaacaaatactgtgcttttgtatgtgtttattagtttgagaaaaggggaggggagagtaattagcctatagaatcggggtttatataattttagtcccttctattcagtttggagcgtgacccgtacatacacaccggaaatcgactcattccaaagccttttgtgcctccaccgccgccaggcaaaaaatggaactgtccgagaagggaggagtcatagtgagtgtctaacatgcgggaaacttccgcatcaattattcattcgacattccttgaatttagtgttccatcggagcgaaggttgaaatggcgatgtcctaaacgcgaacctgcgacgtaagtcactcgtcacattaattgaatttaaacgtggacaaaatattcgatctatttcaggcctccgccacgtcgctaacagaacggaaggatatgaatgagggaagaaagattgtgtttctcaatttgacaacaactttgtttaccattttctaattaattttcgtaatacatccaccaatttacaattattttttcacatcttttgacttgtatttcaatttctcactttacattaaataaaatgaatacaacaaatagtaaaaataacaaaaaaattaacgcgtttgattgttaattcattttcaacgtttcctctgccattcgcattgccccttccagtgattttgtccctccaatgaatccgtttgcgtgtacaaaaatggccccttcgatgcccgattctttctccaattgatcatcgcggtgtcccctccacggaatcgaaattctgcaatgtaccaaaacattcggatacataatacatggggcagggtcggggtcgttttcgcgtgggccgttttcgcgtggggcgagtttttgaactataacttttttctttgtcaactaaatccaataatcttggtatcattctatagccctaagagttctctattagcgcacaaaatttggaaaaatttcgttaaggttcaaaaaagttatggtcaaaagagttcgacaaaccaaattttccaact

SEQ ID NO: 17189 - DNA, 1619 bp, Heterodera glycines
cggtcggggtcgttttcgcgccgccgttttcgcgccgtcgttttcgcgccgtcgttttcgcgccgccgttttcgcgccgccgttttcgcgccgtcgttttcgcgccgccgttttcgcgccgtcgttttcgcgccgtcgttttcgcgccgccgttttcgcgccgccgttttcgcgccgtcgttttcgcgccgtcgttttcgcgccgccgttttcgcgccgccgttttcgcgccgtcgttttcgcgccgtcgttttcgcgccgccgttttcgcgctgccgttttcgcgccgtcgttttcgcgccgccgttttcgcgccgtcgttttcgcgccgccgttttcgcgccgccgttttcgcgccgccgttttcgcgccgccgttttcgcgccgtcgttttcgcgccgtcgttttcgcgccgccgttttcgcgccgtcgttttcgcgccgtcgttttcgcgccgccgttttcgcgctgccgttttcgcgccgtcgttttcgcgccgtcgttttcgcgccgccgttttcgcgccgccgttttcgcgccgtcgttttcgcgccgtcgttttcgcgccgtcgttttcgcgctgacgttttcgcgccaggttcgttttcgcgcgggggtcgttttcgcgcggttgcatatatgtaaaataaatatgtgtattcgtgttttttttttactaaataatgcctaatcttatgtaggcccaaacaagcctagcttaggcctaagcctaggtctaaagcttatgcctagcctatgtacgaaataaaataaaacgatttttcgaatttcgaccacggggggaggcacgttgtttttgagtagataattttcactcagaatttttcaaaaaatagttttttttagaaaatttatgccgttgataaccaatctctaatcagatttccattaggacatcgctatgacctcagaatccctgcgtatctgagattctgaagccggctggggtgaggtcaggttcggatccacccgcggagtaaaaaattatttggttttttaggtatttttaaacttaatagactattagtaaattttctaagtattttttaaagtatattcgcaattctagtgctaaaaaagcgcgggcgcgaaaacgacccccgcgcgaaaacgacggtgcgaaaacgacttggcccgcaaattttttactatgattttatgaaatttttttaacttataactttgtcaataatagaccgaataaaaccattttatgcttattttgaatggaaaattctgtaaaataggtattgtaaattttattgaaattttcgcccagttgaattttttttttttgcacaggggagtttcttcgaatttttgggcgctacttaaaaagaggtccattttgaattttttttgcacttttttttggtcaaaatttttttttgtttaaaaagtcatgaaaccaagtacccgagggttttaaaggtcgctgatcacgaatatgacaattatttgggtctattaagcaaatttggcgctaggtataaaatgatagattttgaattttatcaaaaacaaaaggggggacccttttgttttgtaaaatttttttttggataaaaatcgcgaatatacttttaattcgccataat

SEQ ID NO: 17190 - DNA, 1240 bp, Heterodera glycines
cccccctccccccccccgaaaaatgtttctagatacgcccctgggtttatacatgtgcttattttagcaccggccctgccgggaccgggacatttcttttcaataattccgggacctggaaaaccagtaattcccggactggtcccgctcaactctattcaaaatcgaaaactggtcacaaacttttgcagtttcgagggctcgattttttctcaaaaaaattagtataaaagatagagaaaaatggcaatgactgccattttttctacaaaaatattggctaataattcaggggaatgccatgccatacaaaatgtttcattcttgcttttgagcccctttatattgcttctaaaatgacaattgctctttcattttgtttgtgcattgtttaattttaaccgaattaaatttttttttcacacacaaaaaacgaaaacaattccatttaaattgacattttaatgattttttcctcttatttttgtaaatatgtaaatgcttaattaacatgattttaatcagttttactaagcaattttaaatccatcgaaaactatcttaataatttgccccgacaaaatgtcagacaatccaaaagaagcggaggaaaaaatggcaaaagcaatgtaaaattaatgccaatttcacaattttaaatttcatttttttcagcttcatctccgccgattgttggctttgtgtcttcgatttgctgcccccttctcaacttggcctcggaattgcactgatcagccaccggtttgacttttacgtcgatgaacacttcaagactcgcaaatggacgctgaaacctattcaaattcgacgcaaaaatggagaaaatggcaccaaggaaatgaaaattgtcaattctcgttggaaaccattgccaattccgcaaattcaattgccacgcaaagtcatcggattcaaacgcatcgatatctcgtaaaactggcaatttacaaaaatctaaacaacacttcccttacttttcagtttcatcgacaaaaatgccatcgcttttctccgccgttttcgccaacttttcgcctcctctccaattcatttgaccatcaatgtgtactacaatgctcgcactttggagtttcttttgcccaacatttggccattgttcgggaaaaacattcatggcatggatttgtccgccacatttttccgccatttgcgtaaattcgccccgtcaattctcaacgattgtccatcgcttcgcttt

SEQ ID NO: 17191 - DNA, 1073 bp, Heterodera glycines
ttgagccctttgatctgatcaatgaattgactcgggaacaattgacgttgaaaggaactgacaatagccatcgttttctgcttgtccgttgtccaattgcgcgagacgaaagcaaatgggcgaaatgggaggaggaagcgattggctggcgactttgtgaacaatggaacagaattaacattcaaatttatgatgaggaacaaatcggagatgggtaagcgaatgcttttttcaacaattcatatttattgcgtttctatttttaggcttctcgacgcaaatcccggcccaagtgatcagcagcagaagtgaatgaatgattgtgctaagaattgatcgatcaatttggattatggagatatgaaaaatgaattttgatgctatttgacatgctcataaaaatgttatttttctgtttgaatgatcctcataaatagggagtgtaattatatggaccaaaaatcgcaaaatatggacataaaatggcaaaaatcgcgaaatatggacataaatggcaaaaatgtcaaaatatggacataaatttttcaaaattgagtgcaaaatttcttcaaatttattggttgaaattgcatatgagatacatttccaaattttttgactcggtaaggcgctttgacaaagacggctttcgttttgcaattagtcggtcaacattcggaaattggtctcgaattttttcggcaattacgtgcaatcattttaaaagaaaaaaaaacataaaagctaaaatttattaatttttttagcgcaaaatcaacaacaaaagcgaaattttcgcttttttgcttatttttgacataatttattaatttttaagaaaatttattcaatattctcgagaaattttggcgaagaaatgattttttgaaaaatttttcgggttttgggctcaaaaaagctaatttagctgctgggggccgttctaatagaggtttttttgaaaaatgccaaaatatggacataaaatatggaccaaaatgccaaaatatggaaaatatggatatagaaatccttcctagaagcttcaaaccaagctaaaaacattttttcgt

SEQ ID NO: 17192 - DNA, 2201 bp, Heterodera glycines
tacaggagggtggaagaaagggcttgtccttcaaggtggttgcgaacatgaatggaaacacggtggtgtacaacgacagggacgtgccgatagggacgggttctgtgcggaaagtgggcggacgatcatatgaggtaaaaacggtaattcagcatttttgatcactcctaccaacaggcggtgatcagcaagaatctattcatcactcggctgaaggatgcccggaggggcccatgctgcagagagttgacgggcgaagaatgcaccgaacccattaaggtatttgatcagcactgatcagtctgatcaattatcagtccgatcactttgcagttggccaacccgcagttcagtcacccgagccaaagggacgacaatggcacgacgaggctgacctggtccgacctttgctttatccctccctccctttggcttaagcttcgagtgattcaggcccgactgtttcgacatgtccatcgatgtcactttgccaccaagtgaatgaataaaatatgtttaattggtccaacatttttgtgaattccttctcccaaccccccccccccccaccttttaagtgccttgggacctctgtttttcaatccctttcaaaaaaaggggagggggggtgtttccctaggaattacagtacttttttacggttcgaaattgaacaagtcatttctcagcgtacagaagttgtagagacatgcgattttttgcattttgtagccaatcatgttctctttctgtccgccatgttcatcttccaaaattcctcatcagagggaccagtaaatttgaaatttattggctctactctataccctcattttcgagttttattttgatttttcttttctattaatttaatttgtcacattaaatgaaaaatagacaaaaataatttgaattaaaaattaaaatctatgaatgagtcgcaggaatgaacatatggaaatggaaattaaaaatatttaacaaaaataacgtgtcagttctgaaaacatattatgacgaaagggcatgaaaaaaagaaaataatatttaaaaatcagttaattgggaggaacaaaaatataaataaaacattaaaaaattaaattgtttaaagcgaaattattaaaaattttagcaaaaactcatttagattttcttttttaaaaaataatcttccttcattacaacaacataaaattaaagctaatttcgaaaattagaatacctgcaactgccgacacttgagaataggcgaaagctatttgatctgttcatggcgcataaaatagtttatggccgaacagatctgaaactattttcaatttttaatccatcgacacgctttaacatccccttttacagatttaacacaaaatataaaataggcaaaaaattcattccctttgccgggagggtaacaaaattatggaatcaacttgataaagaactaataaaaacaaattctttaaatcaatttaaaacaaaacttaaaaattcattagggtaataaccggaaaagcaaaaaaaaaaaaacagattaattttttaagtgatttgacatttgtgttatcgatctcaattgactttgacctcattttattcatctattttgattttattttttgatcatccatataattatatcacttactctacgacatactatctgaacagtcgtcagagtaagtggttttttgcccttctgatgactttttttattcacgaataaataaaataaaataattagctaatttgttcattaattaattaattaattcgttaattaattccttaattggcttgtgccgttgcgctgtctctaaacgggaatgcttctcgaggcaatcgtttgccgttgcgcccccctttccgcccctccgttcgctccgtttccgcttctcctcatcccattgcccccatttgcgccattgaacgaattcagaacgatggtttgcccacctcttaagaaacaaatttgtaaaaaaatggaaaaatcacgcgatgtagacagattgacgggtgaaaatgggcgattatcatcggttggaagagcgaaaggggcggagaacggcgaaagtaaaaaagttaaaaaaagtggcgaaaaacggctggcgaaggcggtggaccaattttgattaattgacgagatagttttgcgaagacggcacgtgagcaaattaattctctcttcaattaaataa

SEQ ID NO: 17193 - DNA, 2290 bp, Heterodera glycines
agaggtacaaccagtgattaaaataggtataacagtgatcagaagaggtacaaccgtgattaaaataggtataacagtgatcagaagaggtacaacggtgattagaagaggtacaaagtcattagaagaggtacaatggtgattaaaagtgctacaacagtgatcagaagaggtacaacagtgattagaagaggtacaacagagattagaagaggtacaacagtgattagaagaggtacaaagtcattagaagaggtacaatggtgattaaaagtgctacaacagtgatcagaagaggtacaacagagattagaagaggtacaacagtgattagaagaggtacaacagtgactaaaagaggtaaacagtgatcagaagaggtacaaccgtgattaaaataggtataacagtgatcagaagaggtacaacggtgattagaagaggtacaaagtcattagaagaggtacaactgtgattagtaaattcattaaattaaaatgaaaatattttttaacaaatttaattaaaaaatacatgaaattctatcaattaaaaaataattaatttaaacttataaaatgtattcatcaaaaaaaaaattaatttaaatataattttttatttattaactcaacaaaatattttaaattaattaaaaacagtcaaaataacccaaaaatgcacagaaaaataatgttacaccgtccggattcgaactttgcaccaccccccccccccaaaaaatgatgcctcagaatccccaatcacacagggattctgaggtcttgactatgtctaaagtaaaatctgatcacgtattcgtgatcagcggcccaaataacccctaaagacatgtttttggaagatttttgttgaaaaaaatttttcactcaaaaatcctggtcacccccctttggtcccgattcccaaaatcacttttatttctataacttttttcaaaaaagtgataaaaagctaaaataaaatttataaaatagagcaaaaaattgcggatttttgtattattttacttttccaaaataacttttcagaagcgagttatgaatttttttctgaaaaatcgaaaatttccagaaattctggaataactttttttcttttgaacattataaaaccaaataaatcccataaaattctcctgatttttctctatttttaaagctttatttgctcaaaattggtcaacccttaggctagatatgaattttccaatattagcccaaatttccaagggccaaaaaattgccaaaaaataaagaatttttaaaaaattctaaaatttccgaaacttaaaataaacatcatattcgtattcagcaccccaaaataccccagaaaaaaatttttcaccccctttttcgaccccaaaaaaatttttgaaaatttctagggggcctagctcgaaaatttttgaaaattttacatcatgtagtacaccattcgatagcatttaaaatgctctacaattttactctaaggcaatttttggctaaaaccgatccctgacgagttataggcccgggactcaaatgtcccgctcaggccaaaaattttttctatttccgggaaaaaatcgaaattttttcaaaaaaattaccaatcgatagagctcgaaaaactatgttttggaagtggtcttcgtttctctgggaaaaatcgttaaaaaatcctaaaattcaaaaactcgaaaaccgttttttaggcctagctcgaaaaattttgaaaattttcgaaattttaaaaactggaaaaatccagctcattgaactctacaataagtctgctggcaccccctcgctcagttcaaaccctggcgagttattcgcctgggactgaagtggacaaagttggtactgaaaaagttcacgaacctacagcctttcctattgcagatagaggcttggaattttttttgttttttagaaaacacttcaacttagccccctcacagcagacattttttgattcgggttttagaaaaaaagttaggggccttcaaacgcaagaaaaagtgagaaatcggtccccgggactcagtcgtccgcgctgaatttttctctatagttttcccggattctcctcaaaaagttgtaagacccttccaccactttcagggcgctcccggccttcggccgggagattttgttttttgaaacgaaactccttgtcaatataacgtatatactagcgggtgcgtgaaccgtcggctatttagctgggaaaaagcgcttcgcgctttgggagcttcgctacctaggctgtgaagcga

SEQ ID NO: 17194 - DNA, 2637 bp, Heterodera glycines
gagagatgtttttttctctgcactctctatttattgtttcatgtctcgttttttgaaacggtgtgggtacctttacacacatcgattcaaaaaacaaagacgtatgtcaataaaaaagagggtgtgaagataaatacacctcagttgggtatttttttgtgatttttggataaaaaataaaaagatttatgccggggacgggctcgaacctccattccttttcctttactatacctatcttacaaaatccatcacgcagttatcttttttagtttgggggctgaaattaaataagtatgtatatgacggattataaaaccgaaaaaagtgattccagcttaattaaacaggataatcttatttatttttaatctctcatttgttctcgaatgactcacaccattctgctgattcagtcgagttccaaagtcgactcgcggacatggcaagactttatgattttgttaagctgctcaaattcactaatccttttgaggagtgattacgaaactctgaccgattttatggaggcggtatgcaaaatttacgaggaacatctgaagaagctgaaccccgacgtcccctgcatacagtgagcgaatcgtgacataaataaccgtaggaaaatggcattacttttggccaatttccaatcccaaacccgagcaaagtcgagaattcaaattttaaaattatgttcgaaccctgagttcagattcatgatcatctatttttacactagaaagtacaaaaagaaaaattttaaaatttattttccttgggacaccaattctccagtattaccttattttcatttcactaattgtttttttaggtacgacatatccgcactgttcaagttcatcgaccgattggctgatttgagctgcatggtgttggacaaaagtgtatatgtgccaaaggtaacaaaacaatgccaaattctgattatatactgcttttgtaacggaattttgaccaatattcagggcgaggatttcatcaaagagcagattttcattttgctccgtggccaagcggcgtcgaacgcggcgaagaagtgcccggctgaaggatcgctctgatttttgatcgcattccttttatttgtaattaactttcatacaaataaaagtacaattctttaccaaacgtccataaaaaatagtaaaactacgagccaatggatagaagtaggattgctccccgagccccagacatttttagcctatttcccgacccgactcacgacatgtcgccaccggacggtccccggcataactaaacatcaagccaaaataaacgtttttctttatataggtttaaagtatggaccaaaaactgccaaaatataaatgttagattctgaaattccaaaaatgtgtatatattcaatatttgttaaacaaattaaagaaatacactaaaactaccaaaaaatagatttaaattgataaaaaagcaatttttattgtttaccgatgtataagctcattatttgttaaggaaattgttgaattttctagaaatgtccgaaatatcagaacatgaccaaattcgccgtaggctcgaaatggtttgaatgaatgaaaatccatataactatccaaacgaacaaagtgaacttgttactgtaaaccaactattaacaaatagcttgtcacacttgggcaaaggcacagccgaactcgccattgtcgttaagagtgaaccaacgatgctatcaactgatgcttttgaaaactaaaaagacgacaataaaatttgacttagaattaacaacaaaactaataaactaaacaaatttgttcggcactttgatcgggtgccaaaaattgctgacctttaaataaaccttgctatcatagccattattttttgccgcgcttccttcgaggagttgtccagccattctggcccacgttttgcaaaagctaaaggcaaatgttggcacaagagcaattattgacactgaaaacaaagcaaagaattagcaatagtcatttgcatttttggcaaatcgggcctcgtcagtacggaatttgccaaaaatgccctatagaaacgaaattcctaagtgtatttcggccctttccgcagatacactgtaaaaatgttaaaaataaagaagccaaatgcgcagtaataaatgtccgtcaatccatccatatggaacgataaagcaggcagaacgaacaaaaccttataaatgtctattaaaatggtttgaaataatgaaaattcactaaactaccataatcaaagagtgaattcattgatgcaaactgattattgtaaaaaataaaccgcttgaaccccacagataaatttaaagcaataaaaatgtgagtgaaaaagaaaaatgagaaggcttaaataagcaacagaaaaatatatagtctaaaaaaattttaactgattaaattaaaatagtatataagaaaagatttgctgttcatttaatgtgtttaaagctattttccatctcatttcactaatctattaccatccttttaatttacaatgaacattgcgaactgtcaccacccaaatcattttaaaagctttttttttatcgtgtcgagcatggtcgatttgcttttatgaattgtcggcctttttttctgctgacccggc

SEQ ID NO: 17195 - DNA, 2861 bp, Heterodera glycines
  unsure (1)..(2861): unsure at all n locations
gggattgaccggattatatagattgaccggattttgagaggctggattcggatcggggtcctttctcaaaataccagtccggtccggtccgacagatttgtaaatgtcggtctctaataaaaaaaatttntagtagtttttctacagtgaaaatttaattgtaattaaccgtcgaacccgggcttgggataaagcgctgcgcgctttttgagcttcgctacctagattagcattggtttgaagcacaccacgagtgtaagagagtacaacaatcgttaaaagaggttatttaattttgattatttactttctttagtaaacatttgaaaagattaaaaggatttcatgcattaattttaaattagtcaaaaaataatttattcaaaagtttataaacaattactaaaaaattataaactgcaaagttttgtgtttaattaataaaaaaaaaattttttaattttaaattaatttttttgcgtccatttttaaatcttaatttgcttaaaaaatatgttgtaggaatttggttgatggcggaggtgtaaaaggtaagcctgtggtgggaattgaaccaacgaccacagctttccgtgctgtgctacacaaggcgccctttacaaccttcaattgcccttttgcatcagagcaatgagaaatactctgcctaccaggcactttgagagcccgcactacaatataaaataatttttatatattttttatttcagtatttcaccgaaaaagttatttgtttcatataaaagatagaccatattttgtatggatttccatttttttttatgaacatttatttcgctttttggcaatcatttagaactcgggtttctcaaaattaacttactttgagctcaaaaaggttcatgatttacaattaattattcatttgttcactgattaagaggtaggatttttagttcaagaatcttaattcaagcaaatttttgcaaaaaatttgtgaatgcaataaaactatgtaattatggaaatttagctatatcatcgttcttgaaatacatttctgatgccgatttgttttgattgttatgccttgaagacctaaaatttttaaattattattctaacttaatctttatataaatccttgtaatcaagaatagatttaaaaattaatgtaaacaataaattatacacttttaaatttaccctttaaatcaatttgcaaatgtttttcaaataataaattcagaaaaaagagaaaaaattaaaaaaaaaatcacttaataagaaatttatccattaacctcaccataggcaaagccccacgtttgcaccgctttttcatttttctatctttttgaaatggcttatggcttttcttgaaaccctctccaaagcctttctcaatttcccaagaattttgtaaatttttgataaatattttttaaaaaatgttgaaatctccacaaaaaaatctaaaatttgatcaaaaaattggcaatttttgtcattttttgtacaaaatctgttaataaaatgcatacattttttgaattttccctggcggcgtctattggcaccgccggccgccctcagaaaaatttaaaatttaaaaaacaataaacaattaaagaaaattgttgaattccaaagatttggtccaaatttttaaaaacacaggaaataatattgttttgaatttttaaatcaaataaaatgtgaacattttgggatttttatttgcatacatttagaaataatatggggcttttctacattgtttaaaatagatatttacatatttttctactagtttgcctcactgtaagtttatttttagttatatttttttaggtttaaacccacatttaaacataatttggtctttttgtggtattttatgcccggtttcacgcttttatttgaattttcttgtccaagaaagcatcaaaatgttttttattattattcttatattaaagagatgttttaattaatttgttttaaaaattgaatttattaaaaaaaatataattttatattctttcactaatcaaatatgtctacaaatctgatcagttttggttaatttagttttatttaaattaattaccgttcctaattctgcttattagtaattccaacgcatatttgatggtgaaggagcagaagctgcgctaacttcaattggcaaatcggcacgcacttccctgatgatgtttttgcttgacgttgggaaatcactgtgtgcttcttcgcgaaggagttctgctgtctctctcacctatatctgccattcagctttaaacaagaaatttgagaaccatttttgctccaaataatggagcgtgattatgttccccagttacgcgcccctctttatattggttgccaaaagcatcaacttgccaaccagtgcgtacacatctcttcctggacagtacggtggctttcttggacaacgccaatattcactgtaatcagccaactttgaaacggccttgatttttgtacatatttttaaaattttattttataatttccaacctcaaatacatattcataaccgccatttgttaacaaaatttttccccgtgtcgattttgtttggtcaaaacaagtaatgccatagaaaataaggagaaattgatgcttttgcctacaaaacgaattcaaaaaagtgaccaagaagatacaaaatcccatttttttatctcgagaatttcgataaaacacacacacataccactgaccaacaaattggagaaactgataaaacgaagtaatcaaaaatacgactaagcaaatttgtttgttcccgtcattgacccattgctgacccccccccccttattttttgttgtttatctttaataaaa

SEQ ID NO: 17196 - DNA, 1803 bp, Heterodera glycines
tctactttagttcgtagtagtagtaagaaacgagggacgagaaaatcacgtaataaggtttttattttatcgctatttttatttttgccattttctaggccccttttttcaaaaaatccgagttttccctaaaatttctttgctatctcctcacattgatcatttgtgctttcgttttaaacagtgtccccattttccagttgaatagcgtcgtcggtgtcatcctctctttctcaacgcttcaccaggagccaatggtcgactttttcgtctaccatttcaagcagcgcaaattctcgcacatggtgaaaatcctccgtacaaagttagctttgaacacttttctccgactatttgttgtctcataagtattgagtcctaaccaacaagtgtttaattttttaaaagtccaaaaacaaagaccaaaaatttgtggtgcattccgattcagaaaaacaagttgaatccgtttaactgtaagctaattctagctcaattagtaaaggttacaaaaagttatggacaaaaataaacaatcaaagatttgataaaatcattgatttttgaattgtttagagaatctgacgaattcttaaaaaaaatacatgaatcatactatagaactcgttttgagattgtgctcaggaattatggggtacaacctaacatattgcatttttactcttttcgactttatttgtttaattgtaagaagttttcggtttttgcccatggcattggttgttcaaaatttagtaaaatccattcctcacagattccccgatacgtgtcagcccggcgtttggtttcgtctgatattccccgaagactttgacgtggtcggacacttccgggcattggctcctcctgatggcgaagaatttcctgtccttattcccaggaaggtggtggactgccaacgtcggttgaccacacgcatacgggacgagcaagtgatggttcgtttcactaattctgaccattttcattattccaaagtgacaatttttacaaattggctacaaattttaaaaataaatttatttgtatatgtaaactctaaacatttttattagattccgtaagaaaatcgtgtttctgtaccctttggaaaatttaactgtgaagccaggttcgcactaccccccccctcctcctcctccacccgtttgttcccccacccccagaaaattctcaaatttcgaattttagaagatcttataatgaattactaacaaaaccttttaattttcaaatttttcttaaaattttcttatgaaaaatttaaataaaaagttttttttaattttcgaagtgggggcggaaacgaactgcttccgtgaagtccaggtcttaattagattaaaaaaatttgaggttgcgacccggcgacttcgattttttttattgttctatcctaattcttaaatgccctctaatattgcattggtttttctttagtttttcgtcactgcaacatacagaagcaattgtcccgccgacgactccttcctgtacaaatgcaggctcggcatgctgaagttgacccgtgcccagctgaacgacggggtgccggatcaagaacaacccccggttggggagcagcaatcgacacaaaattcggacatatcggtagacgaattgcctcagcgattgaaaatttggattgtgccatccggagcgggcgatgtcagtgccgttggatacttcctggtcaagcgcattgacgcacggatatgggtgagctttttttaatttatacctaaaaagcgtcacttcccaaccaagttttggtacattcgt

SEQ ID NO: 17197 - DNA, 1783 bp, Heterodera glycines
cctgtaaggtttccaacgagccagaatccgattcggatagcagcagtgtgaacggagatgccacaaacaacggcaacaacaacaaagtgccattgtcgcattctttcgcggcatggttttacgaaatggtcaccgccttccacgaagccaatcgcctgtctgatgagcgacgaacatccatccagcaatttgttgacgaactgcaacagggctttcgcaccgagaccggcgttgactcgttgcaaattgaactgttcggctccgttctgtccggattcggctccaacgactgtgacattgacctttgcctgatcaacaccggcatcaccaagcaggaaaaagtgcagccgaacgggatcatctctcaagaggtttggattgaaaacaatgatatgagaggggcagaaacgggaagagctcgtttccccatcggctcattttcagtcccccccgttcttttgggaaattatttgaaaaatcttagtaattcgctataaaattttccaaaaaaaattttcttggaatttccaacgatgagggaaggggaacgtagtgcacccggtacaaacaatgaattgttgaaaattttgttgtaatattatgattaacgacagagacattttcataatattttaaaacaaaccatcatctaattttttattcagaagcgtcgagaatggttaaacaaacttgtacaatatttgcgtaaaagtgagctttacacggtgatctctgttgcggatgcgaggacgccaattgtgaagtttgaataccacggagaggaaggcttccatggagagtaagggaagacgtgggctttttttgtacatttacatacactggaaaaaaaaattttgccgaaaaccaaaaaaatttggattgctctttttagagatttttttaatggttacgggtctggaaattattaattttatgattattattattttatgcattccctttattctcaagcataagtgttgagaatgggctggcgttgcacaacacggagctgctccgactgtacacccgttttgatgaccgcgtgtcaccgctgggatttgctgtcaaacgttgggccaaactctacgggattaatgatgcatcggtctgttgggccattaggctgttataaatcaaatttgaggcaagtacggcccagtgggaaggggtaagtggattacgtacctccctccccaatgaagtaaaaaaatttcatgaaaaatgtaatcatttggctgacagaaatttttccgctggaaaaaccttgggaaattttctcagaagaaaatttcaagaaaatcatttctgaaaatttttttaatgaactactactaattgtaagtataagtttttccaaaaaaccactggatttttcttaaaatttcttattaaaataccgaagattttaaaaattattgttaattttttttcagggagcgtgaacgacctgctccgttagattatacccttggagcctcaaaaatccaaattccgggatcatccctaacaattgaaaaaaatgttatctgtgattatttacttgtcggtgtgtttaggccggctcaatctcttcatatgcctacattgtgatgcttatccattttctgcagcgtgtcgacccaccggtgctgccctttctgcaaaatgtatgtttcttccctatttttcgtccatttttcctcacgaaattttaggaccacaaaggacagatggtcgagggatggaatgtgtcgtttaggcgtcagctccctgaacaggttggccctggtgggagcagctc

SEQ ID NO: 17198 - DNA, 2287 bp, Heterodera glycines
ggggggttccattcgaggggggggggggcgtataatcgaagaaatacggtatttagctatttttcttcacattttgtttgatgagaaatgcacgaaaaatacaattttagctcggaaattcataggtattatcgtcacaattgtcacatggagccacaggtgctaggtcgaaggacaaaaagtgcaaaatttgttaaaattttgactaaataaactcataacttttctcatgcgcaaccatattgcaaaatcttggtaatacgatagcactcgaaatgcgttattagcttgctaaatttcagaaaatttattatgtgatctagccaaaaaactggaaaaattgtcataacttttgaaagacttaaaaattttttttttaaatttagcaagctaatatgcaattcaagagctatcgtatgatgccaagattgtgcactttggttgagtctaagaaaagttatgagtggattttgtcaaaaatttggcaaattttgcactttttgtctttcggcccattagattatttttgttcacaattttaatttaatttttatatttttccataaattagaatcgttaatttttaggcaaaaaatccgaaatttaaaaaaaagaaatcttaaaaatttaacatatttctcaatctcgcattgcaaacggaagaaaaatgtctgagaacacagcggaagcggagaggagacaaatgcaaaatgaaatgtgtgtgtcttttttagggttgcacgggtacgagaatttgtgcaaaaaccgggtccagatattgccagagggtccagaaaagccgagtttgggtccgagcccaagtttttcaaccgggtccgagtacttaatttaaaaactaaatattccacgaaatagtttgtacataattaacaattattaaaataaaattttattttttttggaattgatagcaaatcaaaatcagaataccaattttataattttatagaagataacgtggctatcattttttttttgcttttcatatcttttttcagtctttttaggaaacgggagtgatccggcggtgccgacaggcgccgctggcaagatttttttaaattttggaaagatttattaattgctttttatcaaaaaatgaccattgatggatatttggatcaaatttaagaaaataaggtagtttggttacagcagaaccataaaggcagctctttccatacttaagacaaagtggaagttttacaaaagtcgtaaaaaaaagtaaataaaatccaccggtataagagtgttttccctttccctcaaccttgatcatcaatttgacgctcacacccattcgtactaatatttttctgggcccggttagacccggacttaggcccgggttttcttgaaaaaaccggttatccggctctggaccgtgtaactctagttttttaaatgaaattttaaaattaatttgccatttttcagtttcatttgtgccgattgttggctttcagtcttccatttgctgccgccttctcaacttggccttggcattgcactgctcagccaccgatttgactgtttggtggacgagcacttcaaaacgcgcaaatggatgatgggaaatattgaaattctatataaaattggagaaaatggccaaaaggaaatgaaacttcatcaaagtgcaaatttttgggaatggagaaaagtgccaattccgcaaaatccgttgccgaacaaattcatcggatttcgacacattctgattacgtaaaattggccgattaaaatgatttatgataaattactaccattttcagatacattgattccaatgtgattgcttttcttcagcgttttcgttctttttttgcttctcatcagacaaatttgtcaattacaacaaaaagtggcgacagccattttttggaaattgttgtaaaaaacatttggccaatgatcaaagacaaaatttgtgccattggttttttgtctcccgacgaattttgccgttttcaacaattggtgccgtccattctcagcgacaattgttgttgttgttgtccatctcttcgagcaatgtttttttacactggcgttttgccaaatttacccgctaatgactgtgccaatatgtcggctgaccaatcggttgtcaaatggctgttctcgcctcgcgcagacggtgctccaaaggtgctacgatacagtctccaaatgaataataaatttccgagaaaaattgacgcatttaaaagggtgattatttaatatggatggctttaaaattgccactaattattactaaatt

SEQ ID NO: 17199 - DNA, 2995 bp, Heterodera glycines
tatgccttttttgcatttttcgaaattttcgtgccttaaatgccttttttggcattttgccgttttggcgcctttttggaattttttccgaaaaatccattaaaaatgcaataaaatcgggaaaatacacctctaagaaatgacccgaaacaatttcagaaaatacatcccctaagaattgaaaaaatctctgaaaaattaatcaccaaaaattgatttttttttttctttataaaaattttaggtttaaaaattttctttattcttattcgggattttctgcctttttccaaaaacttttttggtgcctattaaatgcgtttttcgcgatttttggtgcctttcgtcggtctctagtcaccacaccagcaaagcagtacagcgtgctgccgggacccgtagtaaaagaacggtcggggtcgttttcgtacgagtcgtaaaagaaataagggatgttgtcgagggctttaatattgttgttgcacagcacacggcaaagacaacagcccaaagcatacagcaaaaaaacaaaacagtgtcgaagacaattttcgtttaattccaattaaaataaggcgaacacaaatcaatagggaaaaatgacgactgcatcaactaattcgatgttgaaaggggcggcaagggtgaattcagcagcggatcggttcagcttgaagtcgcgttgcaggctctgacctgtaaaaacaacggacaaaacggagatatgcccttttttctggccttaaaattccatcagtggcagcttcttgcgcacatttgcgatcagcaattagaaaattccttttgccgattttcaacaaattttcaagattgtctgctgcgacatccgcgaattcctccccggccttcggcgaaaaaattgccctcaatttgacatcggttttgcgtccttgcacttcatcggtgctactcattgagcctttacttttccaaactcgtccgcactttgacttttgcttcgacactgcaccggtgaacaaaaccaacgcagcaacaatttaatttaaaaacaatttggaatttcggtcgggttttcctcgctctttcctccttttacattgcatgacgacgacgaatttccctttggtttaataacagtttccatcttcgttcgtggtgccgctagttgttccttcgagtgcttctcaccttctgaattttttcgaaaatcggcgccttttttcataaaatttagatgttgtggcggttttaatgcacagttagattgcttccgcgtaaaggacaacctacaatggcgagaaatgtgtcccgttttgttgcagttgtagcacacaattcggtttgtctttggcataatgaacttttgcggcgcagtcattttcggctgaaaatttggctagtgctcttttccagtttcagccgatttcgttgctttttgtactctgatcgcactgcaagagcgacgaaactgtcgaagctcatgcctggtcgacgagccaattccaatcccaccgaaatttccgggttttccaaagcatgaattaggtgtttgattccaaaatcgttgacaaaatttggcggcaaacctgggtaagcacattcaacaatgcagtagagccgttccgcgaattcatcgacagactcattcggtcgtcgcttcacaccggcccttcattgaatgcctgcatttctgtgcgtcccactcgctaaaatttcttctattccgcggcaaatttcgttgaaatttttcgggcgatgttttttggcgacgtcaaatgctcgctctgcttttccactcattacaatgtcgaagaaaattttcgtttaattccaattaaaataaggcgaacacaaatcaatagggaaaaatgacgactgcatcaactaactactaattatcacacaaaatcacaattaaaaataacacaaaataaaacaacaaaacgccaaacatattttaagtcactatattagcacatacgggccgttttagtctgataaggggaggtgaccaagtgtccgtgggatttccgaatgaaacttggtaggtgggtagagcatccatgggttcttaaaaaaaattctgccaaatgagcacgagtgtcgagttatcatattttatgtccatattttggcatttttccaaaaacctctattagaacggcccccaacaactaaattggcctttttgaccccaaagatttatgtccatatttttgccttttatatccatatttcgcgattttttgtcctaattttatgtccatatttcacgattttatttatatcaatatatttcttttccctagttatgacgtgctaacatgatagcactaagtgtcctctataagcctgcaaaatttcaaaaaagctggttttcttaacatttttgaccataactttttttgaaacatcaagaaattttgcgaaattttgcaagcttaaagaggacttttaggactatcgaatgataccaagattgttccatagcatcattagccgggcgtgtgctctcggaaaatgcatcagtggaaaatgcaaagaaccggttcttttactgtgagggtagcattataattattttttaaataaaaaatttattttaatttttatattcattgattaaataaagggattaaattctaacaacaaaaaaagtacaaatttttgacaatcccataactatgcgaaaaccgaaaaattttaattaaaatttatcaaatggatataaattttcaaaagtaattatttttgtaatttattttggaatttttaataaattcgaaagtatggttaccctgttccaacccagagtaagaatcttaccgcagctgagggaaaggttacccttaccttgttctttttctacggaactggatggaccagggtaattagacttattgaatggaatcaagattgttttatttggttgaatacgaaaaaagttagaacagtctaaatttttcggcgcccaaatgtctagcgccatgatcccgacccaggttacctgggt

SEQ ID NO: 17200 - DNA, 2489 bp, Heterodera glycines
ttaagttttacgcgttttgctccttaaaatccttaataaaaagttttaaataacttttttcatgcctttttcgggattttcgtgccttttcatgctttttttcaattttttgcgccattaagtgcctttttcgcgatttttggcgcgccgttttttacattctctaataacaacaatgagcaaaaacaattgtttcgatgtccccaagaaacagttgtcattggaagagacaactgatcaatcagttcagtcaattttggccgcaatcgattcgcagaagcgccttttttaccctttaaaactgagggccaacatttcggatgcaaaaaaaacctaaaaatgcgctatccaatcttccaaatctttctgattatgtcttttatttgtcgctttaaatcggcggtaatcttccgatcggacacaatgaatcagacggattatggcccaatggttcttgctcataatggcacatctccgagtgatcaggataaaattcgagatgaagagactgatcactggctaacattaacgcaaactgatcaaacaacaactgatcagaattcaacattgagcatcgattggatgagcaacacaataatgaaagccgatcatgacgcaactttgagcttgggagaagaccatggacagactttggaagccaaaaacgatgatgaacccaatttggaaaatggtcattatggcacaactccgaccgattacgagccaaatgaggagaaaaatgcagtggataatgctgatcataatgatatggcagtggacggcgcgcatgatttatcctcagcagaagattatgacgggaatgattcaattagcgctaaaaatcagcaggagaatgtcgaggtattaaatggagcaaaagccaaattaaacgagaaattaatttaaattatatttgtcaaggaggcactcgatgacagcaaaaatgccgtcgatgaaaaacaacaaaaggtggaatcagacaagcatttggatgagtacacgtgggagcaaaccttgacaaaaaagtgcccgctgaattgcagtgaaaacaatttgcagtgttggcgcttatcagggtaaaaaaaaattattaaaaatctcgggtcagagactagcagtggttaattaggcgaaattttctcattatacaattaatcttggaaattcaaaaaagaaaataaaattttgaaaaatctcaaaatttcccataagagaaagggctcccgacagtgaaaatgaaaaaaagttttggtccacttttgttttgtacacagatatcggctcccattcatttgtcttccacccaattttgacccgaacaccgccgcaacaaaaaatgccactgatgccgacaaaaattggtggcacaatgcgttgcgctgggccaccgcgttgctgtggcatgccagcaatgccgaactggccacgctcgcactgctcggcatcaacacggcgctcgtgctgtgcacgtgcgcatgtgtatgcgtgcgccggagatgtttacggaaagattattattgatgattttaatggaaaaatcaatcctttttttgttaaaatattttattttacatattccgttaatattctgttgtcttgtccactcaaatatgaattttctccaattatgatgttaatttgaaaacccttcttagctgggggagaagaatgatttaaaaaagaaaatttaaacatttttttataaaataaaataaaaattactaatgaaaattgagaattgaaaattaaaaattaaaaagtggcatatataaacaaaataaaataatgagacagctgaacaagataaaaagtgaatttaaatctgttaaaaataaaacaaatctctgagctacaaaagggggaagacaaaatgtgcaaatgaatgaattaatttatgaatgaatgaacccgctgcaaaaacggttctgaaaagggaaggcagtgagtgactttgttcgcttttgatcataaaggcattttgaatggaaccaaacccaactaaaaattggtcggctattagctgatcaacggtgaaaagaatgaaaaatgaaaacgtaaaaacatttcttttaatttaattatttctttaaaaattgtaaagattttcaaatttggcaaaaaacagataaaatcggccaatcacgcgactaccgtaacactgcccgcccataattagtgaaaaaggcacaaaatcacaacacattcatcggcgcagaaatgccatcgttagctgctgactgagtgtttaatctgtggtggatggcatcgcggctgtgggcattcgtcgtcgactgctgatcataggcggaattatcgtagcccagtggtgccggcactgtcgtgccatggccatcggtggccgccgcatatacccacggagcagtgacagtcagctgatcatcgttgcgtgccaaccacggcactcgcttgtacaactgatcgcactggcaacgtttgacaatacccattgatggagacactgggggaaa

SEQ ID NO: 17201 - DNA, 2315 bp, Heterodera glycines
tttaatgtttcagggattttataaatatttgctatatgacttggcttatatatttcgattgtgaggattttttactggaatttttggaaatgtccaaaaaaaattcaaaatttcgcaattttttgtacattattttttatattatatatttgagattttttgaaaattattcaataaattttttagttttcaaatgcgtcccaaatatcgattcctttttaaaaaatggctatcaaaaatcaatatttaaaaagcaccaaaaacgttattttagaaaatttagggttttttatggcattttttttgcttctttacgcttttctaataattttgactaaatatcaccattttttgaaaatatgttgatattttttgtaaaattattgcattttctgattttttaatttgtataaaatcgatttttctaaaaattttaaacaaaagcaaattatgaattcatcttcatcaactgctagtttcgatgattttgatcgaaatgaaaacggtaatattttattcttgtaaattatttcgcaaaaattgataaattcattaaagaagaaaaagatgatgtgattattttgaatgacgatggacaaaatgagcaaaatgatcattccgtcgctgacaaacagttgaaaggtaagaaattaatggaaaagttgtaactcattaaactataacacaacttcttttttcaattaacatatgtttaagcttcgatcagtcaaagcaaaaaaatgcaaaatgatcagaaggagaagaagccaaatttggaaaaaggcggtgaattggagaaggagcagaaaaagcaggaagagaagaaaaacggtaagaaaggaatagcattacaactaattagcaatattaattaatcggtattgatgcgattaattcccacggcatcgaattaattaatcactttggtatagctgatgttttatagttagctacctaattggttttcttcattcagaactgtcaaatgccattccgcctggttttcagatgaattccgctgaggtgggaaaataatttaaaaaataaagaatatttaaaaatcaaattaagaaattttcaattccgcaacaaaattattggaattcttgtgcagatcgtcttgaaataacttgtggtggtttgactgtacatcattcaggaaatggaaattgtaaccttcattttaattaagaattaataatgtcttatttatatttttataatattttcataagggtggctttcggcgttcgcaaaatgtgccattccgagcaataatttcggcattgtttattttgagattaaatttgttcacttgaaaaagtaagtggatttttttattataattaaaattttactattttattaatttcaaatattaatttgctttacgtttttagaagtgccgcaattggatttgccaccaaagcgatgccatttgatggacgagtcggactttatggcaacagttacggatacgaaagcaatggcacactttgggttaacggtgcttaccaaactgggcatgcaaccttcaaattttttgatgtcgtcgggtgcggaattattttggaaaatcgacagttattttttaccaaaaatggacgttgtttgggttggtaaatttaaattttaatttatgaattttcattttcagatcacactgatttgttcgcttcttcttcggttgttccgttgtttccgtgcctttctttgcatgacaatggcgacaaaattttgacaaattttgggcctaatttcgagttcgatttgaacacacttttctgctgaaggaagcaacaatatcagaattgataaccaaattatttggtattttttaccacaaatatttctaaaattgtttattccatttttggaatattatttcaaattatttcattttgtatgatttctcttttgtgaggcagaagaaaatatgtcttggtccctttattcccataattttgtggatttttttgccaaaatattatgggacagacgaaatgattatgcgccgcaggtagaaatattaaaatttaaatcggttatccatttctgacaaatcttcatcagattttctcggctgctcctaatctagtatttttatatattttttaaaatgtgatgagtatttattcgagtttacgaaaaattattatagttcattttttacaaaaccgaggtctacaaacctagaaaaataatatgaattctacaaaaagctattgctagtatgtactttgtactttttgtttttctcgggtcctacccgggctttaataataaatgaataaatccttaaataccaagtcaac

SEQ ID NO: 17202 - DNA, 991 bp, Heterodera glycines
atccatatgatcacttcataatatcatttatagggattacatttatagtttttcactatttttttcctgagctccgcgtggcctgaaatgcacgaaaaacatgtttttttcggctgttgttaagctacttttcgagttattagcaactattttctagttttttatttttagcaactaaaaaactataaaatttttgaaaaaaactattttcaactattttggcgttttgcccaaaatttgttaataaaaatgcaataaaaacgaaaaatgcacccctaagaatcgacgcaaacattttttcaaagaatacacccctaatatcgaccctaaaattttcaaaaatatacctatgaaaaaagaaaaatttctcaaaaattcatctccaaatttatttatttaattttttgacgagaatttttgattttaaaaattatttatattcttaatgatttggcaaaatatttttgctttttgaagaaaatttttgattttacaccccctaaattcggaagtttttagcaactattttgggggttttttagaaactaaaaattaattattttggcagtttttagcaactataaatgtaatccctaatcatttatcgtctaaaatgaatttgaattcagtttcttgaaactgagttttcactccacggaattggcgttaagaatggcgagatgcatcacataaatttcccgactttggcatggaaagcgatgacgctgaagctcacgctgtggacaatgatcagaatgaagttaatgatgtggttgatgccgatggcatgggcaataaaaatgggcaagatcgccaacaggaagatgaccatggcggtggtggaccaatagaagtgtcgatatcagggatggcattccgagccccaaaactttcggaatcggaattcgagggtcaaaattttttcggaatcgggattccaccccaaaaatgtcgacatcagaataccgtgccatcctggtcgatactattt

SEQ ID NO: 17203 - DNA, 1510 bp, Heterodera glycines
aatattgggttgatgaaaaagttctgaccctctgaaaaaacaaattatgcaaaaaatgatattaattctaaagagattgaaaaagggaggcaggcaattgggatgaatcagcggacagttggccatcttcatgaccaaattcgtcgtcctccattttctgcaaaattccgcggcggtgtactccttctccatgacaacgcacgcccacatgttgcgttctcaacgcaacagaaaattgagcaacttcgatgggcggttcttcctcatccaccatacagcccagacatcagcccgtgtgactactatctgtttcgatctatggagcacttcttgagagggaaagaatttgctgatcaaaacgaggtcgaaaatgcattggatgaattttttggatcgaaaaatgatcagttttataaaaaggggattgaaatgttgcctgaacgatgggggaggatcattgatcaaaatggtgagtacatcattgattgaacatttgttttttgtgaaataaaaaattgtttaatgttgaagtgcttaaagggtcagaactttttcatcaacccaatattttgttttgataattttaattgaaatttaaaaaagaaaattttcttacattaatttttttcgttattttttaaaacaacattaaacccataaattaacaaatgattggacattttttggacaaaatctgctaacaaatcgaattaaaaatagaaaatttttcccgatggtgcctattggcaccacctgttctgccccctgtactcgaaaagtttttgaaaaacacgccgcaaaaaaaagcgttacctatatggttggtttggtttctttaaaatacttttgtttatttttccagcgattaaattccgttttttgttaaatttaaataaaaaatcggtaatagtttagatggtatgacaccttttttgaaaaatttttcaaaattttcaagtcttaaaaacatgtttctaggggtttataggtacgccacaccgtgaacacatccgacgcgtgtgcagaagccccaattgctcaagccaagcaaaaggcaatcgcttcaaaattggctacatgacatttcgccaactgacatttcgccaactcagccaaaaacattcatttcgccaactcagccaaaatcagacattttgccaactgacatctcaccaactttacatctcgccaacttttcgccaactagtcgaaaattgaattttaactatataatgatattaaatttattataaaagtgcttcaagcaaagaaatcttcataaaatatataaaatatcaataaaaaaacaataatatgaaaatgtttaaaatcaattttcatcggcctcagtttcttcaccactcttctgaatttccacggacgtgaaagtcccctccgcaaagccttgcatcaccagcccgagcaggtgccaggcgtttgtcaatccttcctccgattcaaagtcgggctcggcaaggatccgcaccacatttttgtttctttgatgacg

SEQ ID NO: 17204 - DNA, 2910 bp, Heterodera glycines
  unsure (1)..(2910): unsure at all n locations
aatgatcattcatccaaaaaaaaacatggatcaatcaaaaataggaacggctcatttctccaccncctgatcactaatctactctctgatcattaaaaatgaaaaatgacggcacgaatttgtccaaaatcaagggtagtttaaaagttgtgatcagaacgtgtataggtgtttgatcataaatcacattggctttatgcttctgacctcaacagtttgtatactgatcaaaatgctatccattcaaacattgatcagtgatcaaaatttcatttattatctatgatcagtactgattattgaataggctttaaattgatccgtaacaatattacacagaatgtgctggtggattatcatcttttgccgacaaatttgtgtggtccgagagactcaacaacattgcattgcagcatcgtgaattgatttatatcagttaattcaattctaattaaaaataaccatttttaaatgaatcaattcccttcataattaataaagcgctaattggcctgcctcctaattaaaataggattaaaaattccatttttaaatgaattaattaccatatgaacataattaaagcgctaattggcgtttaaaacccaattaaaaattccatttttaaatgaattaattacgcatgtacataattaaagcactaattggtgtccttgcgctgctctgtttgtccttgtgcggctacattgcgtgctgttccgtcgcagcgcgctgctgtacccatcggcgaaaggtttttacactggaatccaatggtaaaaaagagaaaaattgaaattcaaaattttcaaatctgatcgactccgtgcccgctttgtttatcgtggagcatttttttgtagcctgatcagtgccataatcaccaaatccaaactatttgggattcggcatttttttcttgatcatgggttaagcaccgactcgatgtagggaattgcgaatgccatctgaataaaaaatactcatctttttgattttttaagatatgtttttcggttttttatgaaaaaggggaggggcggggggtcaacgaaatttttgcgaaagaatccgtccggccatgtaaatcggcacgtcctttttttttgttttgtttttttagttattgcctaagaaactgaggattatcattggattggacaaacagagttcaaggcgctgtttttgttgggccatacaaatgtttttggcaaaagatgccccacgctaaatctagtttttcctagcccattttaaaaccctaacaggcttctggactagttaaccgaggacaactcagctgatatgggtcaagatggacaactcagccgtacaataattttttttttaaataaagcctaagcctaggcctagcctaaagcttaggccgagcctaagctattgtacaagttgcctttatacgagtttgtgtacaagttatcatgacacccgaaagacaactgttaaattttaaaaaatttaacattatctaaacttaaatttaaaaacttttagtttaattaatttgtttaaattattatttatttttttttcaatttttataatttttttaaattctcgtaaagctgagttgtcccatcagcagttgagttatctccagctgactgatcctgacacgccctgataaatttttgaaattttaaatccttaccccacccacttttccctctgtgtgcacagaaaaggcaatggaaacggcgcaaaatgaaatgggcacatgttggtggcggtacagcatcaacaacaacaacaacattggtgacaacgacggacggcgacgaccaaccgttgtttcagttggaggaaatggggggcgacaccaatgaaatggtggtggtcaccagcagcagcagcagcaccaacgaaagtgatgatggtggtggtagggatgaagaagaagaagcagtatttgggaggcatggaggaagacgaagcggaagaaaaatgaggacaaatcaacaacaaaaattggatgatgatgatgatgatgacggattatgattgattgatttagtcatgtctaattcatccaaacccaactcatccacgggagagcattcgtttcaccctcccccgaaaaaattttaagaaaatttcaaaccttgaaatttttcaaaaaaaaaaaatcataaagaattatttcataagaaaatttcaagaaaaaatttttgaaaatttttcagcgattttttcaaaattttacgatgaactactagtttttttaaaaaaatttctagatttaaattttttttgggagaaaacgacgggggaaaataagtgcacccctcatccacacagctcgatgcggtgtcctggaatttcttgaattgcggaatccgtgccgcggcatttattgtggtgcatggatgagttgggtctaccccatatggtcggataatcattttcatttaagagccctaataatttctattatccagcaacaattacgaaaaattgtttttttttgaaatttgcaggataatagaaattgggttaatgaatgttggttgatatatgtagtaggtcagtgtgttcagtgttcaactcacccacttcctttcgaggaggaaaatttcataaaattcaaaaaatattaaaattaacaaattttctaaaaaaatctttaaattttcattttttctgttttgttgaagaaaagcatattatttgtcattcattaaatgtgatattaaaaatttttgctgttttattgaaacatttttattgttatttttgttgtatcaatttcattcatcaaattcacacattttgtaatgttttgctatccaattgtttanatctattcttatgttgaaaaaaaacagctgagaaccctgaaaaataaattaaggcatatttttagtgaaatataatcccatagtaaaaatg

SEQ ID NO: 17205 - DNA, 1557 bp, Heterodera glycines
caactcatccacgggagagcattcgtttcaccctcccccgaaaaaattttaagaaaatttcaaaccttgaaatttttcaaaaaaaaaaatcataaagaattatttcataagaaaatttcaagaagtttttaaaaaaaatttccaaaaaatcgctgaaaaattttcaaaaatttaaaaaaaaaatttctagatttaaattttttttgggagaaaacgatgggggaaaataagtgcacccctcatccacacagcacgatgcggtgtcctggaatttcttgaattgcggaatccgtgccgcggcatttattgtggtgcatggatgagttgggtctaccccatatggtcggataatcattttcattcgagagccctaataatttctattatccagcaacaattacgaaaaatagttttttttttgaaatttgaaggataatagaaattgggttaatgaatgttgatatatttgtgttcggtgttcaactcactcacttcctttcgaggaggaaaatttcataaaattcaaaaaatattaaaattacaaattttctaaaaaaatctttaaattttcattttttctgttttgttgaagaaaagcatattatttgtcattcattaaatgtgatattaaaaatttttgctgttttattgaaacatttttattgttatttttgttgtatcaatttcattcatcaaattcacacattttataatgttttgctatccaattgtttaaatctattcttatgttgaaaaaaaacagctgagaaccctgaaaaataaattaaggcatatttttagtgaaatataatcccatagtaaaaatggaagaacattgagaaattttaattgaaaaaatgtttagtcaagaacgaatggcctattcggatatacggatttattgtgtggtgtttgttgtctatttgatttggctcttttttgcaaatcccatggaattaagcgatggcacatcatcattggcttcggcttcggcttcattgatgtggataatctttttaagcatttttgctttatgtcttctacatttatttcattgtggttgtttgtcgctatacattttccaacactgaaccgattttgccactgatttaacaacagaagcgaattttttgaaaaacaaaaaatatgcgagattttgtgcattttatgctgactggaaaaatgttgttgtcaatttgaataaacaccttattcatcaaatttgtttgagtttaagttattgttatcatcatcagcatcagatgcttcttttaatagcttgatttaatgatttcaaagctatttgattttcatgtttaaggtgtctcgaatcaaagagagtcggaatcttaagcctatcccaaaaattttgaaaattttatttgaactttaagcttattttcaaaataatacctactaaaaattcaaacttctcaattgtcttggatcaattttttcttttataggtgttcttttcaattttattagaaacctaaaattaaatataattttgtatttttgtaataaaaatatatgttaaaaaattgcctaataaaa

SEQ ID NO: 17206 - DNA, 1963 bp, Heterodera glycines
tttgcatgaatggcacggcggcataatgcataaaacattgttgctctactattgcttttcatgaattggcaccagatgaggtgaagcagcagcggctggcagcaatttcccccctcccacccccgggggcgggggttcatgtcatgagactttttcatatatggatgccgttctgctggatttcgtgccaaatttagaaatggcaaaggcccccccccctcccctccccaaaactgctggagagacaacggcgtggcgcggcggcctcggcactcaaatctctgtaattttggtacacttccccgccctccccccacagcgaaacgggccagttgcgtctgaccagttgcgtctgagccaagtttagaccactataacttttttctttgttgaccaaatccaacaatgttggtatcattcgaaagctcttaacaagctctatcggctatccaaaaatcacaaagacataccgacatataaaaaagttataaattaaaatatgcaaaaattctgactttttggtagtgttcatgttgcaactttttataagttgttcaatcgcttagcaatatcttatcaaaggcttctaaacatgtagagctttcgaatgatgccaaatttataaaatttgacaaacaaagaaaaaagttatggtgctttatgcttggctcagacgcaactggcagacgcaactgacccctaccgcccggcggtgtgacccacgcgtttgggcgctgccgtttgggcgcaggcatgtttttccactatagcttttttctttggcatccaaatccaacaatcttggtatcattcgaaagctcttaacatactctattagccttaccaaaagcgaaaagattttcaagcctggaaaaaattttattaagaaaaaacttaaaaaattcgacttttcgcaattttcatatataacttttttgataattgtctaatcgcgaatcaatagcttagaaaaagcttctagaaatgttaagctttcgaatgatatcaacaatgttggatttgggtgacaaagaaaaaagttatagcgtaaaaacatgctgtggccgaaccgtggaggccgaactgagcgagtccgtcccccggcagagcgggccaacttttttcccatacatatttaagaagttgccaaacttataaaatttagtcaactgttaaataagtacggtttgttgttccgacatttgctgaccaagaattaagcccaagcagcagcgagagtatagagaaatgtattggcaaattgcatcagataaatcatttattttatttttagttgatatctgggcccaaccaaaatcaccatgtggtatttctattccctcgacaatttccggagatcctgactctgatttttttttatcaaaagttgaggctgaacttgcttgctttaaggcaggctaaaggttggaaatgaacgtagacttattttcctggtggaatgaaaacaccgaccgtcttcccgaattgtcaaaacttgcaagaatggcccacagcattcctgctacatctgtcagttctgaaagactgttctcaaaagctggacttatttttgcgaactcacttcgaaataggtccaaaatcaataaatgtattaattaattttataatttaaggctttccggcaatactgtacgccaaattttgattgtgaaggccaatttggacgcacttttactggcatcaacaaatgaatttgaatcaggtgatgaaagtgaagaaaaagacattttttgagttttgataactttatttaatagcatttaaaaagaaaaattggttttttcgttaaaaaattttactgatctctacccgaccggggttcccgaccccgacaattgagctcccaccgacccgacccccgacatgtcgcccccccccccccccgaggtccccggcccccgacattttgccaccccgagggctcggggcttaaccctagttt

SEQ ID NO: 17207 - DNA, 2506 bp, Heterodera glycines
aagtgcacttccggaggaaatcgcgaagagaatcgttaatttagtgccattggagcggaaaagtaaataaataatggaacttattcattctgatgggcaatttaataataataaataatttttatttttcaactccgccgaatgcctcgcgggcatttggttaagaaatgacaaatttacgccaataaaaattcgtttttgtaccaaccgccgaacggcgacgaccaaaaattgaattaccaacgaacgcccaaaggcgagttttcttttttttttttttttgctcggccaaaaggaaaaagcgatcgaattacaatttgagccaaattttgagcgacgaatgacgtcaaaaagggagcgaaaatggcccaaaaaatacaataggtgctaaaaatttcaacaattctcagaaatttgacagggaaaaaaaaatttggtcggggatttttgtccccgacatttttctgtcccccgaaggtcgcgggggaacggaccttaattaaaaatccaattccctttttccattcccgaaattcattttgatatttaatccttaaacccccgcggcgtttgtttgttttatgtgcacagactttgcgctcgaaatgtttaccgccgccggcgccgcttcgcttcgcttcgcggcgggggcgaatcaaagggaaggcgccgcccgaggcaaataggcgtcaaaaaacagactaattaagtgctcgaagccgttaatcggattgccctttaattgggacgcgcaacgaatgagtgaccttttaagcgtaatcccatcacagaatgccaatgtttgttttttaattacttcctaatcggatttgcatgagaagaaaaagaaaggcacttttataatattttaaatttgaaaaacggaaaatgccgataaaaatggaattgatcaaaacgcagaacaatggaaaataagatgatcaaacacaagaatggaaaactgaacaaaataatgaagaaacaaattaaaattgactatccgactgatcactagcggaatgattaagccaaaacgaagtgccgatgaatcaaataaacggagcgactgatttgtaagtaactctgcttttggcgtcgttttatctctttataatatttaaatggagcaggaaaaaacttcaggtcgaaacagtccaaaaaattaccaaaataaaataaaaactgatttttctgactatcatttccatatacttttgtatctttttgaaattttgcagaataatattaaatagagctaccgaacaaaacaatattaacaacatttggcacagttcgtcccattttcccgcattttttggctgtaattacgaaaaaatgaaccagaaaatgatcaagccatacgtaataaactgctgtaatgagtgagtgctgtgcacccaacgacggcaaacatcgccaaattccgacctcattagctcattcatttcgacggtcccccgccgccccaattgccccgcaaattgcttcaaactgaaaaagtgggccatacatcgcactttattagccgccgtggcccggccggggggattttggattgtttgtttgtgtttgacgggagaattttgagtgggagggcgaaaaaaggggaagggcgaaggggagaacttcaaaagcaccgggggacaactgctggccaaattgtgggccaaattagccaaatcatcgcatcagtctcgtgacgccgtacggcgggggaggacggagttccgtccgccattcggcagaacttttggaggcggcgctggtgggggcgggaggaggacagatgagctggaatggaacacggagcggaattggaatttgattgggagtaattaactaattaattaattaactaactaattatgacaaaccgcgtggaattaattggggagaggagattaattgatgatacggtacaataattaccgaaactagacaaaggcttcgagaaattcgaatctctgaactggggattcttcgagaaaagcgacaaaaataacttttttaattggggaaatttgctaggggagatacctttcctgtcatttgttgatctcgattttcgagttttaattgttggtctcgggttttgcttctccgatgaaatcatttctcgcaaccaaacggaaaataaaatatacggagaacaaacaaaaaaagggaaatgccaatgggaacaaaaaataattaagaaacaaaaagaaagcgaataaaatgccatcccttggggggggggggaatgaatggcagtaaaaaaataaaaataattgccatttatttcgaataaattacatgtttttttgaattttaattgaaattttcagaatgaaaaaaatgtctccgtgggaattggacaaagaaacgaattgatttgagagagcggagacattcgtttgaatatttgcacaaaaaagagatggggtaaagtaaaagggcatttgcgggaaattgggacgaaactcaaaggaaaaaaggggaaaaaaggaaggagagggaaagggga

SEQ ID NO: 17208 - DNA, 1723 bp, Heterodera glycines
aaaaaagaaaagaattttatgacaaaaatttaaatttagatttattttttgtggaaagagtgagttttcaattaaacagcaactcaatctcgggtgacgagaagccattcaattttgaggagcttgatccttggggagggcaatgcaaaacggggcaaaggcaatcaccaattaatattcgtaaagaatgggtaaatttaattaataactctaattacataattagtgagtaagaacatatttcatttttacttttgttagcgttccagttcttattttcgagtgttgggcagaattttacaatttatcaatattctaaaatttgctaagccagcacttttaacctaaagatccaaaaaggctgtcgacattgtcgacatcaaatttttatgaaaatttttggttttggtaatgaattttttaactaattctagaaaaattcttgatatttcattgtttttaactattttttagtttactgaaaacaaaactccgccaattcgattcgtaaattatgaaaaacaaaacaatgtgacattgcacaaccatgggcattcaggtgaaacagaatgaatacaaaggtttcatcgaaaattccataaaataagcattttttaaaacgagattatattgagcgtttttggtaaaaatttttaaaaatttaatccaaaaaatagaccttttttaaagagtttttaaaaacaaactcaaaagatttggcacgacagtgccgacaagtgccgctttttgtagttttcataaaaaattaaagaaataagcacgccaagaaagaaaaagcacaaatgtgcggcctctgatctctgattaaataatttttttatatttatttgctaataaaaactaaatttgccaagtggaagtaagcggctttgacacttggcccgagcgacctttcatcaccgacggtggcctgggaagcaaatatttgttgatcgaattccattttcactggtcccaaaagaagaacggaagtgaacatacggtagacggacagcactttgacgcggaggtactgtagacgaaaacaaaagcgagagtgaaagcgagacgacagtgagagaggccaagattacaaacatagagagagagagagagagagagaaagttgagagaaagagaggggggggaggaggcgcgagaaagagagagagagagggaggaagataaagagagcgagagagagagagagagtgagaaagagagagagagagagagggaagataaagagagagagaaagttgagagaaagagaggggggtggaggcgcgagaaagagagagagagagggaggaagataaagagagcgagagagagagtgagaaagagagagagagagagggaagagaaagagagagagagggggggaggaagagaaagggagggagaaagaggaaaatttgaaaggcactttctaatgattcaaaattcagtcttaattaaatttgactttccggcaaagctctgtagagaatgctacacaatcgttaaagtgttttgtttttatacaattcatatttgctattttagcttcatcttgtccatgtcaaaaaagggcttacacctgaagaagcaattctaacttcggatggcttcgctgtggtgggaattttttacaaaactgcattaagcggaagcccactgttgtcacttcaaaaccaattaagccaagtgacggaaaaaggtgggataaatgggaaaaaaa

SEQ ID NO: 17209 - DNA, 2628 bp, Heterodera glycines
  unsure (1)..(2628): unsure at all n locations
ctccccataatctggtttgagtaccccaaacggacacttgattaaatcgatttttttgttttcggggcagtccccccgaaccgatgcgcccagatttatggggagaccgaatccttcgggaatagcttccctatagtctgtactttaattctgcgttggatttttgctccccataattgtgtgagtaccccaaacggacacttgaaaaaatcgatttttttatttcataaatattttttcagaaattgctctgaaacgcaccaaattttatttacatgttagtttaggcactctgatgctttttctatcgaaaagggagatgaataaaatttttaaaaatttttaattcctttttaaacaggccaaaaagtttaggcttaacttttttttcagaaactgatcagaagcgccccaaactttgcagggatactgaaaggaaaagaattaacctggtttatcacattagcttgtcatcagtttttataaaaaattttcaaaattctgagtctcctattattttatttttttttcaaaattttgaagggcgggggggggggcgctgttccatttatcaaaaaagagcgttgtatgtttaaaaattttcaaaaaaataaaaattttatttataacatggctcaaaattaatcagtttttttagataacgatatcccttaattgttctctacatattagctctatgaaattttaaatcttgccaaagaagagagctaagcgatgtcacttagtccattccatcaccaccacaacaaccactacaacaatacaaacagcagtagcaaacaacctcatcatcaaccttcttctactgttgctgctgctactgctttgcaaccgcatcacccattttctcaacatcaccaccagcatcattttcatgacgacgaggaaccgatatggacttgcgcggacacctttgactcatccctccaccgaagtccaccgcctccgcttggctatcagccgccggccgttcgtggcgaaacgccacaaggtgagtgagaaaatgccactggagatgccaagtgccttccttgggcggagtgtgggagataatgtgggctaaatggacatgggataacactaccgtatcccaatcatacattggtggtatgaatcgaaagttttaagtctcagaaagttataaattgaataaattgtgtccttaagaaaaatacgctgacaaatgaatgagagaaaggaggtgaatcactcactatttttctaatatgtatcagtgatgccgcgggttgagaaaaatttcgggtttcgggtcgggcactcgaaaaatttcgagttcgggtttcgggttgagaaaaacttcgggtttcgggttcgggttggcatcactgatatgtatagaacaaaaattttggatatagaccagaatttagtgccatattgtttctatagacttcaaatctgtcaaatgatacccaaaattctatttagatgcatagaaatatcggtttttttgtgggaaccgcccacttcggcgccggccttttcggcgccgttgctaacaacttttttcttgatcaaccaaattaaaaatttttgttatcattcgatagctcttcagattctctattagcctgtaaaatttcaaaaaatttcgtcagtttacaaaaaagttatggccaaaaaacctcaaaaattaactttttcttggctttttcggcgccgcgtggcataacttttttatttttgaatcattcatttctatttttacatgtaaatatagagcacacatagagctttcaaatgatgccagattggctaaagctaactgacaaataaaaaagttatagcatttcaaaatttgcggcgccgaaatggtccgcgccgaagtgaccccgaccctttttttgtttgtttggagttttccgtcctctcaaatagcactgatttgtgttgtaccaccatatccactgcatacagtacgtacgcacttggctccctctttttttacaatgcccagtctaatctctcccccctccaaaaaaatgtgcagcatttccgaccacagtggtgcatgccagtgccaagtcgaccacacctcgcgacatttacagggtgggcatttacgggtggcgaaagcgttgcctgtacgccttcatcttgttgcttacacttgtcgttttcatcaatttggcgttcaccttctggatcatggccgtactcgacttttctctagtaaacatttaaattcctgtgccctgtcctgttcattttgcataaaccttcataattgttaggacgtgcatttgtatgagttttcggattaaaattttagcttggtttgaaacgatgctttttattaccgtattcttccataatatttaacattctgtcccaaattgccaaattttgtccatatttcgacattttaacaagaaaatttgaaaaatacagcctaaaaataaaaattttcattttgtttcctctctgaaaaaaattcattacattaagattattctaaaattttgaatatgtatacaattttataaaaatttttgtctatatagtggggattttatcaaatatttcggcgtttttttccnatagatggaaattttttctcccatataaatcgcgtcctaaataact

SEQ ID NO: 17210 - DNA, 3559 bp, Heterodera glycines
  unsure (1)..(3559): unsure at all n locations
aaggcaaattggggaggggcagagaagcgaaaaggggtcatcgacagcaaatccagaacaccttcctggactggctgaattcctttgaaaagacgccaattgtacgaatttcgggcctcgtcgaaatgaatgaatggctaaatagcgaatgccacggggacggactaaacagtcgtagggccgagcagcagcaaatggttggcgaactgttggagttaaattgaaaggtctctcaaaggcactgctcgtcgtccacgaccaggtcagtccagtggaacgaacggcacaaaaggaagcccaaaatgccaatgggcaggggacgctgtgccctttcatgcgcttttcctcagttcgtttgccccgaatttcgcttggccactttcgcgcgttctcttttcgcctccgcccgtcagtcgcattcgccgccgctccgcacaaatttcacagttttggaggcgcttcgtccgcttgccgagggtgaggagttgtcgctgtccgcgcgactccccggcctttcgcgcgcgtgccgaatgctcattttgctcagggcgaatttgttcacggaattgccacagggaatttccggctcgaaagtaatgagactttcccgtttcgatcctctgaaatccgataaactctcaacagatgcaccaaatcatcgaactttggctgagacttcccttggcaaccgaacgatgccccggggagaattcggcactgaatttggccccaattttgggaccattgggcgcagcaaatttggaatttcttcgagaggagcgaattctcaaggcaattgagaaaaagcgcgaatatttagcagtcggaataattgggggagtggcggtaagaaaaaggaagcaattagcgaagggatgaaccaattaaggtgatggcacttgcaatgtcaatcttttggggattgaatggcaacgatttcgtaacgaaaccgtaaagaaattttgagaactgtcatttttatcaaatcaaatgcttttttatgaattagattcatggaaatggccttatttgtcttgtcttttgagaaaaaatttgcagaaaagaatttatgaaactttattaaaatccattcaaaatgttaatagtttaatgaaaatcctgaatgatattgattaaaggaatcgtacagaacaaatacaaaacgattgtttcaccccaagctaaaatgtaatcttttttcagaattaaaaggctaattgattattttactatattgtaccaataaatgattagtaagatgaaagacattggatcaaaaatcacatgtaattttagactgaaaaatcacaaatttcaacaattctctttaagtttctctgccaattttgacatttgtttggtgggctgcaggcgaaggtccgccaaagcctccatcaaaaacactgaaaaattattttgaaattcctcgtttttgtgcattctagcaaataaaataaaaaaacaaacaaatgtcagcattgaattgacgcctcagtttcaacgacaaattaacaacatttcccacttgagtacaaaagacattttggacgagtttagcgaccttaaaaagagtttaatgaagaagacatggtgaagcggcaaatgccaatttactcncggcactcacttccgtcaaaagccacaaatccgcttcatcatctgcataaaattatttgtaataatttgacttacaattaggtaatgttttctatataagagtaggtcaaaagaaaataaataattttaaaattcaataggaaaacttcttaaaatttgacgaatttgttaacaaatcgtcaaaaaaacccagttcttattttaggttaattaaagaaatgaatttccaaaattggttatatttcgtttattggagaaagcgcaaggttggaattggaattattaatgaaatatattggcccaccactgcttcacacttaccattgaaagatgaatttatttcagaagcagcggaagcgatcgatcgaacgaagtttcggtcgtttccgtaggcgccgattgtgctcatttgggacaaaagaccgtggccaacgccggtcgcgtaattgtgaggggcaacgctaaagctaggaagggaacggctgagttcgtccgcggccattccctccggcgtttccgtctcattttcagattgtttctgaaaagcaatgaaaactaaatcggccgaaccgaacttttgatttagattcgtgtttttgaaaatctaaatccaaattttttttttaatttgggaagcgtttcactccaattcactcggaggggagaatgattagtgcatcaccaccaaccaatttgcgtatttcgtcttccattgtcaaagtgattgtgttggcgatcgactcaatctttcgtccgacgacccgcaaattgagcgtttccaagagagaggaattcgaaatgagccgggcagactctgctgcaatttttcgattgttaggcaagaaaaaggaacttgggatgagtaagaccgaccgttttccgggctttctctgctcaaatcagctgcagtttcgcggatgtactcgttgaggtcgtcgattatgttcaacagatagcccatcacacaaatggaggacactttgtcttccgtgttctcctgaatgcttttcctcatccggatgtccgctccctccggctttatgttcaaaatgtcatggttctgcaggagagagttcagctctctaattccatgctaaaataaataatcatcaaatccgaattcatttgactgtcgcggccttttggaacctcaaaggaaggcacaatttgagaagagaattctgcgccaaatgtaagcgaagaatcattcacaatttcccgcattttcgactgaatttcctcgaggaatggcatcagccaattgtgccgatggcgcgaccccttttcaggcttaatggaaaagccacatgaataaatggagtggcataaaagtgagcactgcatttctcccaaatcattgtctcaaatgaaagtcgtctggaaaactcgactcgtttttctagtaaagcacttataataaaataaaacagaaaattctcaatcaatttatcatttttgagggggggggggggaaacaaattactcccggcgggagataaaagagtaccgcggtaattttgttgatggaacagaggagcacagaagtggcgtatttgccatagtcgccactaagcagagaaaagactttctttttgatttgctcggtgactccaatcatatgctcatccccctccttctgaacaaattcagaaaaatccgcaagaatctaaaataaaacttaaggcttcataatttgagcgtgtctgctaattttaagatttcgtcaaacggaccagcgcaacgattttgaacatcttcacgctcgtagccaaaataatgaggcggtatccgaaaatatgaagacttttttttctcttacaattaaggcgaacatatttttctagtgagaaaaataagaatttgtagcccttttcgccaaaaattgccaagtcttttgccattgagggtcaaatatcaaattaaaaacaaaacaagaaaaatg

SEQ ID NO: 17211 - DNA, 1209 bp, Heterodera glycines
ccattccttcgggggaccgtgccgggtgccgcgggcttgcagtgctggttcgtttcatcacggcaccgaaccttttggctagtcagcaatcgttgcttaacttgccagatcggacgggtgcgcatgattccactgttccaagcaccccaccaaaagcaaaacgatataaccaaaatataaggaaaaatttttaaaaaaatttttctccatctccctttttgatagaaaaagcatcagagtgcctaaactaacatgtaaataaaatttggtgcgctttagagcactttctgaaaaaatatttatgaaataaaaaaatcgatttattcaagtgtccgtttggggtactcaaacaattatggggagcaaaaatccaacgcagaattaaagtacagactatagggaagctaatcccgaaggattcggtctccccataaatctgggcgcatcggttcggggggactgccccgaaaacaaaaaaatcgatttttcaagtgtccgtttggggtactcaaacaattatggggagcaaaaatccaacgcagaattaaagtacaggctatagggaagctattccggaaggattcggtctccccataaatctgggcgcatcggttcggggggactgccccgaaaacaaaaaaatcgattttttcaagtgtccgtttggggtactcaaacaattatggggagcaaaaatccaacgcagaattaaagtacaggctatagggaagctattcccgaaggattcggtctccacataaatctgggcgcatcggttcggggggactgccccgaaaacaaaaaaatcgattttttcaagtgtccgtttggggtactcaaacatttatggggagcaaaactccaacgcagaattaaagtacagactatagggaagctattcccgaaggattcggtctccccataaatctgggcgcatcggttcagggggactgccccgaaaacccaaaaaaaaattttttggataaaaattatttaaatgaactgactagataatatttaaaataggttatttctcttcctttcagtatccctgcaaagtttggtgcgcttctgatcagtttctgaaaaaaaagttaagcctaaactttttggcctgtttaaaaaggaattaaaaatttttaaaaattttattcatctccctttttgatagaaaaagcatcagagtgcctaaactaacatgtaaataaa

SEQ ID NO: 17212 - DNA, 820 bp, Heterodera glycines
cgtggcattgtttttctctgaaaatctttcattgtttcttttttcgatttttaggactccattttttatttattttccatgataaattctgattttttatgaggcatgtgtcacaaaattggactaacaaaatgatgatgttcaagaaaaaaggtgagattgagatagtgatcgagaaaaaaactgagacctctcgagagagagactcgatacagcgactgtcgagaatcaccacatcacactctttttgagatagccgtctgtatgctggcatgaattcgaaaattaaaagtgatcagtttacataatttgttaattatgtcatgccaaccttttgtttgcacataaaggtggaattcagaataaaatatgaaaatcttaaaacagttatattaatattccatcgctccatttcggatttaagaaatatttttatcttaattaaaaaataataataaaatatttaactaaaaagcaaccgccaaccgaaagccggaagagaaaacggacagagcgcaaatgaaataggaaatgatggaattgttgaatcaatcatttattatgtgtatgtatatgtgtatatattcatatgaataaacaaagttttctgatgcaatatttgccaaattttacgcatatataaaaattatgaattatataaagcgatattaaatgttaaaaaaaacataattttttacactaataacggataaagaaatgaagatgtcaaatgccatgctaatgtcctgcttctgctttttgaatatttcaatgcttctttttgtcccaattaatgggacacctgcggacgagtcaactg

SEQ ID NO: 17213 - DNA, 2330 bp, Heterodera glycines
caaatcccagctttgtcggacatttagtcatttattatacaaaatttataatgggcattattatatattttagttgacccacgcactgaaaatgccatcgtttttgatgaagaaaatatcaatgtattggttgaggatgccattgattgggctcacaacattttattagtgatgcgacccccgggcatggaaggaaggtttataaaataattaaaaatttaattttaatcaattaaatttgaatttttttaaattttaaatgtggtaaacgattttgacagaagcgacatggtccaaaatgtgccattctcactctttcctacaccgttcccccgcgcaatgttcaatgaagccattgacgttgccaaagtgcgttcatttatttaaataatcttttagaatttttattgtacttatataatgattaatataaatattactttatttttaagtatttttttaaaattaatgccaaatgttgtctcaaaatgaatacaattttctgttaacattataaattcaaagctttaaaataataaaattctaatttttcattttaacagcataaattcatagttttcaattaaaaaaattttactttaattttttattttaattaattaattttacttaaatgatttattaattattttctcaggcaatgagtttgctgtactttcgtgtttcacgtgacatcgactttctgaagatggtttacaaggatgtgattgatagtgatttgtccattcgaaactatttgaaaatctgtgaagatgtgcacaatgaaggcatcaagcagccgatttccatttatcttcaacgatcggtaaaaatgattaaaattaataattaaattcaaatttttaaaacatttaaattcgctttttaggattatatggtccatgtcagcgaaagtgatgatggtgagaaaaaatatgagcttaaacaggtaaaaaaaaaacccaatgtattaaaaaagctttaaaacgttaaaacatattagtttattatctaaaaatttactaaggtttttaaaaacgaaaaaattttttgaaaatttttgatttttaatgatattaaactactaattaatatctataaagtgagggaattgcatcaatttatttgggacctttttgcacttacttcccaatttgatttgctaatgttgagtgagcggattggatttattaaacccaatttttgccaattttggaaagtcaattacatttcataatcctttggatgttatacatacaaatcaaaaataaacttctttttaataaaaataacatttctttttaaatatagattccataaaagtggcatttttctgaatttatttattttcgtattttttaattttttttattagattgaagtgaatggcggctctattggtggtgcaaatggcatcccgccacgcatcaccaaaatccatgaacgaatgttggaaaaagcgggcttcccaaatttcccagaggatgtgctgccgagaagcaccaaggcagagagtgcatcagcgcaaatgcttttaactgcttggtatgagtgtgttcactgctaatgaaaaaaaactcatctccaaatagctatgggagaaagattggccaattagtggtggtctaattaggacataatttcattaatatgccagttagtggtggtttaattagcacaaaaattaattatgccaattaatggtagtttatgacgacaaaaggtcattaggacaattagtggtctttaattaggacaaaaattaattaaagccaattaatgatagttttcttagtggaacaattaattaaaatgctcgtcaaggaattagttaggcttagaaatttatgatttagactattaaattcacaaaataacgccaatttaatcaaattaccgtcagattaacaaatttattggaatgttttttcataaaataaaaaatattttttacttttaaactgaaaatttttcatctggcactgcctaaattattttaatttctttcattttaaaaattacaggaaaaagtttaaaaatccaaaagcaattattgtttcactcgttgtaaaagaaaaaagtaaatggcacttctgcaagcgttttgacgagtatgaaattgaccgaattactaacaagaaagtgaaagtctattacttgtcaatggaagaagctgttaaaatgtaaggaaaaaatatttttataaattaattttttattcaaaaaagatttataaaaattaatatatttttttctatttgaaaattagatataaacaatagtggaaatattttactgtattcagggctaccgggggggggggggggggg

SEQ ID NO: 17214 - DNA, 4252 bp, Heterodera glycines
tttagattttttgttgaatttatttgatgatttattttctttcattttatttttttgttggtaaacttttggtgacatacatattttcaaataaattatttatacaaacatttaagaataaattaaattgttataataattcgctgcttattagaaaaaattaaataaaatatttttaatttttttttctcattcatttggttgtattattttatcaaaattttatttttaaacttttgattaggtagcttattttgctaataaatttttgttttcaaatatttcaaaaattaaaaataaattgatttgtaataattcaaaattaaataattcaaaaattgccatcacggctcagatgcggattagtgccatccatgaagcaattcgggacgacattagatgacgctgaaacagctggtggacgactgggacacggccacgggacgagaccaacacggacggacaccgctgcacatcgccgtggggaagggcgagcggaaccagagggggcgggaggttcaaacccagaaatttttttattaaaaatttcttcgaaaaaatattccaacataaaatttgtaaaaatcgctaaaaaattgtataaaaaattttttcggaaaagttttaatctctgtctcgggcttaaagaagtattggagcagatgagaatatccggctcggaaaactcattatacacggacaccaacaacaatttgaaaacgtaaataatttataattaattacatttttaataattagatgaaaatttttaggtattaaagtgcaaaatatgcttcgaaatgccaaacaaattttaaaaaattaggaaaaaaataggtaccaaaaatcctgaaatagatacgatttttgcaacccaattttttaaacggtaagattagaaatccgagcatttggtattttgtcgactcattaaaacattgctcataatttttttttttagaattttcataggtagtgcgcttaaaagtctcaatattgcgatagtttgtttactgttaagagaaaaatatactcttttgagtacattaaatggtgccgaattcaaacggcaaaatccgccgtggccatcgtgtgaaacccaagagaaagcgcaacagacagtgaaagatcattttgaggaaatggcagaatggatgctcagcgatctgctcaaatcatttcactcgagaaaaagattaataaaatatttgaaatggtcattaaaattgtgaaacaataaaattaatttttaaaaattcaaaaatcaattatttttcagcgaaattgcagcaaaaaataaccaatacgaaactgaaaaggcgtggaaaaagctggtcaatctgttcggatttgcacgtgctctacttctttgtagaacatttcggcaggaatttggcattttgtgtaagcgaaattagtggttcatttaaaattattcgtcaattatttactagggatgtcaattttatgtaaatacatttttttcctggcttctccatgctttgaatagtaggaaaaacattcttttttgtgttttcgaacaaaaattgggtcttttatttacatatttcggggttttattcatattttacttacattaaagacttattgttagaaaaattaagcaaagacaatggcgagacgaaaagtgaaaaattcaagggccgatcttggcctactgatgctgtacgcagtcaaaggagaaggaaaacaagagctattcggatgtgcatgatgattttttaataatataatcactcccgttagcccttgggaaaggcaattttatgaatatattttttattcacaattggggcgcaaatgtgcggggcgcaaatgtgcggggcgcaaatgtaggggcgcaaatgtaggggcgcaaatgtaggggcgcaaatgtaggggcgcaaatgtgcggggcgcaaatgtaggggcgcaaatgtaggggcgcaaatgtgcggggcgcaaatgtaggggcgcaaatgtagcagctccaattcatttactcctaggctcataatcaaatttttgaagacaaacgatcaattacggcttgaaaataacacagcaaaatacgttttttccaaaagaaaaatagccatttcgtgcttttgaactggacataaaatttgaattttggaaatgtatacttgaattatcacgtttatcgatatccggtgattagccattatacatacatacatatatatatacatatacccaaataatgatcacacaacggttttacaatgacaattgatcacagacaatagagcacattaggcacatatgggggaacaatatgggatcatttaaaatcatttctgatcactgtcgatgaacatcattgaagcgggttgtagagcatcttgttcttgtgctgtccggtggttgttcaggccttctgcgacgcggctcctccagctgccgacttctgcgatgcagtgcccaatgccgacgctcctccaaccggtgccgacttcagggtggttcctccggcggccgacttctgcgatgcggtgcccagtgccgatgttcctccagctggtgccgctgcggtcttctgcgatgcggtgcccagtgccgatgttcctccagccggtgctgctgccgacttctgcgatgcggtgcccagtgccgatgttcctccagccggtgccgctgcggtcttctgcgatgcggtgcccagtgccgatgttcctccagccggtgccgtcttctgcgatgcggtgcccagtgtcgatgttcctccagccggtgccgtcttctgcgatgcggtgcccagtgtcgatgttcctccagccggtgccgtcttctgcgatgcggtgcccagtgtcgatgttcctccagccggtgccgtcttctgcgatgcggtgcacaaagtcgtccccgtgccgggcgccgcgtacgtcgaaggaactgctaaaaatgggaatgaaagtattagagtgaaccaaaaacgcttccccgcccgcccgtccctctcctctcaccggccgatgcggtccccgctggagccaatgatttcttggaggcttcggctggctgctgtcccaccgcggaagttccaccagctgctgaagttccaccaggtgctgcgctctgtcctgtcggtttggcgctggcctccgccccttccggtcccgccggcatttgcggctcttccgtgttctgaaaatgaaaaagggaaattattttaaaaaatcagtcacgacagaagcatcgctaccttctgtccaccgccgcagcattgagtgatgatgaccaggcagacggcggcgacgacgagcatcagctggacggggagcaatgcgaagagcaccatggcgttgcgttgttgatgacagcagatgaagcagcagatgaaagtgtcgtgaatatatgaaatgagagtgatggaatggacgaatgggcggaaagcgaccctttatatagccaaaaaataaacttcttttccaataaaatgtttaactttaacatataacccaatcaacggggctatataaggaaggcatttccaactgtttatcgcagattaaaaatgtgcttttttaaaaattaagattgggaaccggccactttggcgctcaatttcacattatttgtgtttctccggggaatttctcgcaactagcgaatgaacccgtgattttttgttttattgtccaaattaccttatgaacccgtgaatttctgttaatttttacgttttttattgttaaaattattgttgaatttatttttaaaatgtgtattttacatttttatgctgaaatttaaaaagttgtttttactgtgatttttcatttttaacataaaaatttttgaaaatctgcccacagataacacacaagtatgtaccattttctttttcgattttcgacaattgaccaaaacaattaaaaagacatgtaaaccaacttgagaagcattccgatccgaaaaattatagagcttaacattcccatatttttccgtaaaaatgtccatttattgcctttgaattgaattcggcataaatgttttgaaaatttgcacttaatttttagttccttttatcgacatccgctgatcagccaaacacatacatacaatatacatacatatacacaaataatgatcacacaacggttttacaaatgatatacgtgatcacagacaatagagcaattaggcataggtatgtgggggaacaatacggggtcttttaaacatcatgacggatcactgtcgataaatatcattgaagcgggtt

SEQ ID NO: 17215 - DNA, 2364 bp, Heterodera glycines
cttccgttatcacccataggtaacaacggttccggtttttatataagacatcgcttccgttatcacccatgtaacaacggttctggtttttaaataaaacatcgcttccgttatcaaccataggtaacaacggttccagtttttaaataaaacatcgcttccgttatcacccataggtaacaacggttccggtttttatataagacatcgcttccgttatcacccctgtaacaacggttccggtttttaaaaaaacatcggttcctttatcacacagaggtaacaacggttccggtttttaaataaaacatcggttccgttatcacccagaggtaacaacggtcggtttcgttatcaaccataggtaacaacggttccggtttttaaataaaacatcggttccgttatcacccagaggtaacaacggtcggtttcgttatcaaccataggtaacaacggttccggtttttaaataaaacatcggttccgttatcacccagaggtaacaacggtcggtttcgttatcaaccataggtaacaacggttccggtttttaaataaaacatcggttccgttatcacccagaggtaacaacggtcggtttcgttatcaaccataggtaaccattggttccgttatcaaccataggtaaaaacggttccggtttttaaataaaacatcgcttccgttatcacccatgtaacaacggttccggtttttaaataagacatcggttccgttatcaaccataggtaacaacggttccagtttttaaataaaacatcggttccgttatcacccataggtaacaacagttccggtttttaaataaaacatcgcttccgttatcacccatgtaacaacggttccggtttttaaataaaacatcgcttccgttatcacccatgtaacaacggttccagtttttaaataaaacatcggttcctttatcacacagaggtaacaacggttccggtttttatataagacatcggttcctttatcacccatgtaacaacggttccggtttttaaataaaacatcgcttccgttatcacccataggtaacaacggttccggtttttatataagacatcgcttccgttatcacccatgtaacaacggttctggtttttaaataaaacatcgcttccgttatcaaccataggtaacaacggttccagtttttaaataaaacatcgcttccgttatcacccataggtaacaacggttccggtttttatataagacatcgcttccgttatcacccctgtaacaacggttccggtttttaaaaaaacatcggttcctttatcacacagaggtaacaacggttccggtttttaaataaaacatcgttccgttatcacccagaggtaacaacggtcggttccgttatcaaccataggtaacaacggttccggtttttaaaaaaacatcgcttccgttatcacccagaggtaacaacggtcggttccgttatcaaccataggtaacaacggttccggtttttaaaaaaacatcgcttccgttatcacccagaggtaacaacggtcggtttcgttatcaaccataggtaacaacggttccagtttttaaataaaacatcgcttccgttatcacccataggtaacaacggttccggtttttatataagacatcgcttccgttatcacccatgtaacaacggttccggtttttaaataaaacatcgcttccgttatcaaccataggtaacaacggttccggtttttaaaaaaacatcgcttccgttatcacccaccagaggtaacaacggtcggttttgttatcaaccataggtaacaacggttccggtttttaaataaaacatcggttccgttatcacccagaggtaacaacggttccggtttttaaataagacatcggttccgttatcaacgataggtaacaacggttgcggtttttaaataaaacatcgcttccgttatcacccatgtaacaacggttccagtttttaaataaaacatcggttcctttatcacacagaggtaacaacggttccggtttttatataagaatcggtcctttatcacacagaggtaacaacggttccggtttttaaataaaacatcgttccgttatcacccagaggtaacaacggtcggttcctttatcaaccataggtaacaacggttccggtttttaaaaaaacatcgcttccgttatcacccagaggtaacaacggtcggttccgttatcaaccataggtaacaacggttccggtttttaaaaaaacatcgcttccgttatcacccagaggtaacaacggtcggtttcgttaaaagccataggtaacaacggttccagttttaaataaaacat

SEQ ID NO: 17216 - DNA, 305 bp, Heterodera glycines
  unsure (1)..(305): unsure at all n locations
atcggttanttggtcattgtcaaaaacataggcgactttggacgaagcgacggaaccgtggggagtcaaagtggagagagtggaggtgaaggacgtccgattgccggttcagctgcagagggcaatggccgcagaagcggaagccgccagggaagcgcgagcaaaagtgggacaattggggaaaggggggaggggagggagggggaatgggaggggaagaggaagggggtcgagtttaaggaatgggacctggatggcaaaggtccggggaattgtaatttatgggcctggaagccgctcggaaa

SEQ ID NO: 17217 - DNA, 2170 bp, Heterodera glycines
ttaacttcatttccgtcttttcagcttcgctatttgccttttctcattcgatttcgtaagtttttcaatgaaaccaatgattttctttctttttttaattcagtgccgagaagaattcgaccattattttcccatttccgatcgatttgctcagttctctgctgcccgcccagcaatggcaacggtctgcgcccgcccctccggcgcccgtcgtcgccaatcccccgcagcaattcgcccattcgtcaaagttggctttgatgggggggggggcaatgccaatgccaacattgtgttctgtgtcagtgtttcttccggctccttttccggccctttcgccagttcgaccgttgttgacacgcaaatgaaaagtcagaaggcgcggcaactttaaaggacgaatcggcaaaagaaaccacacaattttattcattcattctgcttgttttcattttaataaattaaaattgcctgagagactgaatttccgagaaaatcattagcaaatggaccattgagaagcacctcattctttttttttatttgactaattaattgccaatatttccgtttcttcccttagcattcgtttcgttctcctcctctcctccgccccttctcaaatttcacccttcgaagaattaattttatgtctttaaatggtctcttaatgaatattccatcccattaatcccccccccccctcttttcccctcccttttccctttcatttgccccataagtctctgttttacttaaaatggttaaaagtgccttttcccctcccctcaattctgtgcccgcttcttcttctgatggtcatttctctgccgtttctttgacccctcaaaagccttctccttctgttgcctcagattcagtcactgcccgcaaagtttggcatttgattcggggaaatgctaaaaagcatttgttaagagagaaacacttaatgatatcagcaatggtttttagaaaagcatttaatccaaggacagaaaatgaaaattaagaatttgctaaaagcaatgaaagattttgctcaataaaaatttatcaattgaaaaacacatggaggtatttgagtttagagaaacaataaattatttttcaaaaaactgaaaatatttttagaaaaccaaaggtagtgaaagtgtcgttttaaatggcattttccacatttcactgggatctgcttttgtgccaagtttacatcaaattgtatttcctctccgtctctgatcgtttttatcttccttttccccacctttttcagtacatcggttcggcccttctcctgtccaacgtggtgtacggctccgtcctttacgctttgcatggtccgttctcccttttggtccaccaattcgtgcctttcttcgccgcttacgctttttctcttctcttggcacttttctccgtccgctttcatcttcccctgcttctcctccctcttctgatcactaccgttcgttttgctcttccgtccgttcgagtgcttttccctcccctcgttcaggtgcctttcgttgtggtgcctttgctgatcgcttcgctgtttctctcccaccatttttgcctgctaattcccccgctgttcgcccccctgcccaattcgtcgtcccccggggcggatttccctcccttccgttcgccgccgaattccgccgctctctccgccccatccgtcgattgttttcactccgcccgatttgttcccaattcggcagtcgtcactttctttttggcaattattttcgtggaaaagtcggccgaatttcttttctttctcaatttaaaacgcctttttttgcaaatttcaaaacagcaaaaaattgaaaaggaaattttaacggaaagaaaattggaaaaaacagacgcagcagaagagaaagcggacaaaaaagagcacggggaaaaacagaaggggaagaagcggaagagcatcttcagacaaaaaagcattgtggaagacagagaggaagagggaaggtcggaagaggaggaggaagaggaggaagtaattgggaaaaagggaacacaggatgatagagagagacagagggagagagagagagagacaaagagagagaccaagagagagagcggaagatgggaagtggcggaagaagaggaggtaattgagagaaaaggaaagacagggtgcgag

SEQ ID NO: 17218 - DNA, 3403 bp, Heterodera glycines
ggcttttctgcttttgctgttccgccaaatttttcctttgggtcggcgaccgtaagcagaaaaaaggggaattgtccacgggatacggtagtgccatttcgactcaaatcgcacggcaaaaagtggagacggatctgatcacggatttggatggagaggaggccgcctgagagagcagaggggcacaaatgattacttatcaaaatgacccaatgttaattaactgatcaaatagcccaatgttaattccccccccccccccccgccccgcgttttccccggctttaccttctccgaaaagtgtttttcccggtccttcaaagcgaactttgaccgcataacacgcgcccggtctcaaaggaaacgcgtgcgcaaaatgcacaatttgagtgggaaaagtgtcggtttgtcctgtgacgcgttccaccgaatgccattcgttttgttggcccgagggaatgtcgttgatggattgggtttttactaacttaaaatattggcacaaattagtcaaagccaagtttaccgacctccaactcaaagtgttccggccccgtcgccgcacttcccgagaaaatgccaacgcctgccaatgcgattccgggcccatcgacgcggaaagcgactgcgtcccaagcggacgcgtgccggttcccgcccacttcccattgtgcgtgggccgaaatgtgccgaaagcgggaaggactttgaaagagcggcgcagcttcgccaatcgtttttggctgggggagagctcggctgatcagacgatgggcgagtgaagtaatcagtcgctgtgccacggaaggcaaccgaagggaaatgccgtcgaagaggggcggcgtcggatgccgcgctccccccgacgaagtgatcggcccgcgcatcgtccgctcattttcgtctgcgcttatcgcgtcgtatcctccgtcgtctctgtccatcagttcattttttgaatcattttcattttccgtttcattagtcatttcgccaaatgcaatttcacatataaatttcaaaatgctcagcggcgaactttcgtcgtccgattgcccagcggcaaaattcgcattttcttcaaatcgccaaattctctccaccgcttcattcattcgtttccgtcttttgtcgccattttcattttcattggacgaaattcgaatgattgacaaaaggtccttaaaggaattaaaaggtcagttcaccagtaattagccaattagtcctttaattattcttttctcacattatccagccgactcattgaacacaaaacagcgaaaagccaccaatcgttggcttttcctttggcttttgctccgttttcgttgttccgtctgagctgttcgacgagacgcattcggaccaatgccgaatttggcgcaaattctctggccaaaattgtgcatgtcaaagcggcctccgccgttacaaaagcggaaatgcgatcctttgagattatttatggattaaacaatgttttgagaaagtcgcacttgtccatgactttttcggcacaaaatgcctttgagcaaccgatggaattcgaccatttcctccgcgttttttcccgccgatggaatgcacaaaaaatgacggatcaatcggattgacagcaccgcgacgaatgccgccctctcctggcgccacaaggcgtcgcaattgatcagttcgtccgtttcctcggcccccgcgcggaaagcgccgtccaaagcccattcaacgattagcaacagctgatggatgccggacatacagaatttacggaagagcggacaaagcgactcggccaaccgatggtcattgttatcggtcgcgaggtgaactctctctccgtaaaagggagcgtcgcccatattttttggacggtgccctcgggcagcgacatttccgtcgccttcgacttgtttttgacagcgttcgtcgccgtccgtcgcaatgggaaggaagtacagctcgggaatctgtcccacctcgacgttggttccgttgttagacagttcgctggtgcggaaacggaattccgcgcagcatgcctcggaagagtcctccgcaccgccgcatatttcaacgcgcaccgtctcccgtcctcccgtcccgcagtccgaactcggaccccttgacaaattgggggaattaacggtggactgatcggtgatcagtcccaaaatggacgcccttctcactggatttgcacccatatcaagtgccacacgtcctttatgatcgcaattggtcgctccaattggagcgtcgccgtttcccttgtgccgcattcgtaaagcacttcgtccgtctcggccagcagttccacgcactgctgctgtgcctcagtgccgacttcgtctttgtcaatggctctgtacagtttcagccgcgcggtgtattcgccgcgtccgccgaacagtccgacgccgcaaaaagtgatttcgcaactgagaaagagccgaatttgaatttcaaaagaaactgaatgcatggatttggttggcactttgtcataaattggatagcctccacacaatgggccgaatatccccaactgccgccgaagttttggaagcgacggaccacgcgacagttccgaacggtgttcgcacttcgcgtcactccgtccgaattttcatcggcgttttccgagcccaatccatcaaattgcacttcatcttcggcacattgttcacttccattcggcatttggtgaattgcaaggcaaagggaataaacgatggaaaggagaaaaagggccatttgggcatccgaaaaacggactaaaagcgaagacgaattagcatgtcaaactgatcaaattttcattggtttgccttggctaatttcggtcgatccttgctggtcaaattcgcattcgtcctccattaacgatggcaccattagctcagtacttctgagaatcatttgacgatgtttggcgaggaaaagccgattctgatcaaaatggacgcctttctcagaagcgtcggataaggcaaaaacacgcatttggacggggtcataggcccagagaaggctcaaatggcgaggatcgaaacaaaaactaaaagaggaagcatttcgaaggatcggtcagttggatgcctttgcttcacctgcacatggccaactccaattcggcactttctctgtgttgcgtttgccaatttcggtgcctaaatctgcccatttccgtccttccgatgcccgtggcgatttctccacagttgcttcgacgaaccataaaatagcctcgagtgccgtttttctgctgctgttgtgccctcccagcggatggcaaaagcatcaaaagatcgcccgaggcggtgattcgcccgtcggccaattccgcgcgagaaataagctgacgctgcacttggaccaccgtgcggtcgccctgcgcactgac

SEQ ID NO: 17219 - DNA, 1688 bp, Heterodera glycines
attcttatgtttagaatttgttatgctggtcagtccatatttttggagaacgttttaaagaacagtgaaaaataacggattttatttgattacagttttcaatattcatagtttactaattatataatatgtataacacaaacataaatttttgaattcataactctatactcaaccatatttttataatggcacttttacgaaacgcccatagtggcactttttacgaaacgcccatagtggcactttttacgaaacgcccatagtggcactttttacgaaacgcccatagtggcactttttacgaaacgcccatagtggcactttttacgaaacgacctagcaccgggggagggaggatagagcgactgctgatttaattggctcagttttacattggatgaattatgtcacattataaaattatcaattaattattattacctgcacacctgttgggcaatctaaacaaggaaaatgattagccacttgtttttaaatttcaattcctcttacaataaaatagtattaaaaaacaattaaagacaaattaattaattacctgatgggcctaacccaattaataataataagttaattaattacctgttggacctaacccaattaataataataagttaattaattaattaattacctgttggcccaacccccaatgacaagcgtccaacagaacagtcaaaggggtgaagaggaaatggatgagtctaaagaagatggatgacaacttatcagttaatcctatccaaattaaaaattttgttttatgcggtaattttttttaattagagaataattaaggaaatgaatcccactctgggctggacggctcgtgaatgtgatttttgagttttgcctgacaaaaaaaaaagaaaaattctttttaaaaatgcaagaaaatagggcggcaccaaaaggttgaagcagagtttgaatttttgaaaaatgtccacaaattcgtcctgggtcggcatttgtgagcgcaaatgcaaaatgccattctgagccgcttttgctgcttctttagctaaaagaaaaaattgaaatataatttagaaaactatggaaaatttaaaaaataaaaaaaaatccgcaaaaaatttaaacaaataaaattggccacagcaataaaactataattataaaatgcacccttcttgctcttccgctgtttgccgtcatttttttgcatttcgagttccctctgtgccaatgccaccgactgaaccctggccacaaagcgttcaatgtcatcaaaacaacggttcaatgtattctggatataaaaatttaaaaaatttattaaataaaaaattaaaatagggccccataccacgtccatttcgaagtactcaacattgtttgatggtgaatcgtgtgagaaatggccacggggcatttcattcaaaggatttggataaacggaggctggaatggacaaaaaaaaggaagcagaacttgacaattgttttaaattttccaagaaacattttaaaaagtgaaatgatttgaaaaatctatttttttagattttttactaaaaaaaaaactttaaaaaataattaaacggaaatttttttaatattttaattccctatctcggttcccgaatctcggaattacaactctcgagcagccatagaatgtagccgaaaataaatcaaata

SEQ ID NO: 17220 - DNA, 2241 bp, Heterodera glycines
  unsure (1)..(2241): unsure at all n locations
attaaatttatataatttgcnaatagcgtcggttattttactcacagttatacaaatcttcggcaacttcgcctcccaggcacattgatacactaattaagcaaaaatgaaatcattaaataaatttcatttttttaaataattttaaatcgtatatagggaagcaaaatcaaattggtgataaatttctcaaatttcttcaaattctcaaaatataagctaaacttttctaaagggctaaatatgtattaaaaacattttattagaaaatgaaaaaaaatgtatctaaaatatagatatgaattttgaagaaaatcaagtagaaaatccgatataaatttttattagagtgagccgttctaataaaggactttttttgaaaaaaattcctaatatgcacactaaacctaattttacgaattgggaaatttatgccagattggttatttgtcaattttagacaatcggtttctttggtttttaatttttccatttaaatttaatacatacaaagagtgccgtgccagtatagaatgttcattaattaaaataataaccgaaaatgccacctggaaaatgtgaagttcggtgggcacagtgccaccatcggaaacaacatgttccagcacaataaatactgtaaatcaggatcagtgattaatgatcaaattgtctaatttgttgaatttgatagtgtgtacaaagcatgttattgaacgtgtcacgcgggtcggacgatgtgtgcgcggttgggtcggacaccaaatccatggggaattcctccaccaaatttccgttcaactcggacaccgaaattcggttggggaaaagcgagaaaatcattggcacggggctggaaattttgttgaaattttaatatgcgggaaaaattaggatttttgttgatgccgttaattaattactgtgcgattgaatggttttaggaaattagatatacaaatcccgctgatcagtagaaaatgaaagcattgtactcaagaaaaatcagttaaaaatttatatatccttgaaaaagattcagttttgaaaagaggactaaaatgtccttgaaaagggcatagtctcggtgcatttattatccttgaaaagggcacaatcccggtgcccttcccaagtgaagtccaattgtccttgaaaagagatttttagtcccagctctgtccttcccaattgaatgcctccgtaaccaaaatcataaattatatataaattaatttaaaaataaaaaacccaccaaatggcactgttctgctccatttgcttaagtttacgcacaccgtccgcaggcgaaagcactgagaaatgacttccaacctgacaatatgttcacaacaataacgaataaattttttgaaatccaatggcaaattcatattttggctatcaaaaattaaatttaattgctaacaaattggttaacattaaaaaattaaaatgtaattgaaaaaattggttaattatgaattaaattaatcgatagaaatggataattaaaaatgaaatctaatagaaaaagttggataataataaaaaataaatttgattaataaaattaggtaatactaaaaaaaaattaaatttaaatgataaaaagttgggtaataataaaacttgaatttaattgataaaaatgggtaatactaaaaaaattaaatttaattggtgtataaaaagcaccgcaaatgatgccaaatgttcaacattatatgagggtgccgaatgatggttgtggtggtggtggtgattttgatgcatggcattcggtggtgcactgtagtcaaaatcgccagttgcagcagttgatgtgtgccgacggccaaagccgccgtttgacgaagggccagaaaaattgttgttggaagaagactaattggaaatgaattttaaaatacttattaaaaatttaaaattacggattaatattttagcaattctctgactattaaccactttttgatataaaaatgaatcaaattttacaatgaaaattagtgagttttttgagaaaacaaaactcaggattacaggttacggtttttaaagctttccctaattaacgggttattaattcgtaaatacggttacggatttttttaaagccctcagtaactacggtagcgatcaacaagaaaaacaaaaacatctttaagaatgggtgcatgtttagtaaaattactataaattttttttaagtcctaaatggcttctgatcctacctac

SEQ ID NO: 17221 - DNA, 2480 bp, Heterodera glycines
ttatatgtatcaatcacaaaaaatgcttatgcaatcaaatgcttccaagttcaattcaaaacaaaatttgtcatttgtttctctgcacatttttatccactccgattttggaaattcacctgactaaattccgtgcaaaatcatttaacactcaatcacctgatcattctcgcgcccctcctcccaaattcgcttcaaaacatcgccatttcgtccccactgtcatcgtttatcattcattcgtcgcatttatcagcggagtgcacccactccttctcccccccccccccctccttttgaccaccaaaggcttcgtctgttcgagccaattgatggccaatgttttcattgcctttccttccattttatctcattactccttccttcgtctttacaattagccgtgttccttctttcgtccttctaattacctgtgccatcaacagataatataacacagcgtcccatccttccgtcgtttccttcccctcgtctcttccattcccctcgtctcttcgcttcctttcgtctcttcccttcccctcgtctcttcccttcctttcgtctcttcccttcccctcgtctttcttccattcccttcgttttttccattttctcttcccttcccctcgtctcttcccttccttttgtcgtttttcattcattttctcttccattctctttttcatctgtctgtgtgtttacatttttcttctgtgatggatttaaagagaaaagaatgaaattaataagtaggtatatatacaacgaaggaaagtcacgttggaaatgacggagggaaatagggggagagagaggggggaaataaaaggaaaggactaaggacgaaaggggtgcgaagagccactgatgaatgaaatttatttattgctcactgtatttagcataattaccttttcagtaaaaataacggagcaatgagtcacgagaaaaaaaagtccaaaataaggccgtaaataagggcgaaaataaggttaaaaaagttccaaatttaggggtgtaattttttaaattgctcttttttatatgaaataatttcagactaaggcaaacaatctatttttgaaaaatttagtgtcgattcataggggtatatttttctgaaaattttttggttgattcttaggggtatatttttcgaaatttttttgagtcgattcttaggggtgtatttttcgtttttattgcattttttaaataaattttggacaaaacgccaaaataagggcaaaaacttattttaagggcgaacaactaaaagttgtaatttacataaattaaaccaacaatttattcctctaccacttcattaagttctatttaaaccatcaaatgctcgaaaaccaaagttcaaaattaataatgatgggggggggggggggaaaggtcaatatatatgtacgtaatataggtaataattattatgaaattttaaattttaactcattaaatttagaggaaaatgtggcgtgtgtttgcttaaaattgttgttgtgtaagagaagagcgagagatagagagagagggcgaaaggggagagagagagagagggaggggaaagaaaggaaagaggagggtaagggggagagagagggaaaaagaggagagagggggggggagacttgaatatgttaatgtaaagaattactgaatgtacggctaaaacctttccttttttaatggcgagtgcgtcatcatatgaagcaacgtgtgaaccgtgggccaaatgggaagcaatttaattcatgtttttttttggaaaaaaagaaatgtattttggtaactgtttgtttttttgcctttctttttattcttggccaaatatttctaaatttaccaaaaacacgacgagattagtacaaggcctttctttgcaaacggaatggagccaagcaaataccaaataatacacgcaaaactaacacaaactaaaacattgaaatttagccatgccccaatatttaaaaaaataaaatagttaatcgaaataaaagcatcacaagacacagcgacaatgtcctcaaatgcgaacgaaccgattcatagtggtcattttatgacctcaaatccacactcggaaatcccaccagatgacgaggacgaagatgttgaggtttgaattcatcttcggattattcgagtaaacgccaaacccctaaaaaccaaaggaaataatattatttcaatcgtaaccaatttgaagtttcacttcacgattccacttgccattcattttaaggtcgatgttgtcgatgtggacgacgccaattcattgtcagccgcgcaaactgccgacaaaagcacggccaaaggttcgctactaaaagacgaggacagaccggtgaccttctacaaattcggctctcaaaaaacgcaatcgatcgtcatcgaccaatcactgaacaacctgcctcaataaagacgggtggcctacatgaaaatgacaacgccaataatgg

SEQ ID NO: 17222 - DNA, 1139 bp, Heterodera glycines
tttttgctcaatggaggaaattgccaattttgcacaggaaaaaagtcgtttttgttatcattttatttttcaatttaaatagtttagctcaaatttcgtctcaatgcgacattaactccgaatttaacgaattccttacttttgagagagcaccaatcaattctgacccgtttgaatggtggaagaagcatggaccaaaacttccaatgttatcaaaattggcgatgaagtatttgtcagcccctgcaacaagcgtgccgagcgaacagactttcaaagtggcgagggatgtttatgattatcgacgttcgagattaaagccgaaaaccgcagaaatgttgatatttttgaacaaggccatcccaatgttggactacaaatactgatttaattttgttggatgataaaaagttcataaaattttccataaaattttggtttagaacaaagaaaagaaattacgcaatttttttatatttataaatgcatttttaaaatttgaaaaaagcccggtcccgtacgggcgcccggtcaaaattttggaccgggcccgggacgcccggtaaaacgggctttttttgaacgggcggcccgccccggtcaattttcgaagcccggtcccgggcccggtcccggtaatttcaaaattccggtctctaataaatatagcaaattttcgattttattttttggccaaaagggcattttacatggcaataacgtaaagttatgttaagcaatcaaaaaaataattaataaaaataataaatttatttttccgaaaaactttttaaatttgtaaatttttatttattagtagggctgggaataaaaatcgccaatcacgaaaaagtcataaaaaacatcaaaaatctcgaaaaaaatgtaaaaaagtcgtgaaaaattaggaaaatgtaaaaaagaataccattattgaaacaattatagaatagcattttacaaaaacgattaatttcggttacaattttccaaatttgtcatattaaaacgcattgtaaaatgggacatggaattgggcaagacttcaacaaagtaacctttttgtcgaaagaatcggactgaaccgtcgtctctggactgggatacagcgctgcgcgctttttgagcttcgctatctc

SEQ ID NO: 17223 - DNA, 1766 bp, Heterodera glycines
  unsure (1)..(1766): unsure at all n locations
cgttttagtcagggtgtcgttntagtctggttagctgttttcacncacaaattaattactttttataaatttcttttgtttgtcaatcatatacataaacataactttaaaatgtctgtttagctacaaatcaaatggaaaactccaatcaggaaataaagacaaagcgaaacaagcagaagctggaacatgagggtgcactttatgttcttcaccaactcagtgacgatggacttcggaagtactggcgatgcgagtttttcgggcctaacgacaaatgcaaaggtgtatgcaaaaataaaataaagactatttttcaaatttagggcgccttcacactgatattcatggtaatgtcctcaaaagttcatggacaattacaccggaaggccgtggttcaatggtggtttgacagtgccacggttcgcaccggaagaatggagtgtgcatcaacggacgttggatggaggagacagaaccaacaattacgcagaagcattccatagaaaacttcaacaggcatttgattgtacccatccaagtgtcttccacttcatcaacacaattcgatgtgagcaaaagtcaattgatgcattttgttctccctcttcaacttaccgtgtccttccaccgtacactgctgctgtttgccctctaccgtatactcctccccaccgatgtcaccgatgacaaaaaagcgcaaaacatttccctccgcagaacagccataattttgcgaatttgaaacatttgtgcatttaaagccaagttgattttcggggtcggcaacagaagaatggaattgaatagaaaatgccaaagcaatcgaaatgagaaacattttctaaaggtaaaaacaaaattattattttaaattatgatcaaatttaaatgcaaaatgaaaatttctgagtgaattaattgagcagtgatagccttttatgcagaattttctacttaatgatatgaagaaatcctactcattgacgtaatgctgagctgatcattgattggaaaatattatttaagcattatttccataaaataaagatgaattattactatttctgtgaattattactatttctattgctagaaataaatgcagaaaaaataaaatatagtgaatttcgatttttttaataaaagggcattttcatggcaatgatgtaaagcaaatgttaatagcaggtgggaataaaattattttttaaaaatgataaatatagcaaattttcgattttattttttggccaaaaagggcattttacatggcaataatgtaaaggtaatgttaagcaatcaaaaaaaaataataaaaataataaatttatttttccgaaaaactttttaaatttgtaaatttttatttattagtagggctgggaatttaagtcataaaaaatcgccaatcacgaaaaagtcataaaaaacatcaaaaatctcgaaaaaaatgtaaaaaagtcgtgaaaaattaggaaaatgtaaaaaagaataccattattgaaacaattatagaatagcattttacaaaaacgattaaattcgattacaattttccaaatttgtcatattaaaacgcattgtaaaatgggacatggaattgggcaagacttcaacaaagtaacctttttgtcgaaagaatcggactgaaccgtcgtctctggactgggatacggcgctgcgcgctttttgagcttcgctatctcggtaagctattgggttgtgaaagaggtacaacccacgggtggaagtttaaattaatt

SEQ ID NO: 17224 - DNA, 3688 bp, Heterodera glycines
aaaaaacggcggacggaaaaaagggaaacaatgaaagggggaggaatttaccagaaaagagaacatttgtcaattgtaagcaaagtgcaaaagaacggagaaaagagagagggagagagaaaacagtacagggaataatgatacagtatatatttattacacattcaaacgcttgcggccaaaacaaaagtcagacgatcggttttgccagtggcaaataatcggccaatgccttacgaagtgaaaagtcggggccaaaagcgaacagagaattctcatatttgtgaagaagttcggtggcagaagggctggaattcatttattaactactcctaattaactaaactaattgcccctcccttttgtattattttgttttgcgttttcttcactcaccgcctctgttccaacacttcgcccaataattcgtgcaattcctttgaaaatgtccgccgcccgaagcactccgtcccctcacagtgtgtcgagtccaacaaaacgggcgccgatccgctgagcttttcgtacaaaatgcgaaggggttccatttcttggaagggcacgacgccattggccaattctcaaattcaaaaacatgacacacaatcattctaatgattttgcgaaggattaccgcaaaggcatatcccaacgctgtaaatgtcggaatcggcaccgtatccgttgaggtccttacagtaagcaatcaacgaaagaaagaatcgccaatgtttccccacaatttcactgtgcccacctgcattagcacttccggggccaaccaagcgaccatttcactcaaatccgacgtgaattcgtgcactctgtcctccacaccgatcctttgaatcaattggaaaaataaaaaatattacgacggatttattaccatttgggacagtcggaaattcgggtggcatggcgagtgagcgcacttaaagcaaaaaaaggggggataaagaagggattggcattggttggactcacagacgaatttgaccatccgagtcgagccaaatgttctcggcacaaacgctccttcagagagaagagcaaacgcataaaaggaaacaaagcgaagggaagggaataatgacctgtgaatgaccccgcgcgagtggaggtgttcgagtgcgtttagcgtcgccctgagaatgacacgaagcgccgactcgggcaaaccctcggaataaaatgcactgagcaaatgggcacaatggccaagatcggcacggaaggagcagcggaggaaggtgcgttcggcatggacaaaggggtcgcagaaaaggagcagagactcgtgggacatggacaaatgggcgacgattttggcccgtttcttcaatttttcagttccgagcgttccatggaatttgcgtccacctttgctacgacggtggatgcgctggcggggcccaactcagccaaaagtacgcgacgccccgttgcagcggaaacgccccaaaggaaagtgccgagccgcgcttaaaacgacagagactccaagacggaatgaacaaatgccgcattagggcactttacccgggttcttcggaacagagacagtgccagacgctgaagagttgcccatcgttacggcatcagtgtatggcatttatggggccacagaaaaaagaggggaaaaatcgcaattggccaaatgtaacaaaggaagccttaacggttaattatcattttattttctcgaaaatcaattttataaaattaaatgatacacaaacaaaataaaaaaatctatgaaattcgtaagcaaaaaaattgaacgccaaatcagccataacaaatttacgaacaaaatcaaaatgtctctcagagacgagcattggaattgtaaaaatggcacccaaagaaagggcaacacacaattttattaactcattcagtgaaaatgttcataaatctctcaattcaaagaatctccatatttgaagaatttgtaatggtgcaaatttttggtttttctttgtgcgccgattctttggaaataacacaaaaaaggaaaatgaaagattagcttcgtaaaccggtagaaaggagcgcaattttggctgaatgggctacaaaataaaagtaaatgaaatcaaaattcatctagaaaatactataaaaatatgcaaaaatggaaattttgcagaaaaagagacagtgaagtcacaaggaggaaagaagacaatatgaaccagtggaagacaatgacagctaatttagccattcttttaatgagtaatcacttatcaatggattcattccccgccccccgcaatttgtcacgagacggggacgtccttcagcttggcatccgtcaccaattcctgcataaggggcaatgccgagactgtatgggcgaggagttgagccggagcattggcggcgttggacggtcgaatgattgtgcaaagattgggctttgccgagtcacacgcgacggtgtaagtgacattggaaggcgatctgagcaaagggaagtcaaaagcaaaaggaatttggaagggcacaaagggatcggaatgttcagttgtccgacgggcaacggcggcagctccaaattccatccgacggagccgaaactgtgctccgactcgtcatggccatgcagcacagaagtggccacggtgaaggagacatggctgaaaaaggagagaatttggaggaggtgagaagaaaagtggaagaaaagcaatgggaccaaagggggggggaaggaaataaaggaaagaacacacactctaaagaagtccatccaaactgagtttattcgatacgaataacgcagatgggagtccaaaaataaacggataatacaaagcataacagaaaagttaatagagtaaaaagaaaataataatggaaaaattgggggggggacaatttgatacaaatggaggaaaatgaaaagaatggataatttgagaaaagcgaaaataaatgaataatttgataaaaatgaaaagatgaataaatagagaaaagcaaaaatgaataaatagagaaaagcaattgtggagatgaaaaagtcagtgggaaagacatttctgctcgaggctttgacttcattgaataacattctcacggttttctaaaattgttcaagtaaagaccatgaacaacaaatacaatatgaacaaacgattgtgagactgagaacccttacgaacgaaggcttaccattccgaatcgtcctcttcagcggtcgttctggaagagtgacgacactttttgtcactgacaattgaaccatcattcgaatgaaacgtaaatttgtgaccaaccaaaggctaccaccggacacaccttttgctgtgctcctcctctgattcaaaggacgtttcggactgtttttggggagatttgccttcagatgaagccgtggcgttggcggtgttaaaggcgttgatattgtagaagccggccccactcataaagccaccggattccattggagaagtcctaaaagggaattgtgcaaataagtcacacccaagataaacagtaaccaatttgtaaattgggagatcagaagcggtggagaaccaaacggcggtgtcgagccgtaaagaaagaccggctgaggttggactgggattggaaaggctgcggaggtggccaccaaacgagtgttggtcggactgaattggtagttgggcggggaggtggagaagggcgagtc

SEQ ID NO: 17225 - DNA, 874 bp, Heterodera glycines
tattttaatgcgtgtaaaaaagcttggctgatgggcccaccctctttcttaatagccgcaattacctgctggtctcaaatgtcggtgctagggcgaagtgacaaaagtatcaatgattgaaatatttaaattttaaaaaattatattagttgtttctgaaaaatattactaaggaattaaatgtcaatttttattgtcataaaaatacaaggttgtttaaattcacgaaaatagttcaaacttcaattcattcataaaacccttcatttgattagtagggctgccaaaaatatgcaaatgcatatttttttcctggcttctccgtgctctaaatagtaggaaaaacactttttttttgtgtttgcgtataaaagtcgggacttttatttgcatattttgggtttttatgcatattttggcttgttttacattttcatgcatattttgccattttttgtgcatattctcagatttttttgcatattttgccatttttcgtcaaatatttttcgatttgaatatatcttagaaaaaaatttgattatgcttaaaattaataaaaattttgaatggatgcgcgagtgggtcaacagtgaattccatgcgaaaaattgaaaaattttgatttgaaattgcaaaaacaaccgataaatttatgaataaaaaatttttttttattactaatttgcacccctaatttttaagtttttttgttcatatttggtgcatattttggccacttttcgtgcatatttttggcagccctattgattagatagcccaagacttctctgttattctgtcaaatttcaaaaaatttattgagtttaaaaaaagttagtgtcaaaattttgttacaattttgtaaaatttt

SEQ ID NO: 17226 - DNA, 1768 bp, Heterodera glycines
atttggggttgactgtctccgggcggtccctcctcgtccgttccgcgcctccgtttgccgcgttactcgtcggactcggactcgccccgtagccactttcatccgttacggcacttttaaataaattaaatatttaattcgaaaatgcctttaaaatataaagtgattttgtgtaccaaatctatcttaatttagttgttcgaaaaactcttttatgtttttctttgaaattgcaaaagattaagaaaattataaaaataaattctaaaaattaaaaattctctttttttaatttttgccggaagggcgacgatttgccggtaaaccggttcgaggcgggggggggcgggtttggaattatattccctacaatttcgttttggcatttttgttttaaattaaaacaggtttatttttaatgatataaaattaggaccaaaggtttttaaacgaaaaaaaataaaaacttaaaaaattacctattttacatatttcttaattaatttttgataaaaaatgctctcaggttcgggtcactaatgaaggcccatttccaaaatgcaccccgttgtccgattgttcggagtgaccaaaagcgtcggctgcccatagattcgcctggtcgacttgtaaatgtactgaaaagggactgtcttcaaaaagcatgaatggaattaattgagccaggtccctcccttgttaattaattgattgtgagcgtaaaagtggcacttttcgtgccaaacagagtgaaatgataataacggcacggcttactgacgggattgtcttcggctgaccagtaaagagtctgctcctcaattggccgaatggcaatttgctaaagggtgccgaaattagaagaaattagtaatcattaggctgccaacatgtaaagcggggctttggtaggcactgcccaacaaagtgccgtccccgccgttgcccatccaatggcattcgtcagccactgagggactcgaatagctcaggtaactgatgccggcggtgccatctctgccgacgacggaataaatttggcgctgctgctgctctcgccagtgattaagcaaatgcaaagagctataattaggcaaaataatatgcaattataactcaataggtttttatttaaaatgttaaatcgcttagctaaaataaatttataaaatttagcattttaaattttcaatacctaatcaaatctgaaaattttaaaattttggtgatgattcgaaaaaataatggtgaaagttgcgcaaaatcaccgaaaatgattaagcaaatgcaatgagctataattaagcaaaataatatgcaattataactcaatagatttacagaaaataatgaacttcttaaaattgccaaaattgcttagctaaaataaaattattataaatttagcattttataattttcgatacctaattaagtcttgaagatttgcaacatttttggtaatgattcgagaaaattatgatgaaagttacgtaaaatcaccgaaaaatgacgacagtcccaaaaatcacttggagggcacacgcgagggcggaggcggaggcgaaacaaatgcccaaagtgatcagagtgcgttgggcgatgttcagcccaatggccagccgagaattgagcagaacttgctaatcataatgaatcagagaaggaaaattgaactgattaatagggttggcaattttatgtaagaaaatttgcaaaaaatgaacataaatatataaataaatttaaaatgggttttttttttttt

SEQ ID NO: 17227 - DNA, 1565 bp, Heterodera glycines
  unsure (1)..(1565): unsure at all n locations
attaattttcaacgttattttcaattaataaatggaggctttaaaattaatttaataaatttataattcatacaattttcatcactgttgaacctcttctgatcactattgtacctcttttaattcacttttgtacgtcttttaatcacttttgtacatcttttaatcactgttgaacctcttctgatcactattgtacctcttttaattcacttttgtacgtcttttaatcacttttgtacatcttttaatcactgttgtacctcttttaatcacttttgtacctcttttaatcactgttgtacctcttttaatcacttttgtacctcttttaatcactgttgtacctcttctaatttaaaaacgggcgcgaagcgcccgtctgagctcaaaaaaataaaaaacgggcgcgaagcgcccgtccaagcacaacaaaatttgaaaaacgggcgcgaagcgcccgtctaaggccgagaaacggcctaaaaatcccagataatcttttaaaaattccaaatctcttcacaacgcaatagcatatctaggtagcgaagctcccaaagcgcgaagcgctttttcccagcaaaaaagccgacggttcacgcacccgctagttatatatacgttagaatgataaggcaactcatctcaaaaactaattccggccggccgaaggccggccgtggtctgaaagtagtggaagggtcttacaactttttgaggagaattcgggaaaactataggtttttttctccgagggccaactgagtcccgtcggctaatttctcacttttgcttgcgtttgaaggcccataactttttttctaaaactctaatcaaaaagtttccgctggtaggaacccaagttgaagtgttttctaaaagtcaaaaaaaattccaggcctctacctacagtaggaagggctgcagaaattggcaacttttcagtaccaactttgtccacttcagtcccaggcgaataactcgccagggtttgaactgagcgagggggtgccagcagacttattgtagagttcaatgagctggatttttccaaattttaaaatttcgaaaattttcaaaatttttcgagctaggcctaaaaatcggttttcgggtttttgaattttaggattttttaacgaattttcccagaaaaacggagaccactttcaagcaaccgtttttcgagctctatcgattggtgatatttttganaaaatttcgattttttcccgcaaatagaaaaaatttttggcctgagcgggacatttgagtcctgcgctcataactcgtcagggattggttttagcgaaaaattgtcttagacatttttgtagaactttttagctctatcgaatggtgtactataagtctggaaaatttcaaaaatttcgagctaggccccctaaaaattttcaaaaatttttttggggccgaaaaaggggggggaaaatttttttctgggggatttttggggggctgaatccaaaatgatggttaattttaagttccggaaatttgggaatattttaaaaatttctttattttttgggaaatttttt

SEQ ID NO: 17228 - DNA, 1757 bp, Heterodera glycines
ttttctggggattttggggtgctgaatacgaatatgatgtttattttaagtttcggaaattttggaatattttaaaaattctttattttttggcaattttttggccctctggaatttgggcgaatattggaaaattcataactcggtgatggtttcatcgatttaactataataaagctttaaaaatagagaaaaataaggagaattttatgggatttatttgagttttttatcacaaaaaagaaaaaagttattccagaatttctggaaattttcgatttttcagaaaaaaatttgtagctgccttctgaaaagctattcgggaaaagtaaaatactacaaaaatccgcaatttttttctctataatataaattttattttacatttttatcacatttttaaaaaaagatacaaaaataaaagtgattttgggattcgggaccaaaggggggtgacaggatttttgagtggaaaatttttttttcacaaaattcttccaaaaatatgtctttaggggttatttgggccgctgatcacgaatacgtgatcagattttacttttgacatagtcaagacctcagaatccctgtgtgattggggattctgaggcatcattttgaggggggggggggcaggttcggatccggacggtgtacattaatttactatgcattttttgcttacttttacattttttaattaatttgaagattcgttttaatttatttaaatttatttttttttaaattaaaaaaattattttttgtttttattaataacaaaataattttaattaaatttaatttttcttttgatgaatagatttatttttaagcaaaattagatttaaaaatttggttgcataataattcatttcaaaacaaagtaaaataaattattccgtttattaattaaaaataaacttttacattttttattatttagttttttttaaatttttaaataaacctaattctataaaattatatttaaaattatgaaattatttttgtacatctcataaaaagttagacttttgtacctcttttaatcactgttgtacctcttctatttcctgttgtacctcttctaatcgctgttgtaccacttctaatcactgttgaacctcttctaatcactcttctaaacgctgttgtacctcttctatttcctgttgtacctcttctaatcgctgttgtaccacttctaatcactgttgaacctcttctaatcactcttctaaacgctgttgtacctcttctaatcgctcttgtacctcttctcatcactgttgtacctcttctaatcgctcttgtacctctctaatcactgttgtacctcttctaatcaattttgaccgcttctatttactgttgtacctcttctaatcgctcttgtacctctctaatcactgttgtatctcttctaatcactgttgtacctcttctcatcactgttgtacctcttctaatcacttttgaccgcttctaatcacttttgaccgcttctatttactgttgtacctcttttaatcactgttgtacctcttctcatcactgttgtacctattctaatcacttttgaccgcttctatttactgttgtacctcttttaatcactgttgaacctcttctaatcgctgttgtacctctctaatcactgttgtacctcttctcatcactgttgtatctcttctaatcactcttctaatcgctgttgtacctcaaaatttaaaaaacgggcgcgaagcgcccgt

SEQ ID NO: 17229 - DNA, 2819 bp, Heterodera glycines
tagtcagcgtagatttcctacgctaggtttttcaaaatgatccgggaagcgatttctcactcccttttatagactttgagctcgagtatgataactacattagcctagtgtaggaaaggctagtgtaggaatcctacgctatgtcattagtcagcgtaggattcctaccgctaggtttttcaaaaatgatccgggaagcgattttccactcccttttatagactttgaaggtttattttttttatataatcaacacaagtagaaacagtacaaatgcagaatctacactctacactatagaacactctacactatagcacctgtaaaagtgactgcggatgtgcaatttcgctgcgcttatatagactttttgagagtagtgtaaagtgtagtgtagtgagtctctacactatagaacacacctacactctacactatagaacactctacactatagcacttgtaaaagtgactgcggatgtgcaatttcgctgcgcttatatagacttttggagagtagtgtagagtgtagtgtagtgagtctctacactatagaacacacctacactctacactatagaacactctacactatagcatctgtaacatagctgcaatggaataatagccaaataatatgcagggaaataatgcatagctgaatggaataatagccaaataataggcagggaaataatgcatagctgaatggaataatagccaaataataggcagggaaatattgcatagctgcaatggaataatagccacatattaggcagggaaataatgcatagctgcatggaataatagccacatattaggcagggaaataatgcatagctgcatggaataatagccacatattaggcagggaaataatgcatagctgcatggaataatagccaaataataggcaagtaattaatatgggatgatcaaatgcgttgtacgtagatggataataccagatttagtagcataaaacccaacatatgaccatataaacatatgcataggttttatgccacaaaaaatgtttttttccatggaggtatttcactccagattcgcagcacacttgagcggcaccagcacctgaagtttaaagtttagggagatttgaaaagtaaagaataaataaatatataattaataatattttccataaaaccccatattaactttaaacatattttgtgcgtgtcttaaaggttagtaatttaaatttaacgccaccctgcccacttgaggaatagtgcactttagaatggtgtcttaaaacagaaaactaaccaacaaaagaaacaaagcgccaacaaaattaccaaaaaaagtaaacaactaaattttaaaatattgaatgatggtggttttaaattatgtcggtttaaacttataaaattttattaaaagcaagtcttagcatttctaatcataaataaaattctgtggcaaaggcaaactcggcaattatcgcaaaccattcttttatatattttttgaatattagaaaaaaatgtatttgtttaatttttacagtaagcagtacacctcaggtggtcccaggcacatttggacaccagcatgtttttggactataactaattttctttgtccacctaatacaaaatgttgctatttgagagctttcagatattagccagaaaattcaaaaaagccattaattgttaacaaaatagtgaccaaaaacctgaaaatcttttttttgtgttcttctggtcataactcttttgcaacacaaataaaaattaataattttgcaggcctaatagaccacatttacatgtaccgaatgataccaacaatgtcggattaggatgataaaaaaagttataaccaaaaaacggctggggtccaaatgtgccggaacccaactgagcaactcagataatcacaccacaaagtcttatttgaagaagaaaggctataaaatactctgcaagttaattttcgcacataatttttgtgaaaataaataaacattagagcaataaaaattaaactgattttgcgttttttggtaactcgaaggcgccgtgtttaaaaaaattcttagaatccaaaattaaccaaactggaccccaaaaaacccttagaggatccctcactccaaaagagaagcgttctcttttaactgtgcctgattgccgtattaataagcgcacaagtcagcagttagagcacccgtgtattcactgccagactggtagtgtgaatatccaattttcagggaatcatcggtgatcaaatcctcatcccttcaaactggtgggtggactatctgtgcgacccaattgcacagattagtctgagggtatccaggacgcctgactcaattagcgcctggatattcccacggaaacccccctaaagtgtcaaaaaaactcaaaataaattgtgcaaaaattgttagatgtgatacgtgatcgttagtaaatttcttaactcaatactcaatgttaggtgcaaaaaactaaattttatgaactctcagttaaaagcagacttgtagacaacgaagaaatgccgaatgtagatggtgatggcgagcagatgggcaagattcaacttataaaaatggaaaatagcaaaaaaaatttgctcaccagtcaataggctctgcaaacctatgtcatcccggatgttgctcttcaagcagaatttgaaagatgctctatcaaatagcatcaatttcagaattttaggaccattttggctttgacgaatttttcaatcccgagaatttaaaacggtttttggcccgcccaaaatggtcctaaaattctgaaattgat

SEQ ID NO: 17230 - DNA, 2529 bp, Heterodera glycines
  unsure (1)..(2529): unsure at all n locations
ttttcaagtatttattgtaactaagacacacaccatcctggaaatttcaaggacttttgtttttaaagggcaagatttaaatatatatattttttttttgtttgataaatcaaaatccgaaaaggactcccgaaaagttacaaattttgcccaaaattacggaaaaatntagggaacggtttccgcgccacactgatatacatgacaaacgattagccgtcgctccgcgcttcattcgctctttaaataattacgatcgccgtaactcgcgcgtttcattcgctccattggcttgctgtcgctcagcacttcactcgctctttaataattacgatcgccgcaattcagcgcccttcactcgctcccgtgctgtcgatccgcgctgcactcgctctttaaaattttggactccttcactccgcgcgtttgactcgctccttcagctcgctgcccatggcgcttcactcgctctttaaattttggactccttcactccgcgcgcttcactcgctcattcagctcgctgcccatggcgcttcactcgcacttccttcactccgagcgcttcactcgctccatctcgctgcccacggcgcttcactcgctcactcttatcacgccgcttcgttcgctctaactttggttgtgtattattattttagtaattctaaatttatttattaattatataattattttttttccattttcttaaatgaataaaggttctgactgatctagaaataattactaccaaacaataaaatttaattgttttttccctctactcacttttcttatttggccaaaatgagtagattcctctgtttctctggcattttgctaattacgcacaaacattcactatttttcttttcctttcaatctttttcattcaaattacgtgcttccactatttctcaatttctttttatctctggcaaattgccaattacacaaacattcactattttcttttcatttctatctttttcatccaatttgcatgcctcaactatttcacagtttctttatatctctggcagttgcaatttgcatgcgctgtatttcttaattatttttctttcccatttaattcccatactattttctcaatttattattgctttctaactcaatatctctctttttcctttatatctttatactgctaaatcttttactatctcattttccattttttcttttcccattttttgctctctctttatattccactgtgtttccgtgtaaaaaaatttacatcacaaataatttacaattatgaatgctcagcttcctttcgcgtcactgtaaatgtgggtacaatttagtcattgaatttttgataaattttaatggattaaaaattatagaattatttcaccattagattttattcattcattattaattttaatagaaaataatatttgtttaattattttataagtttaaaatttatctcttgaaatttattaactataatttagattttgataaattctttaattttttttcaaaatttcactgtgctagctaattaacatagaaaattaattattttttttcgtaaaattttttaggtatccttaatctgtttaaaaatggtcaaaatttccaatttttcccacggcggcgcctatcggcactgcctcgcctcaaaaaaacgattttacacctaaaaaattttttctgctcatttttcggctatattttcgaaaagaaaaaatatttaattgttttttattttcattttttggcaaggaaattttcttaattaaatttaaaaacgattttacttttacctactttaataaatatataaatatttttcttttcccaattttcaaaaaaaaaatttctcaaccccctcctcccccattctaaccagtgcataaaaatttcgtttttaatgccaaaatacaaaatacgaaacacgatacgaaaggccaaaaaaaacgaaaacacgaaaacacgaaacgataaacatccctgctacatacaatttttgatatatatttttttaaattttctgttgtttaaaaatgaacaaatattttattgtcctgataatttttttaaaatttttcttaatttatttatccatctgtcatactattaattgaaaacgacaaatgcttttatgaaacattaatttgattctgatcttttaatttcctttaaatgtgttcaaactttcgaatattatatataatatgtatatatatttgttcgaaggccatttttcaatattttaaaaaatttgttacaaagttaatttaaattttattaaaaaattctctctcgctctctctatctctctatctatctctctctctctctctctctctctctctctctctctctatctttctctctctcccccccctctctctctcgctttctctctatctttctctctctctccccctctctctctctccccctctctctcgcgctctctctctctcgcgctctctctctcttgcgctctctctctctcgctctctctctctctctatcttt

SEQ ID NO: 17231 - DNA, 2488 bp, Heterodera glycines
aaattaattaattaaaaaaaaatattatgcattaggtaataaaattttttaaataaaatgacatattaaagaaatgttgtttttgtataaaaaaataggattttattttcattttaaaaaactaattgttttatctattcatttatttttttacctgactccattaatttaaaatatttttacaaatttatttttttaaaattatttttgcccccccccctaatcaccggacaatgaccgtgccattcttgcaattttcaccgtttcctcctcctccctctccaaaatgccatcgccctcttccatcaattctgtggccattttttgcgctaattggccaaatgtctcggcatttccgttcagcagttgtgccatcgaaatgctttccatctgcgcaactgaagcgaaaacgatgtcaaattggtggccggagcgggaaatgagacggatcaaagggaccgaagtgttggcaatggcacggacagagccaaagtcggcaagctgaagaacgggcaggatgaagcaaagatgaagcatgcttttaagcgaggagaacccctcgggattattaaactattatttttcaaaaaaaactaagggaaatttttcataagaaaatttcaagaaatttttttaatttctattttttggaaaaaaatttttgaaaaatcttagtagttctctgaaaaatcgttatgaattaaaaaatttttttttggattttcttatgaaaaattccctgtgaatttttttgtaaatcttttttaaattttttaaaaatttttcgtggggagggggcggaaatggtgggggaaacgacggagggaagcggaaaatctgaaccgtattttacggccttttgattcaggcacgatttggcaacagatgtaagtctcgatttgcaatacagtgaaggtgaagcttgtctttaggcgagcgaaaatgagcaaaacaaacgaaaatcccctcacccaacaaaagcaaaatgatcaattgccggaaatatattacctgaccaagcatgtaaaacaatgagtcatcttcacacttttgcccttccttttcttcgccgctgctcaaacagtgcaaagtgccaaaaaaggcgtccaaatgaatgtgcgccggcacaatgcaaacggtgtcaatgtccgagtccgccgtttggacgcccatcagagaggagccgcccaacagcagggcaccggtgccatttgactacaaaaacagttcactgtttattcagcattttaaattaaaatttaattggcattttaatgggggaagggcgagtagttggtgggaatttctggcattttaaaaccgaattaagccacgaaggaatgggttttggaaatctcacccatttggcgacagtgtctctgattttttccaattcttcttcaatttgtttttgcttatgcatttcaatgccatcaaagccatttgcccgcagaatcttgatgagctaataaaataacaaaaattaatttaatcattaattattaagattttttttcgtcaccaaatttgtgtaaatgtccgtttgagtgttatatttgatttgctgcatattttgtacgtaatttctgtccaaaatttgttctgaattttgtttgttatattcatcaaataaacgttcatctaaaattaattaatttaataattattttatttacaatgtgccaacaaatattaaaaaaggccacaaaaattgtaaatttatttaaaaaattatttatttttatttatttatttaattaattaaagaaaataaccgaacactgacccaactcagtctggtcgcgcaacttcttccatttggccaaatatttgaggaactgtgcccgagtgttactgtactttttgccaccgtctctgccacctcttcgtcccaacagtaccgtaatgacgccaaattgcacctcgtccgtcaaattgtgccacgctgcgcgtgccgtttcgtcatccccactgatcagtcgggcaaagttgttcctgtgcaattgatcacgaattgcgatcagttgcggctcgctttcgatttgatcactttgcccattcattttttggtcagttgctggcacagtcgttttctgatcatttgcatcggttactgtatcatttcgttgctcaccaactgtattctgctgttgataatttaacgtaattagaggcagtggtgttttctttttccgatgacttttccttaacttctgatcactttgtttatgcattttttcatcacttttcccattttctttccggtcacttagatcagttactgtatgattttgctgattatcaattaaattttcatgatagatccgattaattggcattttgccatcatttgtaattaccatattatttacttttcgatcactttttatcttatttgtctgatcatttttcaatgcgattccgatcagcagaatttcctttaacattgtgcagaattccgccctaaactttcgcatttttattattt

SEQ ID NO: 17232 - DNA, 574 bp, Heterodera glycines
cgcttcagacgttggactgttggccgtagacgaggctcatttcatttcccaatggggccacgagttcaggccgggctatcgccaaattgccgatattcgcaatgttttgaccggtgttcctgtcattgctttaactgctacagccaccgacccggtgagaaatgacatcgtccaaaatttgcgactgagaaacccaaaagtgactttgtccgcatttgacaggcaattttcgaattctttttttttgtgttttattagagaattataggaagaatttgttcattgaagtgcaaaaacgaactcaatcgctgaggtggcgtttatcatcattaatttctaatatgaggtcgaattcgaactttagtttcgaaaaatgcgtacagaatgacttggaacgtcttctcgaggatgacccgaaaaccgggccgaattttggtggtccaacaattatttattgccaaactcgggaactcgtcaaccaactgacccagcaactcagaagtgagcggcggatatttactgtacttttttgcaacgactcattggcatttgtctccattgcaatttaaggcgt

SEQ ID NO: 17233 - DNA, 1444 bp, Heterodera glycines
ccttcctcaaaaagtttttggaaacaaccgcgccgcaataaatggtttgaattagcaacaaaaaaaaggtcatcgccgggagaaaaatatggaccttcgtataaaaaattggtcccgagacacacccccccccctgtcccaagcgtccgtcgtatggcccttgggccaagacaccccttgcacatgtatggaaagggacatacaaaaaccgggcccacaattttccattccttttaaaaaccaagcttttcagcatttggaactgattccatctgaatatttgctgtcccttctcagtaataaaacaacggcagagactcgggaaatttgtaacaaagcagcggttgtgcaaatcttctcagaaaagtatttacaacaaattaaagaaatagcaaacgaagttcttttttaagtttacccatttgaattgcaatttaaactctttttcaaattttaatgatttcttttcaattttttcaggaaactaaacgaaataaaggggcggacttacaaagacggcactttctatccctctctgatctccgaatcggtctcatcaaacattgaaacatatgaaaaggtgcttttgctttttacatgtcttttccattccatgcaactgattggtttttttcagcttcccgaattgcgaaaggaacttgaagacctccgttatgagttgtccttgcaaatggactgtgctgccaattccgtcttcagtaacaccgtcgtggaggaattgctgagggttcgtccaacaaagtcagcaaaagattttaaatgctcccctgtcgtgatttaactcattttttccgttttcagtgaacggagtcttgccaaagttgagggccttcccgaacagcgtcggcatcagttctctgctcagattttggctttgatttccgctttctgtacctccaataatttgtcgtccaatcagtgcggctcctccatcggtggtgaagtgccgttggaattggatggcacaatccgtgagcagttgactccgtccgagcgcaattcgtacttagcccatctgttgggacggttttcgctggccgtgttggccattcggttcaaattgaccgcctcaacaattgcaaatcatttgaattctgccgtccgcaaaggccttcccgtccatttggatgtgctcggcatcagttcagatttaatcgaaacagtgtaccaaaaagtgcaggagaacagacggggtatgtcaattaattcgaatgttgtctataataatatatgcaaacggggggaggaattcaaacaaaaactttcatcaaagttttaaaaacgcaaatttttgtatatttaaaatatcaagatatctctacataaccttatgctaaagcatttttcctgcacaatttcatgtgcattctgacaatatgaacagtttgaaaagcaacttaaattctaaatcattctattgatg

SEQ ID NO: 17234 - DNA, 3368 bp, Heterodera glycines
atttttgttcatgaatttggccaattttttcggcaaatattcaccatttggacttttcccgtcgtgatcatttggacaatttgcgtcttcgcacttcgccgacaattctcactgatctcaaccaattgaattcaatcaatttatatggtcggttgcccgctgcgattggtgatggttttgattggccaaattcaacaatttctgctggccaagcattgtccaaatggttgcactctccgagaaaagatggccaacccaagcgattgcgttgttggcaagggaactttgaatggatcaacaatttcaaggaggtgtggccataatctcgaaaaatcactgatttttgttttcaaattgtttagcattttcttcgtgccaatgccatttcttccgtcagttaccaaattcatttttctgttcatgtgccatcaatggaaatggtgccatttgaattggtgaacgaatgcacaaaggaaaagctgacattggccaaagcaaatgaaaatgaattggacaaaagttggataatgaaacgctgcaaaattggagagacagcggcggtcaattgggaagacggaaattgggacaacaattgcaacaatgtgttcttttggctttttagtggcactaattgcatcgggtgagcaatttaaaaacatttgatttttatccgaatttgaattttgcgcttaatttaggcctttgtctccgccaccaccagcgagaagacgaagaagcgggacaaagcatcacaaagggcgaaaccaacgcattgaaacgtggcgaaagaagtgccaatttgaggccgagttgaggacggtcaaaactggggaaaatgtccatccaaacgtcgttgcaaatccaactgaaatggaaaaacagtttagttaaataaatgatgaatagggatcggatttttagtgataaaaaatcccaaaataattaactaaatagtgagaaaaaaattccaaaatagtggcaaaaatagtggcgaaaaagttccaaatttaggggtgcaattttttaaataggctgttttttaatttgaaaataatttaaaattaaggaaaaagattttattcactgattgcagttacaaaatattttcttagaaaatattgaacaagaaaaaaaaatttgggggaagaatttttgtgaaatttttccaattcttagggatgtatttttgaaaatttttaggtcgattcttaggggtgtatttttgaaaaatttttaggtcgattcttggggtgtatttttcgtttttattgcattttttgggaaattttccaaaaaatgccaaaatagtggcaaaaataatgacgaaacgccaaaatagtggcaaaaaattattttagtggctaacttccgaaatagtttttttttagtggcgaagctccaaaatagtgattcctagtgatgaatagtggcactaaaaatgaaaaattttcgaaaaagaatgtgtttttcgtgcatttttcgtcgagttaaagccgcagaaaaaatagttaaaaaactaagaatccgatccctagtcataatcatcagtgatcaaatgccttttttgatgaataatgtctaaattggtaaataaatcggacgtataaaaatggcaaaaatcttgcttcgatttttccttttcctctctttctcttccgtctctcctccttccccaatgctattttcatcctttccctctctctatccgtccaattgattatttgattgattgatttgtgggtggggggataaggtaaaacgcccggcaaatggtcataattttgcaaaatattctctttggtggtcctcctctcctctgttgcgttccattccaattcactgtgccattccctttttcttctcgccgtttcttcggtcggtgctatgatgttggtcaaaaaaccatcaattgtagcaatttttttcaatatctttacttaaaatcaaccaaattttaattcttatatcattcaatagctctagttgttttctattagcatgcaaaatttcaaaaagggtgtgcgtacgtttcgcctactggacatctcgcctactgacacttcgcctactggacatttcgcctactaagccaaaatcggacgttccgcctactcacctaaaatctgacattttgcctactaagccaaatacggacgttccgcctactcacctaaaatctgacattttgcctactggacatttcgcctattgaatatctcgcctactaacctaaaatacctagctctctcgacagcaaatttcaccaaatatatattctaatttgacatataattcgctatatttataatgctaatgaaatttagccaaaaaaagcaaataaatttttcaaagaacacagaaagtgtgcatctccattagcttcttaatcactctctttgttttccatggatgtgaagcctttggcttagtagacgaaatgtccagtaggcgaagtgtcagtaggcgagatgtctagtaggcgaaatgtcagattttggcttagtaggcgaaatgtcatcgtgccttcaaaaaggtttcgttaagtttcaagaaagttatgaccaaaaatgttgtaaaaaacttggttttttgagcttctcaagttataacttttttgaaacttaacggaactttttgaaactttataggctaatagaaaacagttgggcctattgaatgatatcaatattttaaaatttggtttcattttgggtgaagttatgaataattttctgtcaaaaattttccattttttggaaaacattcgttaaatgtgattttggtgcttcttcatcaaatacaatccgtaaaaaaataggaaaaccctaaaaaccaggttttatccaacgcaattaattaattattctgctatttgtttgacctcattcggaactcggccaaattgtgctaattaccaaaaaatgaaccgacggtaaaagaatttcaaaagtcaaaaattcttatttgccctaatttactttcattatttcagttggatttgcaacgacgtttggatggacattttgcccagttttgaccatgcccaactcggcctcaaattggcacttctttcgccacgtttcgatgcgttggtggacaaacatttcgatggcaaaagcgaattgacaatttggagatcaatcgaaattcgtcgcaaggacaaaggaccagaaacgaaactatctgtgcggatggatgacaaatttgtggaatttccattgccggaccgtccgttgcccagcaaaatccgttttaagaatcttcggattgggtaaatcaaaatcagagagctatgacaataaaagctttccttccatttttaggtacactgatcactccgtcatcgcttttcttcgttcaaatcatca

SEQ ID NO: 17235 - DNA, 995 bp, Heterodera glycines
ctaaataaaccaaaaattcaccaaagtgtcatgcccttcttatcttccgcccgcggcacaagtttgaactcatttccagcagacaaggcatattccaaagccaagttgtattgctcgcgacagtaatgaattttggaacaaaggagagaagctttgtgtctgccagcgaatccatcgacagtcgcaagactttgcaccgtgccaatgtgccgtgccatttcaaaccatgttgcggtgatcacacgccaatcatccaaattctctgtgataaatcgcttctcttcctcagaagttgtttgaatgccaagtttggccagaaaaggctcggcagtagcatattttccagcgttgattttctgcttaaaagacagcatcagttggtcggccattttaactagtttattttttctttctaaaattaatgaattaaaaaatggttaattaagaagtatatttattttctaatagtattcttattccaccttaaaagtttacttttcggaatttttaaggaaattggtcattttaatgttttccgaaatcttcctggcgcactgcatgattcttttttggtcaaaatctgtttagattttcataagccattattagtatttgttttttcaaattatttgatttttaaaacaaatttgaagaatccagaccaggcccggatccaggccataacaaagcttgcttttaacttgaattttcctcattaacaggggctttaaaaatgatgattttgatttatcaatttaaaatttaaatttataaaataaattttaacgccaaaataatagaaaaattcaaaaaatttactgatgtatgtaagtattataaacgagcgcttgggggggcgccgctttcgcaggcaccaaccgctctgttttattctgaaaagaaattattttgataaatctaacgatttaatttattttctttccaatatcatttctcttctcctttatctcctctctctctctcgctacttctct

SEQ ID NO: 17236 - DNA, 1662 bp, Heterodera glycines
aaaagttgctttcaacccttccgcaaatttggtccattcccaaatcgcccgaatgctcaacagtgccatcgtcgactcggaactgatcaaagaaaagtcgaagcgagcagttgtgaaacccctgcgggaacacctcaatgaggacgttgtcaaacaaattgctgaagcatgtggtctgctggggcgaaattgacctcgacaatgttcacagacatccgcggacggcacgtgaggaaaatgcaaaaccgagaattgttaaaattcccttttcctcccaaaaatcccgcaattttttcctttataaattccgctccacacttctcaaaatgcctgtgattcctcataatttgaccgctagacgtgatatgaccataaatgaactacaaatattgtatgacctccgaaaaaaggcttttgaggcaaaccaggccgctggcgtgtataaatacatcgtcattgacctggaactcaaaaccttgtccaacccaaaaccactcaggactagggtttcgtaggggtgcgcgagcaaaccgcaaaaaattataaatgaaataaaaggtttgcttttcaatgctcgctcactctctaacaagatcccagacttaggtaaattaaaaatcctaatcatttacgagacctggttaaataccagaaattcgatttcatcagatttatctataggtggcaaatatatacccattttagcaaatcgggtaagtaaaagaggtggagggtgtgctatactaataagtactgatattcctatgcttgaaattttttctgggacaaaatttcaatgtgaaattattcacattaaactttgtttagcaaaagtgattcacatttttgccttgtataagccacctcaatgttttacaccaaactttaaaaaattattagattatattatggaatttaattataataatattcttatctgtggtgatctgaatttaccgggaattgattggattaattaccgaatagagaacaataatcattcgaaattatttattgattttatcgcacaaaaacaattggttcaacatgtaaaacaaataacacgtggtaacaacattttagatttagtgctttcaaatcctaagcaattagtttgtgacacgaatgttacagaaagtttttcaacatcagagcaccacatgatagaatttaaaattaatgggagcttttcgatcatcaaaaaagacaaaattatattagagagtttaaaccaaaaaattttctaaaacttagaagtatgcttcagcaaaaacgcattgatctacatttaccgaaattatttaaagttgacgacaaatacaattttctcgttggcgaactttataattcctttgatcaattatttcctaaaaaaatattaaagttataaaaagcaattacccacaaaaaataaaaagattatactccgaaaaattaaaatacacaggcttattagagaatgccctgatcacagacaatataaataaaatacaaaattttaagtaggaatctgaaaagggaattaaaaatattaatgataagaaagaaagccaacttgttaataaaggcaatttggctatttttaaatacatcggcaacaaatttaattctgacagagaaataagattgcttttcgatgaccaaggcagaatttacactgag

SEQ ID NO: 17237 - DNA, 3434 bp, Heterodera glycines
tattgaattttttttgttttcacttcggagggggcgggatattcacactctcgccatggctaagggcctgccaaaccccctccttccccggcacctttgtccatctcgtcatagtcaaccccatatttcgccgtgtccgtcgtctctcggttctccttgtcctctccgcgaaccgcttaatcaaattatacagtatttcgtttgccttttccctatgccgtcctatccttcgtcactttcaaatgccgtgccgtggaagaactcgtcgtcgtcgtcctgcacttcgtcatccctcacattcaccacactgtcatttcccgcaccgttccgactgcacaaagaacgctccattggaaaactgaggaaaaaaccgaataataatgggaaaataaagtgattaaattcaaagataaataatgatgcaaaaccaaggggaaaaacaaagcaaagaattgggaaatttatttaaaaacagaaaaattaattgtgaagtgtaacagttcagaggagagatgcgcctgcttgggagatcgatttcaacagtttttgcagcttttctttgtccaatgcctgaaaatgatttgatttattgaaatattattagattgttattattatatggattctcgccttatacaaacagtaaagcgggtccatgataagcgtcgctgtgtccaaaacgctcattggcatgtccgaccgatggtaaatgtcaatgagtttttggagtagactggccaagtaatctttgcgaatcctaataaagtcctccgcccgctccacaatctcttcgtcggccaaatcttcgtctcggaggggaattgtgacaagccatccgtcggacattttcaaaataacttccagaatttcaatggcacgctgaatgtttgaaaagaatcagaagggcaattgcattgcaaatatttcattttatggtccctctcttaccgtacctttttgtacagttcgaccagtcggtagtacttctgcagacagtcccttgccttttgtacgctcagttcgtactccgttctccgtcggatgtccatccgtgcccatctttcgtcactcaatttggtcggcagttcgggtgctctgttcccctccacgtgattttgccattcggtgtaacgactgatcgcttccttaagaaaggtccaatatttatttggcaaatgcatgccaattccattcaactgacaaaataaagttggtaacagtcgaattcgcgttgcgcgtcttttaatttggtgggaatttctttgtccggaaattccgtttggaatgttctcaaagcaatttcgggcagcttttcgggtgccaattgcatcaattgaagtgcttccgacattaaaccgtacactaaataaaagcaaatcgtaaaattaacaaaatcaataatctaataaaattgaaatgacgaaacactcacaattcaaattatttctgttaagaaaaactcacaaaagaatttacgcaacagaaaatttgcttcaataatggcatcccaaacagtttcagtttcgcaaaatgccaaccatttccatgccaaaattagctcttccgccgcttttctaagcgcctctctcgcgacgtttggcccaaaattgtgtttgtctttgaagcgtctgtaaacatcgcggcacaaattgggcacatcgaaaccaattttcatcgcattttccaacacttccttttgttccgagacaaatgtgagttctgagtttaattgggttaattaagaaataacaaattcaatgaacaacaactcataaggaagtcaagcatcttttcagttgacttttccggtgacaaatggtacaaataaaacggcacgatggtaatgagtcgcatttgctgcagtaacttgctgtactgttcgatgagcgcgtcgaaaattggcaaatcagtgaaacatttgccactgagtctgagcagaattacaagatgaacaaagaaacggagttcatccgcagcaatttggccctcttttttggcattgaaatattcgccgatggatcgcacggcgaagtcccatcgctccaaagccaaatgttcaaagagagtgtaatagggacgagactcattctaaagcaataaacgcaaatattaccaactaaaaataactaatttttagaggcgcttatgaaaaggctaccgtttttcaattttatcaaaaacaaaaggcacttttggtttaatcgaaattttgaatttttcaaattttgattttttgtttaaatttagattaaaaaccccagggagtaaattttcatgactatacattaaattttgcaaaccaaaagggtcacccttttgtttttactttttgataaaatcaaaccggttactttccataaagtgccattttagacaatgtcatggcaatttgtctttgctcaccactcacatttcttaattcagcaaaaatcgcgggcacatccttcggcaagtccattccctctctccgctgaatgtccgtcgccaatgccatgagttcgccatcctttttcttgtgctcttttaacagttcttcgtccaaaagtgcctcagcggcacagctcaaataggcccacaaccgatcctcggtggacagcgcatgagagaggagtgtggccaagtcgccaccaaatgtggcccaaatgcattggtcgcttttctggacacggtcatcgtcctaaaagcattaattcgccaattaagaaataattcctctttacttaccacaggtaccaattcacgagccgtttgtttgaagaataaacgatttcgtgcaaaatcgtgcatttcatcaaaaatatcagtcggagaaagactcggattggtaaggaattcccgaatagaaataaaagcagcgaatgcgggcaatttgacattggccagcaatattttagcatcttcaagacgacccgtgcggaggagggagaaaatcattcgattcaaagtttggacggcttcttcatcctccgccgcaattcgatcgacaaagcgcgaatcgatgtggacgaaacaacgaatccgtgtgcaggcactaaacaaattcattcaacaaaaacattaaaattgacttaaatctaaaaaattcccctaaaaataatttactaaatgttgtccaaatgagaaagcttttccacattttgctctgtgattttggaaaattcgctttgagagaacaacgcgttttcttcactccaaagcagaagcgtctgaacaaaatttgtatgtctcaaaataaatgttttacgcaccgaaatccggcgaaattggtcgttcatgcgaaataaatttgtaagaaacgaagttgaaacctgtggaaatattattttttaggatatgaggcactttttccgttttgtcctacagcctgaacagaggcgcactgaagcattttaacggagccgttttttggggacactaatgtcatatttatattg

SEQ ID NO: 17238 - DNA, 2562 bp, Heterodera glycines
gagataattgagattctggaaaattactgtgctgaacttctggtgtctgcggctgctctttgcattgaacggtcatttcagaataatcaatatcaatcaattcatattgtccattcaattattaattttagaaaatagttaattacttacttaattaattagcaactaattaagatgccataaatgcaaatgtgccgttgagatagatggtccttttcctgctggttgtgataatgacacgaataatgacatcagcgatgggactaaaggagtttctgattcattatttaaattgctaatatctatagctaattgcctacttttgctcaatgaaacaaactaggattgggcccccgaccgtcggggttggaaaagtcggggttcggcgtcgtcggggtcagcaagttcggggtcggggtcggaccaaatcgttcgggtcggggtcggggttcggggtttttcaatttttaccttatgcctaatagtcaaaattttttaattattttttctgaaataatattttttaatttccataataataattgtatttgtttttatatttttttatttcttttttatcagaaattttgtatagaattaattttttttcacgaaattttaaaattttttattttttcggcgacattatttttaaaattactgtttattttttccgttataaatataaaaattacttataaaaaatattatggtagcaaaaaaggcaatttcgagaaattacatttcaaaaataaattatatgcaataaaaaaagtgaattttattcaaaaaatgatcaaaaatttattattacttttttgtttttcaaaacattttttcgcggcgcgcattttctaaagacttttagggagaaaggggtccggcggtaccgataggcgccgccgggaaaattttgaaaatttggatagatctgttaacagattttgtccagaaaatgctaaatttttgcggttttgagctaatttttttaataagatttacgaatttttgggcccgatgaagccgataggcagctccaggcggattttgaaatcaagctctattttctaacatttttcaccaaaagatttatgaatttcccagaaagttttgttttttctcttgatattttgtaaaaagtattttgaaaattgtagagtacattgttaaatattcaaatttacttgaaatttcatcgccccgaatgcaattacgaaatgtgtcgcaaatacaatgaaaaatgggctgaagaacacaacgatttgacatgcgaacagttcgccaaacaaaaaaacgtgaaggatattttaggtatttgtgtgttacgcatttttgtatgtaaaattagtcttaaaaaagaacaaaataaaatttttctaaattttttacgtttttatcatataaaaaacaactcgggaaaatataaataactaaaaaattaattatataattaatttaaaaatttaaaaatatgtagatgcaatcaaatttagagacaaacagaaaacagaagaagaaatcaaaaaaagagaatatgccaaatgtccgggatgtaaaactcatgtcgagagaattgaaggatgcaaatttgtaatttgggaggattatttttaaatttaattttttaaattaattttatttttcattttttaaattgtaagttgaaatgtcgctgcggtacctgtttttggtattgttctggagagaaagctgatccgaaggctttgaaatcgtgctggggcgtttcataaaatccgccattttagtgagtttttcgacaaaacatggcataactttgcttaaaggcaatcaatttttacattcgttttggtaccattcaatagccaagcttttttgggatttttatttaccgatttttaaaatttcgagttattagcatctattttctaggtttttatttttaaaacataaaaaaacctaaaaattttgaacaaaactattttaacctggtttcgcgttttgtgtaaaattatttacaaaaatgcaataaaaaaaccctaagggtcaactttttgggaatttttcaaaaatacaccactaagaaacggcccaaaaaatttcagaaaaatatacccttaagaatcgatccaaaaatacctgaaaatacacttttaataaatgaaaaattttctcaataattcgtctccaaaatttatttatttattttcttgacaaattttaacattgttttggcttaattttgttgctttttttataaaagtttacatccctaaatttgaaagtttttggcacatattttggggtttttgcaattaaatgataaaaaaaattgtaataaaataatatatttaacttcattaatataaaacatcattctgttttctgtagtaattagggatgggaactttatgtaaatacatattttttttcatggattctccttattctgaacagtagggaaaaaccttttcttttttttgtgtttgcgaacaaaagttgggacttttatttacatatggcgcagcgtttttatgtaaacaaaaaaaataaaaattaaaaaaacaaaaattaggcaaaagt

SEQ ID NO: 17239 - DNA, 1553 bp, Heterodera glycines
gtcaatcggccaagaggtgcgcgagttttgttgcgcgattctcgggggtgcgcgagggggcggggcgtcgggaaaactccgctcaaaatggtgccagaggcgaaattctttcgccgttcagcttaggagatgttggaatggcggcctgtgaaatttgaagtcaatcggacaatgggtgcgcgagttttgctgcgcaagtctcggggtgcgcgagggggcgggcgtcgggaaaaaatttcgctcaaactggtgccagaggcgaaattctttcgccgttcagcttaggtggtggtggaatgacggcctatgaaatttgaagtcaatcggacaagaggtgcgcgagttttgctgcgcgagtctcgggggtgcgcgagtgggcggggcgtcgagaaaacttcgctcaaaatagtgccagaggcgaaattcttacgccgttcagcttagtgggtggcggattgactgcccgtaaaatttgaagtcaatcggacaaggggtgcgctagttttgctgcgcaagtctcggggtgcgcgagatggcggggcgtcgggaaaaaatttcgctcaaactggtgccagaggcgaaattctttcgctgttcagcttagttggtggtggaatgacggcctatgaaatttaaagtcaatcggacaaggggtgcgcgagttttgctgcgcgagtctcgggggtgcgcgagggggaggggcgtcgggaaaactccgctcaaactggtgcctgaggcgaaattctttcgccgttcagcttaggttgtggtgctatgacggcctgtgaaatttgaagtcaatcggacaaggggtgcgcgagttttgctgcgcgagtctcgggggtgcgcgagtgggcggggcgtcgagaaaacttcgctcaaaatagtgccagaggcgaaattcttacgccgttcagcttagtgggtggcggattgactgcccgtaaaatttgaagtcaatcggacaaggggtgcgctagttttgctgcgcaagtctcggggtgcgcgagatggcggggcgtcgggaaaaaatttcgctcaaactggtgccagaggcgaaattctttcgccgttcagcttagttggtggtggaatgacggcatatgaaatttgaagtcaatcggacaaggggtgcgcgagttttgctgcgcgagtctcgggggtgcgcgagggggaggggcgtcgggaaaactccgctcaaactggtgcctgaggcgaaattctttcgccgttcagcttaggtggtggtgctatgacggcctgtgaaatttgaagtcaatcggacaaggggtgcgcgagttttgctgcgcgagtctcgggggtgcgcgagtgggcggggcgtcgagaaaacttcgctcaaaatagtgccagaggcgaaattcttacgccgttcagcttaggtggtggtggaatgacggcctgcgaaatttgaagtcaatcggacaagaggtgcgcgagttttgctgcgcaaatctccggggtgcgcgagggggcggggcgtccgggaaaactcccctcaaatggtgcccgaggcgaaattctttccccgttca

SEQ ID NO: 17240 - DNA, 1825 bp, Heterodera glycines
tatataaaagaattgttaaacctacgcggactctaaccaacagtcaacctaacagcactccgctctttgaccaccaaatatgaagggaaaatacaagctaaatttcgatttttgaagcctataaactttttgatttctttctatgggggcgtaatattaaaaatacaatagtatagaatttaattttttttaataaaatcgtatttaataattacagtaatttataaaattaaaaaatagtatatttccatttttaaatttgtcctgaattggagaaataatgagaaaatgttcacttcaaaattatcatatgcaaagctaccactcaatactaccgcatctttattttggtgcaaatgtaaatgtttttcagttcaaactttatgaaaattggaaatattttgggttttaaaaattatcagagttataatttttatacatgtttttaataatctgaattattggtattttgtataaaatttaatatatattttcaataaaaataagtttttcatttgcataaccccgacttttcacttcccgaatccattggacttataaagtgctaaaatggaattttttcaaaattttctattagctaacatttaatgctctcgcatgatacaaagaaaaaaaaatcggggtgttttaaataaatataaaatgctgcacctatgtttatgacccccaaaaaaaatattttttgttttaggcatttccttcgtataataaaaatgggaaatccctccgggaccggcttttttgagaactggaacctaaaagaaccgagaatcccgcccggcccagaccaactcttgttaaatgtttggacttattttgtaatataccaatcataaatcgcagaagtaatttgatagaaaaaaaggtaaaatcaaatccaaacaatttttatagaaaaactttccacaatgattcaatttattcggtcatcatttattgaattatttctgctgatcgattgggtcgagagtttcatagagaaggctaattaaaataaaatattcagttaattatgtactcgaattacgcacccgtctccgattccctcctcattaatgccaatgtcaattttgctccattggccacaaatgttcagctcaatcgcctcctcttcccatttcgtccatttgttttcatatcgcgaaatgggacaacggaccagcaaaaagcatccatcgttgttaatctttttcattgctaatttttctccagtgaatttgttgttcaattcaaaaattgagtcatcagcaaaagacgacgaacaaaagcaaacgaaaattataaaattgacacgataagaagcaatcgaaaatgactaaaattagaaatagaaaattaaaacaattcaaattgatttatttagtaaggtttccatttttaggcaattgccagccataagaattgaaaaattttccagaaaaattgattcccaaaaacctatttatttttttcttgtcaatgattttttttgtttaaaaatgtccttaatgtccttattcaaaaaaattgaaatatttaataatttcatttaagtgaaatatgaccaaaattaagtctttttaattaagtttttatgtgttttgttacctaaaaagcgttaataaaaaaaattaattgcctatttttatgcctataaataattaattaatataatattaatcaccgctttcaatgctcccattttggaagaccattgctcctcattcccccggaatccgcatctgagcaacttcggcaaaccgtccggacgaggcgacaaaagccatttggccaccgcttggccatccgacgcattggcactgtc

SEQ ID NO: 17241 - DNA, 1896 bp, Heterodera glycines
gagccgtttttagacgaaaaaagcgaaattcgaaaatttgaactttcgacttcttgttcgaattctggtcaagtgttagaaattggtcgaaatgggtgccagattcgtattcattgtgcctgaaaaccccccataagaacttgtttttatgacttttgaaaatttaaaaaaaattttttgaaaaaggtgtcatatcattttaatgcatcaatttcaagcgcttcctcaactttggttttttaaaaattttctgtaacatttgacgattattgatttccccttaatgtttctcaaccagaagcataattaataggttaatgggaaagttttacaagctgaaaaaaggatgagagagataattatttatcgcttattaggtgtcaaaaattaataagatcgatgacgtcatttttcaaaaaatgctcatttctgcgttcgtccgcccgccagtgctcttctgctcaggcatttttgctgtacccagaaattacatgttcatgctctgtcgccccaagctgaggccaattgtttaaagtacgcttcgttgtcctgattttcttgttgaattcgttcactaattggccttccgtcggtgtccaatggttgtgccgtttcttcttgtggcgaaacggtggacgaatttctcaacaattgtttaatggtcgctaatgacgccttggcttttctgttcagtaatggatgataactaaattaaaaaataaatttaacattattaattctaaatgtttttaaaataatatttaatgctattctcacaaattattatttcatttaaaaaatgattgctatttgatactgaaaatttactaatttaatttgccaaacacttgttaaaaaataataaaattgattaattaattaattaatataccaaagcattgcaacgggaagcgcaaggtcattgaaagcatgtgaaagaaacaaaacttggtaaaacatggtcattggttcaatatttgttataataccaaactgggaattcattgtcacaataaatgtaataaaaacggtgataaaatggcacaaaaaattgggtgccaattgtcggcccgtccgaatattttcatttaactaaattgaaatgcaaaatgtatttttggcttattcccttttcaattaatcaaaaagaatgaaaacattttttgaaaatttcttggcatctcaggtccaaataaaatattattttgattttttaagcaatttcgaaatctaggaaaccaaaaaatttaccaaagttaattaattttttaatttacctgatatcgaacagagagttgctgatttgtgccaccaccaacacgtgaattaaacaatttttggttaatttttgtgatcattgaaagagcctgaaattgcattttttattattattataaataattaataattaaattttcatatttcttacaaaaatttcaatcaaactggcaatagttgcgccaaaataaagaacaatagcaatataagataatttataaaaggaatttgatacgctgatttgacaaattgtcaccgccaaagaagtggtaatctatacaataattataaaattaataggaagaatatttaataaattatctttaatttatttttaaaaatgtaagtaaaattttaatttgtaataatttttctatgctttttcaaggtcaatggtctcggatgttgagctctaagattcagtaataatgtctactttgtatcttttaacaacaaaattaatttataataatgaaaattattgctaaaccaactatcttaccataatgaaaagccaaacgatcgtaaatttccagctactgtactgctcgtaagtactaacgtaaattgttgcgcaaattcgctccacaatcagcacatgacctgccataatgctga

SEQ ID NO: 17242 - DNA, 1797 bp, Heterodera glycines
  unsure (1)..(1797): unsure at all n locations
tttaattaatttttttaaaaaatccccaacagctatcgcatcgcggccatcgtcacgagcagaagagcgcgagtggccattcccgtgagctccgggtgcactggcatggcttcagcttcagccaggattcgtgggaggacgaggcggccatccgcgcggtaagaaatcattaataatttaattattatataaataaataaaaaccaaataaattccagcaagcgccattgatatatgcggcgtgggaggccgcccacgacgcggggcacacaccggaacacggcactgtcttcccattgcggccggcgccgtggatgaccaacgttcgagtgcagagggatttgggagaggccgaaagggcctatcccgggcggcgcacggcggtgcgacaaatttttggtaaaatgaatttaaaaaataaaaaaaaatgaaaataataataataatagcaaagtagcactggacgcgaatgccgggactgaagcggcggcggtgccattgacagagggagatgcggcggcggtgccattggtggaaggagggaggcattgattgatgcgccagcaccaacaacagcagcagcagaaaccaacgcatgttccactgatccatttcttttgagttttagaccgtacttaaaattaacatttaaattgttttattaatttgttttactacctgtttggttcccccactgcagtactcaacaatttcatggtcgggatattcgtccgtgaattgaccgaggtgtggacctgtttgtagagggcaatttgcaatgagatgagcaaatatgagcgagtccgtgtccgtatacaaaagtctgcattctggtgttcgaccaaccatttgcatcgctctcaaaaggagaagccgagctgcagatgttgtccaaagagaaataactgaaaattttaaatttcaattaaaatttcaatttaattgtctctcaccaatattttacattcatgttcttcaacccattcctttttctgcatgtaactgatcagaatcgttgtctcattcagttcgtcgatggacatcacatcgatggatttgttgtccaagtactcagccaaaactgcagggtcatctgtgatcaccgtttgggccaggccaaagtttcgcaaagaaaaacggcccccttaaaataatgagctcaaactaggcataagccgattaagacactcacaaaggttattcaagcatagcttggcgattgaacgctttcctttgttcactgccatctgctccgggtcgatggtgatgccgaacatttcatggcactcattgacaaactgctcctccaactctttgttgcctttgatgttggccgcaaagtcggatgcttgtatttttttgggccataaattcagcgatgtaaccacggaagagtttgtcgtcgctgtgctcatactcaagcacgcggaagagcttggtaatccggtagccttcatccagcgctgcgttcatttcaatcgatgtacacgtgctcacccatccgcgctgttgatcggtgtgctcgcaatggtagtccgggtccacgtcccccatgggatagtcttgagcgcaacggtggcacaacggaaaacatagccgctcattgatcctgaccggcagcactggcacatcacacttttttggcggcaccacaaagactttgagcaaggcaaggnggtaagggttgtccccggaacgagtccatgtgacatcctcgttgaacacgtgaacttttagatgaccnaaccgataccgcgtgancaagctgaaatgtaacattaatttttgaaatccatt

SEQ ID NO: 17243 - DNA, 702 bp, Heterodera glycines
aatcatggtatcataggaaagccctagatgtttagaagatatttataaggtatttctcagtgattaatcagctctcaaaatagttgtcagtttaaaaccgcaaaaaaggcagaattttcaaagttttttatttctatctttttttatagttcgaaattttctgtaatttttagtaggctaatagagcctgtgaagagctttcgaatgatatcaagattgtttgattcggtcaataacttcaagagttatattgactcaaagttggctcagacggagttggccagacggagttggcccgttccgccagttttacgataagttcaaaaaaataaacttatttaatttcacacacacaaaaatatcgaatattttttttcctccagaaacgacgaaagccgaagagccaaaggggtttgtggatttgttgtacataaataatatctaaacattactgtaaattagaattctacctagactaggatccagggctggttttttccatagatccaagtccagctcaaatatccaggcacaggttaggcatctgaatttcctggataatattttattcatgttaaatgattaaatagttaaaaaatatatcgtattgcctattagatacctttagattttcctaagcaattaattgatttttccaaacatttgtttgctttttaaaacaattttcaaaaaatccaggtc

SEQ ID NO: 17244 - DNA, 280 bp, Heterodera glycines
cggtgtcatctatgttactagatcggggatcgatccccgggcggccgctcgagcaggacctgcagaagctagcttgatggggatcagattgtcgtttcccgccttcagtttaaactatcaagagagggaggggagcggagcgcgtagcgggggaggtgggtggcggaagaagaaaagggtggggggagtatgagtatgatggtcaatatggagaaaaagaaagagtaattaccaatttttttttcaattcaaaaatgtagatgtccgcagcgttattata

SEQ ID NO: 17245 - DNA, 1762 bp, Heterodera glycines
agttatgaatttttcaaattttaacccaaattttccaagggcccaaaaaaattaaaaatattttcgaaattttaaaaaattccaaaaaaatctgaaacttaaaaataaccatcatatttgtgttcaggaccctaattttcccccagaaaaaattttttccccttttttttcacccaaaaaaaaatttttgaaaatttttagggggcctagctcgaaaatttttgaaatttttcgaaaatgaagtataccgttcgatagagcttaaaaagctctacaattttgctctaaggccattttgggctaaaaccaacccctggacgagttatgggcccgggactcaaatgtcccgctcaggccaaaaattttttctatttccggaaaaaaatcgaaatttttccaaaaaaattaccagtcgatagagctcaaaaaatgatgttttggaagtggtctccgtttttcctgaaaaattcgttaaaaattcctaaaattcaaaaaccaaaaaaccgttttttaggcctagcatgaaaatttttcaaaattttcgaaattttaaaacttggttggatagcctttcaaatactacacatttttgctcagaaacaatttttcggtcaaagcaacccctggcgagttattcgcctggtactgaagtgtacacttttgggtaaaaaaaattagccaaggctacagccttgggcgcccaacgtagggcttaggttttgctggcaaagttgtcggggatagtctgacttaaaatcctaccagcaagagctaagcgatcccggtccaaagaaaaaatttcgtagaagaaaaactgcaagaaaaagtgagaaatcgcttctcgggactcagtcgtccgcgctgaatttttttctatagttttcccggatgcgcctcaaaaagttgtaagacccttccactactttcagggcgctcccggccttcggccgggagattttgtttttgcaaacgaaactccttgtcaatataacgtatatattaataaaaattaatattttttaaatcttttataagatttacgcgatacaaattaaggaaatagtgaagttcatgtgatcttaatagaaaatggataaagaaaaggtggtttattgaaaaaaatggtgtttattcgcatacaggatctataaataaattaatattattttaattattaaaaacattttagttatataaatgataaatcgaaatttattaatgctctgataaaaaaatcatttgataatggattcaacagaaacggaaaaattagcactttgtggaaaatattttacttacagatttgaaggtttcagacgcggtgtagaatcttaaaaaattaatattatttaaatcttttataagatttacgcgatacaaattaaggaaatagtgaagttcatgtgatcttgatagaaaatggataatgaaaaggtggtttattgaaaaaaatggtgttaattcgcatacaggatctataaataaattaatattattttaatcattaaaaatattttagttatataaatgataaatcgaaatgtattaatgcgctgataaaaaaatcatttggtaatggattcaacagaaacggaaaaattagcactttgtggaaaatattttacttacagatttgaaggtttcagacgcggtgtagaatcttaaaaaattaatattatttaaatcttttataagatttacgcgatacaaattaaggaaatagtaaagttcatgtgatcttgatagaaaatggataatgaaa

SEQ ID NO: 17246 - DNA, 1586 bp, Heterodera glycines
  unsure (1)..(1586): unsure at all n locations
attatgaattcatcatcaggccagcgacggacttcgaggttaacgacttgtccttcatcacgaacgacgtgtcgaaaatggaacgaccacttgagcaattccttaacattgcaacggcgcagaaggccaacatggacgggtatgaatttattcgaaaccaataaacgtgttattttaacataacatttggactagtcagcggattgtgtagagttatagtccaaatccaaatttcctaacaaacattttgtggtatgatgcattcagggccaaatttaaacatttgaattcaacctaactgttcagaattaaagttttcttttttagaaagaaattctttgggttttcttcgtctcctgtttacttactggcgccattcgactatggcttcaaaaccaacgagtgtcctgtcttcgattccaaccactcattccttggtgtaggagtgaacaagagatgtcgaattattgaaggttttttcaattttcttttatttcactcataagaaaatcaggagatcaaggccctggccaaatgacacctgccatcgtcatccaaacgaaaaaggtttatctttatggtttttaccatgttccattcattccttagtccgccttccacattccggacatgtgcattttggacaaggcaaaaacgctccttttccgagaaaatcagggaagattcgagacaggcggctttactcaaagtgactacgaagcgctttgcaatggccttgtcggtatgttaattttaatgcgtttggtatgaattattttatacccattctccaggaatttatgctgaaccacgctatggaacgtcgggacggtttttccgcatcagtgacattacaaaaccaaacactggaaatggtcttaacgcggagaacacattcatcacacaccaagtcagcgggaaaatcagcgtcaaacaatatttcgaggatacctatcggaaaacgcttcagtgagtttatccaactttcttaaaagaaacattttggtaattatttctcgatttcaggtaccctaaagcaccacttctcgtcaattatcgcagaattggggacccggcgtattatcccatggaggtacagcgaacaatgcaatttattttctctttcataatttaattaaaacaattttagctttgttttgttttggattgtcaacgcgtcaaaagttctcaacaacaccccgagcaaattcgtgtatgtgtttagcgtttcaatttctaatcatcattctattccaacattaacagtatttgtttagaaaatgatcaaagagacggccgttccgcccaccgttttgcaagcgcacaacgaacgggtgaaggagtcgcttcagttggtcgacaacgaatacttgacaaacgcgtccgttcactttgacacaacgccactccatgtcgactaccgtgttcttggtccgccagcaactctctatcggaacaaccatcgtgtcactcctgccgcgtcaaactgtgaatggcatccgggtgacgctttggtgaatgcgcaaattgacacctgngtagcctatgcgttgggaccctgcgggtgactncgtgcgacgattagg

SEQ ID NO: 17247 - DNA, 1322 bp, Heterodera glycines
cctgcgggtgactcggtgcgacgattagggtttaccgaaaaaggatgtggaggtaattaccgcttaaatttcgattgttttaatgtaccaaaaaaaattattgtagtaatatctgtcaacttaaaacagaaatttccgtggacaagtatgcaggtgaaatgcgtaacaagggaattgtttgtaaacctccggtgcgtgtctctatttgctggtttacgtccgtgaacaaggtcttggaggttttgcacaaggaagctctgaacggcggcgttaagttctgtctcattggtcatgcgaaaggctctgagggtgatgacgtgcatggtaccatttattagccgttgtaaaattaggcccctgattgtgagtttcttatttagctacgatcaaggcgtttgaacaacagactgaaattgtcactcaagcaattacgtttgacgttctcaaggatgtgctcgataaaggcagcccattgactgttgcgaattgcattcacaaaacgaacgtgaaaatgggcggtctaaattatgctcttcatgtggatgatccatcgtgcgtcttttttccccttttttatatagtcaatacaattcattttagtgttgccgaattgttcgacggtcaaacactgtttcttggttttgcaatgaacttcccggatggattcgctccttccgaatctgctgcccctatcaacggtgtgaatggtgctgtgccttcaggaagtaaagctggaccaacgctgcctcctcctcctttgtgcattggggtaataaaaaggagaggagctcattaactcaattttgaaggagtaagtcaatttcaaaaatttcagtgggccgcgacaatcggaaaacgacacaaggatgaatacattggtgactttgtctactaccccccgcaccaatcgaagaaaaatgatgttattggaagcgttgtcaggagatgcattgagtccttcaaaaaaaacaggaacaaaatactgtaagttttggacaatttgcattttatttgttgcaatgattgcttagacaacgcgtggtcattttgcgcaacagatgtaccgagggacaattcgaagatgtcatgaagtaatttttcaaaatgatgaaattatttgaaaatttctattaaaatagtgaaactgggctcttcgaaaataaataatgtgccatattttaaggtatgaaattccgctggtcaggaaggaaatgaaggaattgggttgcaccgcaaaacttactgtgattgttccaaaccgacttcaggtgcactttcccacacatcaaaacggcaccgcctcgtataatttaacctttttt

SEQ ID NO: 17248 - DNA, 3714 bp, Heterodera glycines
  unsure (1)..(3714): unsure at all n locations
tttttttttctttccccccccccttntccgttttgctcacttttgcgtgctttcgcggcccaatgagtccaaatcgtcgctcattgccaacgaaacgtaagaataatttacgaaggcataagtgagcagaaagggcatggaggagagaatggccatttggttgaggtttccgagtagaacgagcagcacagcgaccgcagtgaccaaaacggtggcctttagagggtctttggagggcgaatccttcgagaaaagagccaattggaaatgccgaataatgcaacggatgggagtcatttgtcatacgattagccattagtcaaatttgtttgtattttgctgctccttggcgatctgccccccccccccctcggccaatttgccacctcctgaagcaatttgctcagctgtggaatgagcccttcggaggcgatgccctgcacaacgcgagaagtgccgagggtggaggagagaatggcggagagacaagcgatgtaaaggccgccgaggaacaaaagtttggtgagcgaaagtcgttccgaaatcataacatcgcaaagcaaagagtggccaaaatggaaggaaagtgaggcaaagggcaactgataattgtggtgattagttactaaactcaccgatcgacggaagcgccgaggataagcatgatcagaaagcagagggcgaagcttgctctgagatcaaaaggaatcaaataaacaataaatcaattgaatcaaatcgaatcgctcaccccaaagcactgagttcgccctcggcaatgtttctcagagggtccaccaaattgccgctcatattcactccttttacgaaagagaaacggtaaaagtgaattctgtgacgaaaaaccggccaaaactccgatgaaattggcgaacaaaatgccaaaaacactgaagaaactctcctggccaagaagagccattgcgttgttttggtgttctctgaattgagttcggttcttttcctttttcgctgtgattcgttcactcatttgccgataattcggagaacggcgtgcaattggccgggccgtaatgggagtgccaattcagcgacagtctttcggcactcatttcgccgatgccggcctcttaaggagtgccaaattattttcttccgagaattcgaagggtaaaatacctgagtccaatggagtgaagagaacggcgccaagaaggaaatcgccaatggctattgccagaaagcacatcagaagcagctgaagacggatgatgaagcgaagcccagcgaaattcattgctaatgagagaaatgccgagaattactgtatttaccgtaactacgcaatcgaagagcttttaaaaattaaacgcctcaaggcgaggttgtgcccgtccgtttaacaaccgaccgaccgttgagaacgaccagcaccaacacagagagagttttgatggccacggggctgaaaatgccggccaatttggccatggactcgccaaagcccagcgcgaccagtgcagttgcgcatgcttgaccaaaggtgtaaatgaggccaacggcaccaccgattcgttttccgagcacatgggaaaccaaaaagtaaatgccaccactgcgaatctaagcgcaggaaaacaattgggttggagaaacgcagagagaaaagtgaatggacgaaaaaaagaaagaaaggaatatttgcggaagggtaaggacaaccaattgggcggtcattccgatcagttttgagaatgctgatcagcccaattcaatcacccaattctgtgttttttgtgccgatcagccgatgctcacctgacatcgctcacaaattccaatggcggaaaggacagtcactgaggagaaaagggtgcacagggcgagaacaacaaatgcctggaagagaccggcagtgccctggacaaatgggagaacggcagaaccaatggcaccgaatcaaaggcaaacgcacgacgatccaacccatacggaggaaaatgacaatgccgaaaatgttgacgacaacggtgggaaagacggcattccaagcgttcaccaaagtgggctgttgcagcagaaaattccttttttgtgaggggatttgcaggtaaaaacacatgcaaaaagtggttgtcaaaatgccaagaaaaaatcccaattccccggatccaaaatgccgagactgactaccaccaaagggccgagactcactcccgaccgacctttgccaccacggaatgtcttcgcccgcgacgctttgctgggcgaacagcgaatcgggctcagcatttgggggcgactgttgtgcaatgaccgcagctgtcggacaattattttgaggattcatttttcaccattagccaaaagcaatgggctaatattaattaactttttctgcttaattccttagggaacattcttttcgccaattttactggtaaaagaaagcattgcttaaaatgccctcgggtgcaatgcaattagcccattatttagtaataattttgactttcccacccgccttcgatgtttttagagagtgccaaggcgaatgagaatgaatgctccgtgagttgagaaggcattcccaataaaagaaaaagcatttttaacattgcgcccatttggcggcacgcaatgttagcacgagaaaagagcagggaaaagagagagagagagagagagagggaggaagtgcaagagacaagagaaagggagagagagaataggggaaagagaggagagagatagacaaaaagcaagtgagttagagagattagacggaactcagagaaggaaagaaaaaggaaaaacagccgaaatttggcgtcgtgagagagcgaatgaatctgtgccaaacattgtaaaaatctttttttgagttaattcctttttgggtggcgaatgacgcacagaaaacggaaaacagccgaagagaagcacttcacttattcactatttcttcttttgtgtatttttcggggcaaacaaaaaataaggcaacggaaggccaacaaatgccctcagcagcgggcgacggcccaaaggcaaagaaaaggggaaaggacagcgcaaaagagggaaacgggggacagtccaaatcgatattgtaaaaggaaaagcatccatttattaacaaaaaacaaaattcagccggaacacgagatttacaagatggggaacaattgcagaaaaacaccattggagaaaatagcatgaactcgtaatgcccttttacatctgccaaaaaacgaatacgcacatttgccgtcacgacggcggttttggcgaatgaccaacggcaccagacgcgttgttctgtcgtggcggtgcttccatttgccgaccggcgccaaaaccgagcatttcgaaactgaacgactccaacgaatcccaatcgtcgccgacttcctgaaaatgccaataaccgtatttgtccacacaaccaatgcctttttagaccgacttctgcaattctgtgcaagtctgggttcattacttgttgctgttgtcgtagggtttcgttggattcatacgacggatggtgtccttgaagctgttgttgggattgccgttgtctgtctcctccctcctcataagacggatacacatagttgccgggagccatgttctcgtctaatgcaatgtcatgcatttcgaaacgggagcgtattggagagggagcaggggagaaaagcaacagataaccgaatgatgaatgtgtttctt

SEQ ID NO: 17249 - DNA, 1401 bp, Heterodera glycines
  unsure (1)..(1401): unsure at all n locations
attttggcgttactttcaatatgtgtaccgttgaaattgttttttgacactaatgtgtgtttaatttgattagttagttttttaaattcgtgccgatattttattttttattttattagccttaactattttgtttcaagtgtttttgctgtaatgagtagaaataatttatcgtaggttaaaacccattaaaataaaaaataaaattttaaatactgttaattagtcgaaaatgattgtataatatgcagttgtatttttattgtataatgataatggacctcctgaaattagcataactgatatttgtatgaaattttttagggataattcgtcatatttaaataaatttatttctattagtccttagcatttttccatttaagttctcgaacaaaggaatatgtataaattttattttttattggataaaatcaaattttattcactttttcgaaaccggttatttttgtgcaaaagcaaataaacataatgttattgtaattgtatattatgcagttgtatttatataatggtgagggatctgtcgaataacaatcattagcatagataaattttacatgttttatttaacttttttaaaatcagcaggtaattattgaatgcatataaaaagtgttatttttcccgttgatttaatgcattatactcttttttgatcgcgataattacttttgcctaaatttaatgtcattagctctttcaaattcgatttttcacaataataataataatagtatgagactttttccatttcaattggtaaacgaaatggtcaaaatttcttccggttattccaattggcaccaatgaacccctttttcacttggactcccattctctcagaatcacaaatcggtcatttttgtgcaaaagtgttaataaacttctggcacgtcgtgcccggcccgttgaaaaacaaaaaattttacgaaaaataattcttttgaccccaaaattgttgaaaaagattttctgattcttgagcccaaaattcgattgtttttttcagcccaattttctggctttgaaaaatttttgttctgaccccttgctcaagtgacaaattttgttggcgaaatgtgcaattttacatgggtggcgaaattccaatggcttaaatggcaaaacgtccatggcgggtgacgaaacgcactgaaggggacgagagaacgtgctggcgcatttcttaaaatttccaaccgtgcgcgtttcttanaactgccatcattgaaaattgttcaaaaaattttcaaaaattaatttttttttttttaaatgaaaattttcaacgaaaaattctaagagaaaattagaatttttgaagaaatatttctannatannaatgtannaaaattcataactttactnncactgca

SEQ ID NO: 17250 - DNA, 2109 bp, Heterodera glycines
tacgctgttttcggcacttttgcagatttttggtattatttgatagcccaaagtgtcctttattagtctacaaacattccctaccaaaaagtttaatatcgcgatcacagcaggagtttcatcccgcaaaaatggcaaaagatttacttagcaaatggggggggggtgacttacctatcccatgaaacgctcaaatacctattttttgtcaggccaccggtcggccaattgtacacaccttttttgtagtcaaagtgggacaacacccaactatttttggacaaactcgcttttggcgaagaggaaaataatgaaatatggcggaggaccaaccacttttatactaattttttcaatttttacacgatttattaaacggtcattcgtattcgacgcattgctataaaagccctcccttctctcccattttctttcattcgctcacttttccttccctttttgcttctttttggtgtatattttggaaaaatcacatttttaggatttttccgaaaatccatcgacccctcaaaaattaaagaatgagggtaatttcttagaattccgatactctgcataattaggagccttttttgtcatttgtcatttattattatttttttttaattttaaaaagcactccgttgggcggacaataagtgccttaaaaatggcaaaaaaaatacgggagcaaatcgtcgggaaatgcttggcacggcactgttcaaaatccatgttcagaacattccgcataagttttttacaagaaatattggtaatctcaatttaaaaaaaaataaataatttaattttttagttgtttgtaaagtcttttaagaatataaataaataattaaaaaaaaacattttagaaatattttgaaaaaatttagtaaatgttaagattttttaacatttgaggagccgaacaatacggaataagcattttagcaaataaaaaattttccaccaaattttgccgtttttcctttttcgttatttatttttttatctaattttttaaattaaatttgcctctcaaaaaagaaatttttacaacaacagtttcaaccggcgttctgacaaatgcggaagtgatcagtgtgtttctttcctgccgtgctggcgcgtttcttaaaactgccatccttgaaaattgttcaaaaaattttcaaaaattaattttttttaaaaacaatgaaaattttcaacgaaaattctaagagaaaattagaatttttgaagaaatatttctaaaataaaaatgtaaaaaaattcataactttactcaactgcaaccaatattttatggtatcattcaatagctttaattattttctattaaaatattaatacttaaattttttacaaagtatataaaaaagtttgtattaaaatttaaaaatttttagtttttgaaattctagtgtttaataattatacaaaaggttttaaactccaaaaagaaattaaatttcaagtcattaaaatgcaattcaaatgattttttttagaaaagttcataattttttatttattaatttacgaataaaaattaattttcccatgtttttataattataatattccaaaaatttttaaaaatatttttcgttttcaaaatttttcaagaattttcttgaaattagggggggtggcagtttttaagaaacgcactagcacccgagagaatgagggaaagggggaggggaaagcaataattaaaatatgaaaaaagtttggagtttggataactatttataagtgaaaataaaaagatgaatttaataaatatatgcatttaatggataaattttggggtgatatttttgaaatgagacgggccaatgaatggggagggggggggggacggatttaacggacagcacaaagtccattaaatgcaaaaaaggggcccgccaattttcgctaattttattttgcacaattgtattcatttaaattttgcagatggacaaacgaagaaacgaacgcccgaaaataatgggagagaaaaacaaaaaaaaaaagagtacagcagcaagagaagaaaaggacgaagatagagcggaggaagagaggaaaagtaaagaaagagaacaaggcaga

SEQ ID NO: 17251 - DNA, 3752 bp, Heterodera glycines
  unsure (1)..(3752): unsure at all n locations
gcaggtcacattttttaaaantccgaaagcaaattgatagtacgcggaaatgccaatttttttttgtttataatttgttaattaagttttgtgaatttagacaattgtagagtcaaatggtgccaatggcgaaaatagggacaaaatgaaaaccctaaacgtactggattacattaaatttgcaattattacttgtattttgctatatgtactggaactgaccttaacgatagcataaacgatgtcatattttatttaggtcaagtttccgccacttcaatggactattttcgtttttcaattcattttttggtattgcggcaacgaattccattgtcagaaattgtgccgatgagaaatttgagcaataaggaaatattaaccgaattggtggaattgcttttgctgaaaaagagccaaaagaatagagaagaacaaacaaatgggcaaaaagaggataaaaaaggcaaaaaaggagacaaaaatggagaaaaaagaaacaaaaatggggaaaaaggaaataaaaatggagaaaatagcaaatcgggaaaaaagaaaaatgctgataaagccaaagagagtcgattgttaaggcttatgaatacaatggtgaacaatttaaatggcacggcaaacttaagaaagggaggtaaggacaaattcttagaatttaagaagcaattaatttgtgtgctaatgatttatcaaattcttttcttgtttgttttttgagatgatcaacggaaacggagaaaaaagcgaatgcccgacaatttattacgttttatattgaatttgttattcgtcggcataatcttttgcctggtgatgatgctaattntcatgtcnggagaagcgatggttttgacgggaaggaatttgaaagcaaattttgaggaacaaacaagtaatcaaaacgagaattaaattaacaatatttattaactattcatgctcattttattaacgtttaggcgggtttttttgagtaagagaacaaaaaaacttaattataaattttgggcttttttccagttaaatcgtgaaatacagaaaatattgttattcatttagtggaaatatttttatgtattaagttacgaaggctttgagtcgtttgtctcaatatgaaatgcttaaggccaacggagacgaatgtgcgatttgcttggattcttataaggaggggcagatgattcgtcagattccgccatgtcaggtgaatgattaagccgaataggggcaaatgtacgaagtgattttggtaggaaatttgtaaatttgtcaacgcaaaagttatggtaggaattgcgtagatgaaatacggtagaaacattggctattgtagcagaggcacttaatttgttgaaagtttgttcttttgttgagatttcagctttgcttaatgtacagtttatgcatccaatcaaatctcatttaatatttttatttcaattttttgactgttgacaaaacttctttcaacaatttctgttaaggtttttaaaattatattaatttgtttttccaaattgcttatctaatcacacaaattgtgtttcaaaaaaatacattttttaatatcagaaaattatattaaaaaaaaattaaaaaaaacaaaaaaaaagtgaaaattttaccttttatataagatcctggcgcagcgattttatgtacacaaattttgtaaattatacattaatattaattttgcatttagcacaattttcactcggaatgcattgatttttggtaaatgaaaggacaattaatttctttaactttaacatttacaaatttagggttaaacagaacaacaattgtccgatttgtggcgcaaaaacattcataatttcattaaaaaacggtttagttattttaatttgaaaatacagtaattttttaccatttatttaattaatttagcgaaaccaaacgcaaatttgaactcagaaattgttggcgatgaaaatgtgtaatttctgagtttgttcattttttgtttgtttttctctgatcattcattcattttgctttgttcgggatgacatttgctgctcgttttttttgaccaagaaaaactatttgcttcttaattttcaatgattttctttcttatttaacacggccaaactgatttatataatttttgaaaatcttagaaatatttttttgttcctaaattgaccaaaataagccaaatntagtcagaaaccattgcaacaacagaacaaggtcattctgcacagaaacgaacataaaagtgaatttcagtctttcgaatgatatcaaaattgttcggtttagtttgtaatgaatagggctgccaaaaatatgcacaaaaagtggccaaaatatgcgcataaatatgcaaataaagtcgtgaaatatgcacaaaaatcgcaaaatatgcaccagatatgcacaaaaaaaaacttgaaaattaggggtgtaaaattaatttaaaaattttattttctcataattattaatcgattatttttcaattgcaaatcaaaaatttctggcagtgaagctcactgttgacccactcgcgcatccattcagatttggatttaatttaggcataatcaaaaaatttttcctaagagatattcaaatcggaaaatatttgacgaaaaatggcaaacgatgcaaaaaatctgaaaatatatacaaaaaatggcaaaatatgcatgaaatatgcagaaaaaacccaaaatatgcaaaaatatgcaaataaaggtcccgactttcatacactaacacaaaaaagaaagtgttttcctactatttagagcatggagaagccaggaaaaaatatacatttgcatatttttgacagccctgttaattaccctttaagtaataaaaaaattaataaataaccaaaaattgtaatttttttatttagttgaaaatttggaaatttggaaattttaagcaaaatggtttttatggaaatttagttgttttgttaataatttttaaaacttaaaatgtaagaatttttacaggcaccgcttcaactgttcaaatgaaagagctgaattttaaaaaagagtgccaatcattgaactaaatttgtaggaaaatttataagatacatttcatattgaacattaagaaactagcattagcgtccaccaaaataataaaaacgggtcgggtgagccctgccgttctgtccgttacgaagcagcactaatcaaattatatctgtttttgggcgccaacccatttgcagggaatattttgtaagatttttgcggaccgggtcgattgggccccgccgattgggccccagcacgattgggccccgccgattgggccccatggggcagccacttttttttcgtttcacatgttttaaaaaaattaaattattcataaatttattaagtatgaaattctatccattcttacaaaggcaataactcgtacaatagcagttcgtacaatacatttttttacaaaattaagcttatagcttgggccaaatctaacaagggaaccgtcagaactgtgtcagaaaatgcatgtatcataactatttgatagtgcagggcggctactctgaatttttaatgttagcggtgtgttgaagccaaatagaaaagttattggacctcaacaatcaaaattttgactgtgttttccccttcagggaaggtggtgaagtggggaaaattttaaaaaacnggtggatctagtgggttaaattcctatttttcggaggtccaggttcgaaa

SEQ ID NO: 17252 - DNA, 1020 bp, Heterodera glycines
  unsure (1)..(1020): unsure at all n locations
aagtgcaccccntcttttacaccccccccccccgcctctcccaatttaaaaatgtaagcagcattggcaggcccctctcatcgcaaaaatggccccacatttaccggcatttgccccacttttggtgtcgtccatgtcgtacttcacgtagcacagctggggccgcgtggtggtgaaggcataggcggcgattttgatgggtttgtcgggcaccagcgcacgcatcagcgtcgacttgcccgcgttggggaagccgatcagcccaatgttggggcacagcttcaaattgatggtggcccaaaaggcggtgcccggctcggcactgaaaaattggggggcagaattgaaaattgggataaaaatttaaaattgatgtcctaattaggcccataaaattcccctcttcgtaataaaaaaaaagtattcaaagaaaaattgatgcatttgggtgaaaattttatgaatttctaaccaaatttcattacaatttgcaaatttttaattgacaaatgaaacggctctaaaattaaaaaaaaattacccaaaaatgctcaaaatttggtgtcattgttgaacaacaattgtcgctattaacttgtataaacccaattttttctcatgtatggtatataaattttgggaaattacacaaaaaaattttttggggaaaacacaaaaaaaaaattaaaatttttttttatgttttttggttggttatgcgcctatggaaatgatggtatgacaaataaaatgtttacaagttttatataaaaaatgaattttttttttaatttctacatgcctagttttgaagaatttattacccattgaaattgtctgaaaatatgaaaaaataataaaaaatgattttccattttttgggaggaggggtgacgagcaatcccaataaaaaagcgggaatcatttaaattaattaccccccccccccccggtggcagtgcccccaataatttacttgaatttgttgtcagcgcaaccacccatcccccctttggccaa

SEQ ID NO: 17253 - DNA, 2255 bp, Heterodera glycines
ccccccgcccgaaacccaaaaagtaaaaaattttcagtaaattttttttgaaattctaagcaattttcttaacaaaatagcattaaaatactcaaaaattttcccggcggcgcctatcggcaccgtcggacccccattttagcatatttttgaaaaatggaggccagaatggaaaaatattaattttttggcgaaaaattttgtaaaatacaccccataattcgggatttcaaaaaaacccaaaatacacccttaaaaataacagcaaaaaatggcacttacgcggatgtcacccttggtgaacaggaaaccgttggcaatgtattcgtattccatcctgaaatgagggggacggaattcacaatttatttgccggggacaaaatgttcgatttcgacctcacctcagccccaacgatttgacaaagctcatcatgtcggtggaatgaatcaacgagtcgatgaccttgcgcacgaccacgtcctgaaaaggggcaaaaatcggcaatttttgaaaatgggcaaaattttctgaggggtaaacgatgcgtttagggggaggaaaaggcaatatcgcaaccaaaaattgcgtttaaatgcaaattataaaaattttacacaaaaaagtggctaatttttaacatgcgttggtcatggaacgggaggggaaacggaatttttgcattcgtcaaaaaaattgaggcaatttttgtaaaaatttggggggaaaaatcaaaaatccttttacagactgatgaaatagcgaagaatttttcaatgaatttggaaatttggataaaatttttacaaattccatttaacaatttttgcgttaagaaaaattgccaattttgtaaaaaaaaaatttttcaagggataaattcttatattttaaagtacgaactctttaagtgaataattctaactgtttttgccaattttatcgtttttcgacaatgcatgaagcctctgggcggcattttcaatatcccatgggtttttttttgccatttttttgtaaaaattttatttggcactttttccggcaacgttttggacgaccccgcccggctcatcacccgccttaatgtgtgcctcgggttgggacacgtaacggcagtgccaatgcacagtgtccactttgaaacgacggcgcatttgcacttggacaggcgactcaatgcccgtctctgaaattgttttagagcaatgagaattgggcaacaaatcggaaaatcatttataattaggaaaataaacgcgtgcaaaattacgggttgttaaacattttgctggaactttaaaggatcgctgactaaaaaaaaaagtcatacattccagcgaattcatcacccggaccaaaattcgtaaaaaaaaaaaaaaaaaatcgaaaactcaaatttgtgaaatccgaatttttgggtcgaaatatttactaaatacatgaaaacgaacagaaagacatcaatattgtaatgcatgatttcaaccggacaaaaattaaattttttagttgtacggtttaggtggcccaattttttgaaaaaaaacaattaggtctgcaaaaaataattttcaattttttaaataccaaaacggacccctctctttttcaaaatttggtccacctaaaccacatatacaaattccgaattggcttaaactgaactcagcttgaacaccatgttgtgctcaaaaaagggcgtcggtccgtccgggtcgcacagacccttcagccgttggatcagttggtctttctgatcgttgaaaatgctgccgaacagcacgcactccgtgctctgatattggctgaccgggggccgacgaacggacgcggaagaagcggtggcggaatggtctttggcaccggcggaaagtgccgaaactccgctgccaatgccaccgccgtaaacactcaacggcaattgagaccgattgttgagcagcatggaaaatgaatggacaggacaacaaagagggaatacggaagcaaatatctaataagtctgtattgagaaagaaaaaaatcttaagaatatatatatcaaatctcacaaaaagcattttgatcttttgtttcgttaattaatcctagcccaagcttacctaatttgaaattattatttttttatggcattttgccaataacaaaaaattttgctttttttgtgcctttggcgaaatttaaagccgtttacccatggcaaaatgactaagggtttgacagaattgaccgggaccgggcttccttcggga

SEQ ID NO: 17254 - DNA, 796 bp, Heterodera glycines
gttaaaaaattggttgtgcttcaaaaattttcactacgcataaaaaatggttttttttacaacagcaaatgcaacatcaaaaccatcaaatgatgcaaaacccgcaaatgatgcaaaatccgcaaatgatgcacaacccgcaaatgatgcaaaatccgcaaatgatgcacaacccgcaaatgatgcaaaatccgcaaatgatgcaaaaccagcaaatgccgtttaaccagagtggcaatttcagtggggttggcatgatgcctatgttgcaccaaaacatgggagcaatgggcatgggcatgatgaatgttggcagtaccagtttcggcaatttgcaacaatccaatatggttcagtttcaaaaggcgatcggggaagacattgtcggggatatcctggagaaatattttaaaaattgttgtggacatttttcattaaatgaaaaaatcgggaggggcccggcagtgccgaaatgcgtcgccttgggaaaaatagaaaattttcatgtttttagccgaaattaaacaaagaattttcgtgcttattcgctaaacgatagtcgctgaacaaattaagaaattataaaaaaataaaattaacgactaattcataacagtgataaataagacattaaatttatattgtttcatttaacagaacaaaattttcccataaaataaaataaaattgtttggtttttctccaaaaaactaaaactatgtttggacttcaaaattattcttctgcgtaaaaaggttttttttttaattttctaaaaatattctgacaacactga

SEQ ID NO: 17255 - DNA, 990 bp, Heterodera glycines
aactaaaaatgctgtagtaaaggcaggaacaaaaaagaaacaagatacagtggcattgctgttatgggaaaatgatggatatgactagggctgggaattatattggatataaaatccaaaaatatgtccataaaatatggaccaaaaatcgcaaaatatgggcataaaattacaaaaatatgggtcataaattttccggattggagggaaaattttccaaaattttaaaattaattcaattttactaaatacatctaaaaatggctaatatggtattaaaatcagtttagaagaagaaaaaaaacatgttaaactcgggcaccaatttttagtttcgaaaaccgttaaacctaaacccacaaaaaagtatgctaaatttgatgatgcatatttggggatgccattttttaatacagattaaaaaaaaatcaattttgttacattgccgaaaccagctgttccattgagttttgcggaagagttcaaagtggtaaaatcaaattttgtgggcccccattgtggcgcgttaatttcacgttatataataatatccagatgaaattttgcgtattacaatccccgaaaatccattttacatttgccaagaaaccaaaaaaacacattcatgttcctaaaattcagacattggcccgttcgatattcattgacgcgctctatggacgagcatttctgttggcagtgttgttatttgggaagttggaacgtctgtattggtctgcatcagaaaaatggccgaaatggcagaaggcaccaactgataaaaccaaagaattgagtgatgcgttcaacgacgcatcacgtctgttcctgttgcatggccctgttcagctgtgggaaatcagtcaagtgtacagtgatgccatccaaaaattcataacggaagaaagacgaaaattcacaaaagcaaaatcggaagtataaatatcattagggaattcgaaataatacagaaaaaagtcgaccgccagg

SEQ ID NO: 17256 - DNA, 2739 bp, Heterodera glycines
aaaagtaaaattactacaaaaattgggcaattttttgctttattatataaattttatttggcatttctatcacatttttaaaaaaagatacaaaaataaaagtgattttggggttcgggaccaaagggggtggacaggatttttgagtggaaaaatttttccacccaaaatctttcaaaaacatgtctttaggcgttatttgggccgctgatcacgaatacgtgatcagattttacttttgacatcgtcaagacctcagaatccctgtgtgattggggattctgggacatgttctgaggggggagggggcaggttcggatccggacggtgtaaattattttcgttatatttatggttatttaaatgtttttaacattatttttctatttatttttgagttattttcaatgattttaattaatttaaaatattttgttgagttaataaataaaaaattatatttaatttaatttttttttgataaataaattttataagtttaaattaattattttttaattgatagaatttcatgtatttttttaattaaatttgttaaaaaatattttcattttaatttaatgaatttactaatcactgttgtaccacttttaatcaattctttagtggttatttgggccgctgatcacgaatacgtgatcagatttcaattattacatcgttaagccctcagaatccctgtgtgattggggattctgagtcatcttctggggggggggggggcggcaggttcgaatccggacggtgtaacattatttttctgtgcatttttacgttatttttaatgattttaattaattttaagatttgttataaaattatttaattaatttatttaatttcattatttatttttatgaatttataaaaaatgaatttcatttcaaaataaatattcaattattaattttcaaaattatatttaatgaataaaaagagtattttattataaaaaaatttttaaattaaaatgcattcgatttttataaaaacttttccttatttattggggtgttcggaaagttctttcatacgaccaaaaatttcattaaaaaaatcgtaacaaattaactaatgaaccaattttaatcaaaaaatgcccaattattctccacaatcttctcccatttttgagaatttaaaaatgatctgtcgattaaattcaagatagttaaactcaaataaactgatcggtctacttaaaaaagtcgccaaattcaaccactgatttcttggccaagaaaaggctaaaggcacaaaacaaattatggttttgtagagcaaagttgggactatctgacaagctgaaaaagagtcaccaagaccgacgagttatttctttaaattgtcctgtctgaaaatgggtgctcaaaagtgccaagattcagcaccctctttgtacaacattgttctgaaaggacctaataaaatgaaattgatgttttcatgggcaaaccaaacccggagaatccgaatatcgcctcagatttagtcagttgctgttctatgaccctgtactgcttcaacttcttgtcaacgacatggagcagtacaatgccagagaaaattcagagatcaaatctgaggccagatttggattctccggacttgagaatttttggaattttttaaaaattttttattttttgacaattttttggccctcgggattttggcctaatatttaaaaattcataacaaatcgaagggttgatcaattttacaggaataaagccttaaaaatagagaaaaatcaggagaattttatggactttatttggaatttctatctaaaaaaggaaaaaagttattccagaatttctggaaaaattcgaattttcagaaaaaaaaatcataactcggttctgaaaagatattctggaaaaataaaatactacaaaaatccgcaatttttttctttataatataaattttattttaaatttttatctcttttttgcgaattgttataaaaataaaagtgattttgtgcttcgggtccaaaggggtgagcatatgatttttgagtgaaaaaattttttcgacaaaaatcttccaaaaacatgtcattaggggttatttgggccgctgatcacgaatacgtgatcagattttacttttgacatagtcaagacctcagaatccctgtgtgattggggattctgaggcatcattttttgggggggggcaaagttcgaagccgggcggtgttcattatttttctttgtatttttgggttatttttaatgtttttaattaatttgaagattttataaattatttaattaattaatttaatttcattatttatttgagggtgctgatcactaatctgacatcagattttagtttatacatcgttaagacctcagaatccctgtgtgattggggattctgagtcatcttctgtggggtgggggcggtaggttcgaatccggccggtgtaaattatttttctatgactttttacgttattttcaatgtttttaactaatctgaagatttgttgtagattatttaaaaaaaattttttacagtaaagaatttaattatttattttttgaattttctaatcactgttgcacctcttctaatcacttttgtacctcttctaatcgcttttgtacttcttctaatcacttttgtacctcttttaatcacttttgtacctcttttaatctctttttacctcttctaatctctgtaaggcctaacaaa

SEQ ID NO: 17257 - DNA, 1848 bp, Heterodera glycines
  unsure (1)..(1848): unsure at all n locations
tgttgtgttcgttaattatttgaattaacgccaaaagatgctcgtttatcgatcattattttgaccccttcgttcagtccatttaaacccgcccttttcccccatccgtgcatttcttcctcatttcatttgttgtatttccaatattattgtgaccccgctctctcccctcgctttttatattatatttatttgtgttgaaataaatcaatatttatttcattgactgttgacggacacaacaaaattttttcactattacacaaattatttattatcaaaatttaacaaactgtctggcaaataattttgctttaatatgactatagacatataaacccataacaaaaaacncncgccgtgcagattaaaatatttctttaaaaaagtaatattaagcctagcattaaatatttaacaattttgcaaaaatttatttaaaataaaaaatgctaatcaataatcttcaatttagccaaaaatatatttttatttccttgttaatattgactgatttatttttacattatatgcaaaaaataatatgaatatggaatatgctgaaaattctcttttttatataaaatcatttatatatatatatctctttttattttatactttttatatttttgggtttccgcctctgaaaatattagttcgacttaatttcagctttaatattcctaaaatataaaaaatctattttttttgaaagtgagtgaatttcatttattatttcattatagaagagtgaacaaaatggtagtcttgatgttgcttaaagccatgataattattgttttaatatgctatgtgattagtaatgacaaagaaaaggataaagcccatacgagcattggtaatagtaaagctcataaatctgatctatattctgataaatctaatcttcaacctgatgatgctcaaattaatcaacaacatcttaatgctaatcgagatagtaacaaattcgatcataatcataataatggaactaataccaattatgatgctaatcaacatgaccaacatcatcatgctaatggagttgatggtgattcggatgataatcagcttgatcagctttatgcaaatcaccaactcgttcaattacatgcaaatgggaacaatgatcaccccgaaaatgacaatcttgatgataacaataacagtgataagtcaaaaatagttgaccttgacgatgaattttgggatcagttgcctgagctcaccaaattgccagaattaaatggagtagagtttgttgggaatcatataaaatacaccaatcaaccaaaaagcgacacgcataaagacaaggaaattaataacagtaaaagaaccttatcttagagaaatttaataatttaattaagtttcggtaaagatggacggaacacagcagaaatcaatttgacattgaaaaggcaagaaaatagctgattaaatgctatcaaatgaaaagattatcggggttttaggttttgaactggatcactaaatctacacaatcatttctatattttccttattttcctgagctaaactttgtaaaagtgatatcatttctattcatgcataaaatatttttgttctgataaaccacaaaatattttttataaaatagccaattttgattttgcttggttaaacaaatcccaacataggtgcttttatgtataaaaagagaactctatcataaattcttctcattgaattaatcgtgaagataataacggtnggcgatcatttcgtcactgttcaattcttcacagntcatttcgactgagaaatatattttttaaaattggctaaatatcgaaaaattttattttatatcttttt

SEQ ID NO: 17258 - DNA, 1190 bp, Heterodera glycines
  unsure (1)..(1190): unsure at all n locations
gcacttcgggcgctcgatcagcttctnccacgacgggttcttcagccacggctggtgcgatgacagcagcgggtgccactacaggcaattgcgcttgtccaccatgctgaaccagcggtggtgccaatggcaaatcaaacgcatcattgaacacgttcaatgcatttgtgccgttttcgtcagtgcttctcacaagcaactgattggcatggaaccgtccgaattttccgtcaaaaaattcgacgtcgtaaatgacacctttacatttggtgacttttccggggcgccaaggctgagaaagacgatgccgagcgagaaccttatcgcccacggcaaaagatctcggtttggctccatggcgcctattaaattgcttctccatggcctcgtctcgaattatcggtgcctttggctttggcctcaacaagtccaaagtcgtgcgcggtttccttcccaggaacaattcggccggacttttgcactccggcaaagcctcacaaggcgtggtccggtatgttgccaaaaatgtggtcaacatttccgaggctccttctcccttgatcttccggcatgtcctcttgaacgtatcgacaaaacgctcggcttgtccgttcgacatgtgattgtacggagcggagaacagatggttgatgccattttcggtcacaaattccttaaattcttttgaagcgaattgtgtgccgttgtccgtgactaaaatttcgggaaggccataactggcacagagtgatcgcaatttgtcgattgtagccgcggaattcgatgaacgcatttcgaagacctcaggccacttcgagtatgcatcgacaattatgagaaacatttttcccataaacggtccggcgtagtccaaatgtacgcgtttccatggtccgtcagattttggccacgagtgaagctcagtcttcaccggcgcttttgcttccattgtgcattcgttgcacattttgacaaaattctcaatttgttcgtccatcccaggccagtaaacgtactgcctggcgagacctttcattcgcttcattccgggatggcctcgatgcagaagttgtaggacatctttttgaagcgatgccggaatcacaactctgtccgcgtaaagcagacattcatcctcgatggtcaacgcgaatggtcgtcgatggaacggaacaatgtctgcggccatt

SEQ ID NO: 17259 - DNA, 3118 bp, Heterodera glycines
  unsure (1)..(3118): unsure at all n locations
tttataaataaaatccttgttaaaattaagtcccaaattgttttgttaatattttttgacctttttctccttttctttccaatttttcatttaatttaatttttattttgtcatataattgatctaattgttttaatatttgaagtttttcctcttccgaatatttattattcattccaaattcactgttccattcaaaaatttttagccgcgaatttttgtgcaatttttatttcaattttagtccattctttttttgaaaatttcatttccatttgcttaattttttccttaattttgttaaatttttccacaatttcttttcttttgatcaattgcttttaaaaatgatcagaattaagtccattatttgttggcaattgttcaatttgatcactatttgttgaagtttctctttctatttccaaattttcattaaataaatgattaaattgttctcttgtaataattgtataattttttcatcattttttgtctcattttggccatccgtttgtccaattatcccattttgatcagtttcattctttccattttcatccgaattttcttcccatcttttgccaaatatttgatcataactttttttcttcctttattccaccagcataaattttattctatctattatattagattattaaaaaatgtataaaaagtatagtttataaagtaatatattagtaatattaattctataaatcactaagtagaagtgtgaagaaaatcattataaaaaaacaagtagaattttctgaagccaagcaataaataaataacagcataaataagggaataaaaatgaatttgtaaaagtatttgtattagattttaatggttttattcagaaatatgaaaattaatataaaatgaatataatttataattacaaaaaaccttaaaaaataaattgatttccttggattttcatcaaagtatgattacaagaaagccctaagtagaattttgaaacatcattataaaaaaataagtagaatttgcttaaataattagcaaaaatttgagaataaaaccaactagaaaaagaatttttttattaattttattcagaaatatgaaaattaaaatattattttcaatattaattttcataaatgcaatttttaatatttatacgagaaagataaacgaagaaaaaagcgttgatgaaatatttggcctgggacgaaaaatcggaggaaaatggagggaatgaaactgatcaaaatggaacaattggacaaaaggatggccaaaatgtgacaaaaaatgatcaaatttttgatgaaaatttggaaatgaaggaagaaagtgcaagaaattgtgatcaattggaacaaatgcatttttcaaatgcaattgacaaaaagaaaagagaaattgtgaaaaaatttcatagaattaaagagaaaattaagcaaattggaaagaaatattcaaagaaagaatggcaaaaaattgaaagaaaaattgcaaaaaaattgngagtaaatcaaaggaaaatttacaaatggaaaagagaatttggaatgatgaagaacaaaaattattcagttgaagaaaaaagaataatgtacttcagcaaatttgatcaaatatatgcaaaattaaaaatgaaattacatgaaaaattggagggaaaaagagaaaaatgcaaaaaaataatagcaaaacatttgggcatacatatcaaaacaattttttattggaagaaacaattaaaagttggaaaatattttataaatcaaaaaaatgatgatgaaaaaacggaaattgttgaaaaatatttagaaataaaaaataaatttatgaaaaatggaaaacgaaaagattggaacgaatttacagcaaaaattaaacaaatctttggtgtgcataataaaacaattgaaagatgggccaataaaattggaattaatcaaaagccgctaagcgatcctcatagtttaggaatatgagaatttggaaatgaacaaataattaattaaaaacgatattgttttaaatttaatttaaatgcgatatttttatttaaattgatttaaatttatttttttaattgaaatagcttagctatttaactttatcttcctcttccactttctgttcctcttccactttctattcctcttacactttctgttcctcttccactttctcttccactttctgttcctcttccactttctgttcctctccactttctcttcctcttccactttctcttccactttcactttctcttccactttctgttcgtcttccacttcctcttccactttctgttcctcttccactttctgttcctcttcctctttctgttcctcttcctgttcccctttctgttcctcttccgctttctctttctgttcctcttccactttctgttcctcttccattttctgttccactttctcttccattttctgttccactttctcttccactttctgttcctcttcctctttctgttcctcttcctgttcccctttctgttcctcttccgctttctctttctgttcctcttccactttctgttcctcttccactttctcttccactttgttttcttggcgatgtctgtcggcactgccgaaccctaaaattatggttattaatttttggggaaattctaattattatttatttatgttttgtcaccgctgtgacgaacgaattggaaagaattggatttttaaccattttttattaatcaccattatttgtgccaatttttggcttatttaacgattaatcactcttatttactaacaattttccatatgattgtgcccctcgccccctcattttgtaccatatttaaccctccatttgtaccttccatttctactccagtcactattcacacataaccaacacaaatccattcacatttcatttaatcaccgataaatctgcaccaactaatagctgtcaaccacaaattaatcactaattaattactaaatctgtacttgttaataaggggaattaacaaattggtgccacgaccaactaaaaaaaaaataaatgtcaaaaccaatacgcatgcgtattaatccatcatggagaaatctgagagaaagattaactcaaa

SEQ ID NO: 17260 - DNA, 953 bp, Heterodera glycines
ccacactgcggaattgcagctcttttttgcggcggaatacggcgggattaatccaaatcttatctttactaataattctatcaatctagttgttgaaagttttctttttcatacggtcttcggcaacccgactcttcccccccccgcccccggcctgctgatgttagcatggaaagtgtcgaagtgcgactctaataaaatagaaaaaaaacattaaaatgattacatcaataaaattgtaaattatgcggaataaaaatatcaaataaactaattctgataattccttcatcattttacacgaaattggatttatattatattgtaattattagggttataagttgtatgattttgaatattttttctgcgcatatgctatgaagaaaggggctcaaaaatagcatttctacgttaaaattttttgatttggtgaaggtttttagtgcatataaaagcatattttggggttttcgagaataaatgtatatttggccatttttgcgttttgagaacatatttcggtcattttggcaaattttcataaggaaaatgccaaaaatacacccctaaggatcgactttttggaattttttaaaaaatacacccttaaaaacagaaaaaattttaatttttgtaagaatttttggaaaaaaatttatgtatataaaaatgtaattttgttttatcatataataaaatttataaatttgtaaatttcaatatttttgcaattgtctaaaaaatgctccttagcccttgttttggtttatacacaatttttggcattttttgagggctaaaagccatttttggcagttttttaaggcatattttagtgcatatttgggcatttttcgggtttttagggcatatttgggggatttttagtgcatattttatgcgcatatttggcattttttagtgcatacaacttataaccctagtaatta

SEQ ID NO: 17261 - DNA, 1662 bp, Heterodera glycines
  unsure (1)..(1662): unsure at all n locations
ctcccccccccccccaatttcgcctttccccataaaagcggcgattgattcctccgaggggacaaagacccatttgggtggaatcaatcgagtgaatgaatgaataaatgaggcggggggagggtgtcgggagggggacagtctcgactctctcgactcatttcgtcagcggagatttgcatcatatggcggacattggaaatgcaatggacagcagcaccaaacggagtgatagtgataaagtgaatggagagagaacagtgataagaaaaggggggaaaggggagggacagagtgactttggcatttcaccgaatgaatttaatttaattactatttttttgtaaatttaaatggaaaattactcggctcagctgttgaaatgtgtggtgagtaattgttgtccgcccaatgttttccaatgaatcagcgaatgaatgccttctcttttcctatttttctgttcgttttcccattttcgtaattacggtgactaattaattatttttattcaaaaaatgaaaatgaaaaaacagaaaggaatatacataatacaataacatttggtgaaaatcaacatgagtaaataagggatgtaaagcttttaggcattgtccgtcttccttcgcttcgctttctttcaccacattctcagtccggtggcacttccgtttcttatcatcgtattcttttcgtccgaatgcaggtcgggtactgtaaaatgcaaatttagtttaaatcccgaaagggaacgaatcacccgtgggacttggcaaatcggccgattgttggtcatccaacgagtcgaacttggtgggcaggagcaactcacgttgggaatcggaaggcaaaaggacggtgggatgctgtggaggtacacggtaaataaacgaaaaacggtaacggaaggtacggtagaggaaaagttaggaaaattaaacaaaaatataaacggatgagcaattttttcacctttttgccaagattttgctgctttaagtcgggcaaagcgtcaaaaagaattgaagcgaaaaaagtggacttttctagagttaaatttaaaatttaacaattgaaattaaaataaataaagagaaaattgaccatttaaagaggagagaagagaattagtgccattgggagaacggaagaagacaaagtaaaagccgaggccaagcacacaaatggaaatgccaagcgaagtgacggcgaactcacgccaaattgggatggccacgagaacgatgttgatcagaaggaagagaaaaatactaaaggaaagagagagaaaaatgatcggaaaaggaaaagagaaaggaagagaaaatggtgaaggaaaagagaggaaaagtgatcggaaaaggaaatttttaaaggaattgatcaaatataataaaaggaaaatttaaaataataagaaaaagtgattaaaggaggaagaggaaatggtgaaaagaaaaaggaaaataaaagcaaaaataataaaaggaaagtgatcagacgagaaaccgaaaccgaccaaggcaacggaattcgaatgggcgtccgaatggacggggatttgacgatagcgaatggtcagaagagcacaaagagtgaacacacgttgngcccaaagccgaacataacgtagcaaatcaagtgaggggggggggggggggg

SEQ ID NO: 17262 - DNA, 898 bp, Heterodera glycines
  unsure (1)..(898): unsure at all n locations
tctagagtctgaattctcttgctcccgtctctttttttcttttattcccttacgtcggcgcgtgtcgcccctctggcgccgattgattttattgccattgacgtgccaattgctatgggccgtcgcggatgattgttgtccatggacagtggagagcggccaattttaatgcagggccaaaaagtgaccaccgaattgtgcccgacgacgaatggtcaacgtttgccaattctcccccatgtacacatagtgggcgattgttgggcggaaaatgccgaaataaaaaagggagcgtaggcggcaggaattgaacccaggatgagaatggcggcaaaggcgagcatacaggcgaccaaccgatcctcaatcctgcaatgccgccaactgttaccagcagtgatcggtgccgcaaaaagtgtactaccgcactcactattcacctttttgcactactttttgtccaaaaggctaaatgcgcagaaatttgtgtccactttgctcagcgtttgctcaattttgattttgcatgaaaccagaagacagacagatttttaggaaggaaatagccaaaaagcaaaaaattttaagacaacggtctttaaaaacggcaaagcaaagcaatgattggaatgtaacaataattacaaaaagaggggggtaatgaatggtggtatcattggaaagtccacaaaatgtaaaaaaatagaaaaaaacagtcaaacaaatgaattaaataaaaaataaatttaaaaaattggtaggactaaagatatggccgtgactgtagtacaaactgaagtgttgttgaggaacacatgcgcagttggaggatgcctacgaacaaataacatcctccaccaaataggcaactnttttattttgtacccctcctcttttc

SEQ ID NO: 17263 - DNA, 1020 bp, Heterodera glycines
tggcaaccagtcaatggaccaaaagaaagaaattcattggaagttgaatcagtcaaagcgctcttactggtgaaggtgacttttgatctcacctgcgcggaaatgaggaaaataatcagtgaaaataaaaaaatatggaaaaaatccattccggtgaaaaatacaagccatttgaataatattattgatttttcattgcatataataaaaattttaaatgtccttggatttcatgaattttccacactatgtccttgcaaatcggcatactcgtccttggaaacggagcatggacgatggcagccctggtattatgtaatgaataaaaattcgaataaaagaaaaatttgttatgaaaagcctcagaaatggattatttaatattttaatccgtttttaactgtacaagaaaaatttttgaaaaaaaaagttctggtctcgagtctctacctcgagaaaagtgttggttttttggggctcgatctgaaatctcgagaaatttaattttgttgcgggacgggaatcccgcgcagaaatatcgcaaatcccgcgggagtcacgctcccgtagatctatagttagttagaaaaattataatcgctctttcatttcggtaacgaacaatcatttcaacacggacaccctgaaaatcaatgaaaatcggaaatatttgaaattcaagactgatggttatccaacacatatctcatccaagcgactttctcttttgcttgttgttaaggaataaatttgttataaaaccaatatgcatacttttacatacctatttcttattggccacttttttggctttctttttgtacatatctgcagctttatcgggcttttatcacctatttctccctatattaatacttttcgccacctatttatgtacagattgttagttattttgctgttttaatcaccacaaaatactaacttaattaattaaagaaaaaacgattactacttgtcacgaattcgtcacaaattctcacaaaatggattattgtcatt

SEQ ID NO: 17264 - DNA, 1887 bp, Heterodera glycines
  unsure (1)..(1887): unsure at all n locations
tatcccattttaaagtacacagattaaaaaaaattcttttactaaacttttttattttttaattatacacacaagataaatatctgaattgggtggatttgcatatccgtaaaattatcggggagagggagataaatttttttttcaaacaatgctaatttgtcagttggttaaaatttgtgtttgcggctcagaggttcaagcccatttgcctgcaaaatattaaaaaacgagcggttgggcgccaaccgctctattttaatttttaaaatgatgtaaaaatttttttaaaaaataacttctttccatcgtggcttcaattttcttctctcctattctcggtcttcttctctcatccatatttttctttctttctctctcactcactcactctctgtattttctccctttctcactcactctatcccagagctgcgatctcaaaattttgaaaatccacatttcagccataaaaaatcctcatttgccactaaaatacctcaaaaaatcctcatttggaatgaaaaatactcattttttaaaacatcataaaattgcgatatggaaaatatggatatagaactccttcatagaggcttcaaaccaagctaaaaacatgtttttcatgcgtttcaggcctccaacagtacaggaaaaaaatatgaatttccatataattacaaaccctattataagcattttatggaagtctgagctcganaaatcgaagttgcacttcacttcggccaatgctttcactgtgcatctcttaaattttttgcttttaaattgctcttttttggtgacgtggttttccaaaaaactttttggactggggagggggggggggggggcgcccggggcagtgcccagataggcgctgccagaaaaaaatttgagaatttttgagtgcgatttgttaaaaatttttgtcaaaaaaaatgattttgactgagtatttttcgaaatgtttaagatttgaagaaaaagttcgaacattttgccaaatatacctaatttttcaaaaaatcatgcatttttgtcacttttttgtcaaaagaccacaaaaatacgcaaatcctcatttttcaaaaaaatcctctttgaccctctaaaagaccacaaaatgagtaaaaatactcagatatcgcagctctgctctatccctttttctttttgactgccgatagcggtcagttccgtcccgggggaccgtaccgtgtgccgcgcgcggtattccaagcaccccaccgcaagttgttcgaaatagtaaatatataagaaaaaatttatctctcaaatcatgagcccttctcagaactaagtattgagttgcattattaacatgtaaataaaattttgtgcatttctgagtactttcttaaaaaaaatcttatgaatagattttgcaaaaaaaaataaataaaatagtggaaaattttgtaaaaaatttttttttaaactaataagcgttgaaaaaaaatgcataaaattttacactctctcaattcccctgctgatagtatcacaaaaaatttagtttttatacatattcaagcatacaataagacaaaacaattgtatgaaaaatgaacttgttcataattaatcttaaaaagggtcggacataaatcgcggaacagtcatacatacgtataaatagaaaataaatttgctctccttaaattacggtttttccattttttggaaatattgaaaatccaaaatgaccatgccctctgtgatggtagacaaacaaaaaattcacatcaattttgttctctacaattctgtttttgttgaagttgtgccggtgttgtggttgatgtcttagttagtgccaatgacattttggcatcccctgccgggggaggcaagacaaaagca

SEQ ID NO: 17265 - DNA, 1323 bp, Heterodera glycines
agcagccatcgttgggccccgagagttgtggtggtggtagcgatgaagggctgctggtggagcgtgcaatttaaattggtgccaaattttgcaatttgttggcattgtatggcggcagcagcactagacacagtgtgatgatgagccgccggtgctggtaatagcatataatgactgtgggctacagtaggaccagtagccggcaactgaacgttgttacttggcattgcaatgcctatcggatgagccggagatatgtgctctgaacatttaatttgtttttttttaaatagcgatcatgttgaaatgtcaaaggtagggggaggaagtcaaccaaatttttgggtgcactacgttccgccccccccccccccgccggttcctcccgacccgccgtttcaccccctcccccgaattttttttaaactgttaaacttagtgaattttttataagctttttttcaaaaattctctaaaccggcaatcaaaaaaaattttcgggggggggggggagcggaacgatgcgggagggtgtgggactgagatggtagggaacggcgtatggaaacaagctgctcccattttttgaacaattcaagcgatgtaaatcgaagattttgcggttaagttttttcttctttttccattaatgtttttccaaacatgaaaacaatttgcacaccgtttgtacaatacgcctgacgctgatgttgaagaacaaattgtgatggcgcaacaaactgttgttgttgttgttgttgatgatgatgatattgttgcatttgcggcactccaattggcaaaccagcactggcacgaagattgaagcatggctaaaataaaattgctttttaatcatttaaataaataaataaaagaatcaaaaaatagttggttctaattgttggagcaactttggcggatgttgtatgaaaacatttttccatgcaacccccagccttaggtcaaatcatccgttgtatgtggtgtttaattgtgcatgtataagaggggggaggggaccccgtttcaatttgcgatgtttcacgactcttttcaatggcatttaaaatcttttatatctatgccaatgtgtcccctagttatgccatcaagtaaatgaacacacacaccatcacaaatttctcctgctgctgcggttgttggtgttgctgctgcaccaattgaactgtttcaacgggttgttgttgctgctgttgctggtggtgttgtttgtccattgtccagctgaacctgttctcgtactggaaccggcgctccgggttgctgtcccgtgcctgttgccagcacatttttcgttgc

SEQ ID NO: 17266 - DNA, 2784 bp, Heterodera glycines
ccggcacttccgatttttgtcgatcgttgttccaacttcatcaaatcgtcagcaaaacaggaccaagagcgcacttcaacttaaatttgttatttacttagcaactaataaaaacaagagattaaaataattcatgttaaggaccgatccggctctaatgcacgctttatgagtccaaaagtattttatgagtttaatcaattaaccatccctggtttttatacaataaccttgtcatatccgataaaagtcgattggactcataaagtgtgcattagagccggcatttctctgaccccacccttgcacagttaaaattaagaaggatgagggagggagcggaggaaggatgagggaggggagagcgggaggaaggggagcgggaggaggaaggatgagggaggggagcgagggaggggagagagcgggaggaggaaggatgagggaggggagagcgggaggaggaaggatgagggaggggagagcgggaggaaggggagcgggaggaggaaggatgacggaggggagcgagggaggtgacacagcgctggggtggctgctgctggtcaccaccatttgcggtggtaccaccaccaccaccgccgctgccgattgatgcagacgaaatcgagtcgatggctttgaacaatgggcgaatgtgtgccgtgttgtggtgggacaacagtgcccagctgctctcaaacttttcatcgcatgaaatgcagcccaacacgtccggctcattggctgcaatatatttttttcaaattttttccctcatccttaccaaaattgaaaaataaatgaaaaaaaaaattctttttttttgtaatttttccataaattttcaacaatcagtcgatttatagtaaagtaggacttattgttaataacaagcattttatttttatcaatgaaaaagtctacaatttgtctaaatttcaatttcaataatttctggggttcccaattgacctattttggatggcaatttgcaaggacgctttcggtgctccacaaactcggccaaactgtgcgtcacgaaacggcaccctccgcaaatcaatgtgtcaagaatttctgaaaaattttgtttgaagttagttgaataaagcaatttttttgatgagtggaaacggtgtattccccaccctccaaatatcaccgactaaaatacagcaaatataaaacaaaaattgtcaaaaaataataaaaaatttattgtttaagtgtattataattaaataagaatttggaaatgtccagaaaaaaaaataaatttttttttgttgccctgaaaattccttaattatttttgccgaaggctaggtaacgaaaaaaattttttttttctttgcggcgaggcttccctactccagggacgtaagtggggcggcggtgtgcaaaccgtgccattaccggcattcgcatgcggcggcacaacagtgccaatgccagcgctgtccatttgcgcagcgaatgctttgtttgcgccattctttggcacgctttcggtcaccgacccagcaggtgctgctgctcccccgcccgtcccaccagtggccgtgtcaattttcatgcgcttcaagtccttggcagccgcctcctgttgtggctgttcatttttgttgcgcttccttaaattggggacgacacaattttttttttatttgaaaattttcaattaaaatggacttttttgatttttttaaggcccatagtccataatttttttttaattattcgatttctaacccgacaatgctttttgtaggagctccaattggaaaggcgccaaaaatgggtttcagcgcttgcgcaggcggcggcacaccgggcgtcggttgttgcccatgcattgccaatttcacatctgtcaaatgtgaaaaaatgaatgcttttaaatgggaaaaccgagttaatatttgcactattgaaacgccaattttacaacaaaaaaaaggaaataaaattccagcgaatctcctctatacggtttttgaacacgacgaggtagtcgctttttggaggcacccattctgattttcttctagaattaagcgggtccgggtattttggcaaaaaaaaaactgtccgggtactaccggatacagaaaaaccaggctcgggtccgatggcccaaatttttactgggcccgggtactgaaaaagtcaggtgtcctggttttgacccggtcgggcatacgggcccgtataaccctactctgtactatatatactttagcgatggcgataagaattttcaaaatttttgttaggaaattggcccaaaatcttaattaaaggcaatttctgctgattacagaggcctaaaaatttaaaagaaatgtcattacctagtgttgcgccgtgccaattgtatccattcagtgcggagaccgacaaatccgcctcggtgccgtacgaaaattggacaaatgcgtaccctttgaacacggtgacgcccaacaattttccataattgctgaacagttggatgatctcctcccggccgacctttgacgtcattatgttgcccacaaacactcgagccctaaacaaagcaaaaaattattaaaaattttgtaatattagacgaaaaacagagtaggaagcatttttcagtttaggtgggacgaggaaataacatagaaatgactcgtttgacttgtattttttggagaaattttacattttcggggggtctcctgatcatgaatatgctcctaatcatgaatatgtgatagattagactttattatgatgaaaagttacaaatcaaag

SEQ ID NO: 17267 - DNA, 1009 bp, Heterodera glycines
  unsure (1)..(1009): unsure at all n locations
attaattaaattgatgcaattttttaatgatttttaactccttttcaacatatcnnttgtggntttaaaaaaaaagttcttggctttcccccctccgaaattttttctggcaactgaatgaatgttcgttaaatatcgtcgagatgccgattttataccccaaaaattttaatgtagggcccaatgagtgctaattaaattaattaattattttttttcaactttcactaaaagatttaagcctagaaatagtgagaccttttcttattttaagcgaccagttgctttgatcaacagcagacacaaatcggtcaccgtttttcatgcggactttactcaaagcgtaaatatttatttttgatttttatatcacaaaaattcgaaaatttagctaaaattaaataaataaagatttaaaaaatggcttaattaattttcaatatgactactaattttgtttatatgcttaaggaacacccaaaaataactaaggacaagtatcaacaaatttgggagttggaagaaaatccgattgtgatttggcacgatggttcagttcatttcaacagtgttcgattggtaaaatagagaaaaaaaattgggaaaatcgtacaaaatataaaataccgtatttcttgtaatagagcccccgggggctttatttcagagggggggggggctattacaggaaatacggtattttaaattcttgtttcaatacaatgctgggtaaaacagttcagggtcgagctctctttagctgaatttatttttcaaaaaattctatgaaaattttgggtttttttcttactgaaaattaaaaatttcaaattttattaaaggttaaaagtggcttgacccggagcaagagccagaaattcacccaacatgtttcgacacttctcgattgtttctcaccatttaatgtgctccgtaatttgaaactaatttaaaaaaaaatattttttaattaatttgggaaagaagagcgctaaaatttttcgactat

SEQ ID NO: 17268 - DNA, 2189 bp, Heterodera glycines
  unsure (1)..(2189): unsure at all n locations
tagaaaaactnattccaaaaatttcataattttccgtaatggtagaaacataatatctagagctcgaccttggcatggatccaggcctggatttttccttgatcaagatccagaccaatcatttttgggctacctgggtttttcctggacctggattttcctgggtttttgtacaggaaactccaggtaaaatatgaaaaaaatccaagtcttggtccaaattaggcacaaaaacctggatttcctgcataattttgcccaggccaggcaattttttggcagctgggtttttcatgggattggatttccctggatttttgttcaagaaatccggtccaggttaaacataaaaatccaggtctaggtccaggttaggcaagaaaaaacctggatttcctggataataatgaagaatttgttatttcgagtgaccatgtttcatttcaattttcaaaaaatagttaaatagattaaaaaaaattattattgttggttatccaggcctgaatccaggccatgaaaatcctggagttttcatggacctgggtttttgtccaggaaatccaggtccaggctttttttctaaatgacgaactctaataatatcctttattttgccaaagtcgttatccggcattcttgtacgtttaaaattactatctcaatcagaaaaatgtgatccaaaaattatttccaatcaaatcattttttaaaaatttttcggcattttaatatcaccaagaattttcaggtggattatcctcagcaagatgacactgatgattcagcagatgatgaaagtgacaaagagaaatatgactttttgtcatggcaaaaaaaattgcgtcaaccgcaacgatcatttaaattgccatcggagagcaaatacaatccgttccaaagatttgatccatttcaaagattgggtccgtttcaaagattaggagtttacggtagtcgaaaggaaatggaaaattatttggacatttttggcaatgaaccgtcctcttccgtgacggcaccgctaattggttccatcaaaaatgcggtaaaaaaatgacgggaatgaaattaattagttaatgaatataattattgttgatataattgcttttaaagcccggaatagggctcgttggtactgagatgggctttttgctcgaactttcttagagaaaaattttggaaaacatctcaaaaaatgcggcaaaatttttccgctcctggccttaaaatttagtttgtaggaaaaagccgtcaggcaacagcatgccaaaaagcccgttttggccaacggagcgccgaacgggacttttccacggctttttaaaacgggcttttcgtaataaatttctttaccaagattgggtattaatcaaatttggcttacaaattagcattaatgttagcatgagagatatttttgagaattacaaaattttcaaaaatttgataaaaaatacgcttaatccaattaaaaaaaatcgacaatttgaaaaggcctaagtctattcgataattctttaagataatacattttttcgaaaatttccgagatgtcagatttgcagaaaacgttattaggtgtacaatttggcaaaaaaaaaattaaattttccaattacctaactgaaaattcgttggatcaataagggcaaaaattcaaaaattaaattccaaataattttttaggagattgatcaacagaacagtgaggacgagaaggggagcagcaccagcacaaagcgtgtaaatccattcctaaagccggatggaagcagctacaacaaagacaaggatgaataaacagaatgccaaacattcgaaggaattgatcaaattcaaaaaaaacgattgtatttatagagccctcacccaacaaatattggcacatgttatgaaatgaattagttaataaaatctgtatgttggtaaaggtggtttttaaaaattacaagaatttacgttttatttttggaaaatttttagagatctgcttttttgaaaaatcatggacctgcattccatgttgaacctggaactggatttcctggaaaaaatccaggtccaggaaaaatccaggctcctcgatgcctggacccaggcctggacctgggtttttgaaatttctttatcattttttgaaagtgaaaaaaacatcggtcacttgtgataataaattttaaaaa

SEQ ID NO: 17269 - DNA, 3597 bp, Heterodera glycines
atgaccgtttcttcgccgaattccctgccgatgactgccatggcatcggatggacaaacggtggccaaatggctttttcactccacttcaaaacaatgtgccaaaggtgctcaaatgttcgttgtacatggatgatgagaaatggccgttgaatatcgaaccgttcaaagcggtgctttcatttcatatttctttaatcaatttttcccaaatttcaggcttttcccagtgcttcatctcctgtcaatttcattgtcgtcattttgtttcgttcgtcttttgctgcctccgttttggcctttgattttaccaacgaattgactcatgaacaattggcattgaaaagaactgacaatagcgatcgttttctgttggtccgttgtccaattgcgcgagacgaaagcaaatgggcgaaatgggagaaggaagcgattggcttggaatctcttgaactatggaatcgaattagcattaatacttattatgagaatgacatcggggatgggtcagtgaataaccttcaataaaaattcaaagtcattgctttttctatttttagacttctcgacgcaatgcccggcccaagtgatcagcagtagaagtgaatgaatgatttgctgagaagtgattgatcaatttgaattgctgtgtaggatatgatttgacgttatataaaatttgttgcggtgatcacaaattgtgttatacaatatacagtttgtgtatatctctctgtatatgcccttaggataaatttaatgattttctgaaacagtggttggctttaagaatgttttttttctgatttcttaaaattcttcagaaaattttgtaattttatgtcgtaacgtcactcagatttccataattttccacatcggtgtctaacggcaccgccggacactaactaaaatcctttgtttttttataaattggctcaaaatcacaaattaaattgttaaaatgttctggtttttgaccccaaagcttgaatttgtcagtaaaagcattacaaaacaaatttgttttgttttttttaaacatttttttggcaagtaaaaaattttattaaattaatcgaatattcatccgaattcgttcaattggctttgcttcgtggccatcccccccactgtcgcttttggcgcttttcgctcggcttcttctccaagttgggcctaccttaaattttctagtcaattttacttttttgaatgttttttcttgccatttgccgccgatttttggccaatcttaaagtttggaattaaattttagtgtttcaaattatcacttttcacttttggttggccaatgccatctcgtttgtttcgtccgttctaatgccaacaaaaatggggtgtacgaaattttgtgtcgttttcgtgtcgtccccttttttcatcactttttgagtttcgtttttgagttttaaaatttttaatttcctttcgttttcgtgaaaaataaatattttcgtttcgttttcgaaattttgttttgtggttttcgcacacccctggagcgtatcttaaattctcgtcaattttcttttttgagtgctttttcttgccatttgcctacttggcaattaggacctctcaaatcttgtcttaaacattattaaagcaaaatatggtttcagaaaagggagtggcggttggggtaccatcggtcgtattaccaaattttgtgcatcatcgtttcctaggcaatctttcggttcatttgtcccgaatttttttttctaaaataaaattctggaaacacattaaaaaaaaaattcgggaccaatgaacaaaaagaattctgtgcatcttaaatggtaattaattaaaacccatttattggagggaaagtgacaaccgactttatcattaagtcaaaagaatgagcctggaatttcagtcaatttatcctaagggcaaatatatatatataatacaatttgtgatcatcgcaacaaaacaacaattttatatacatcagatgggctcaaattcattatccaactccacatcaattaaatagatcatttctcaacaaatcgttcagtcatttctgcttctgatcacttggatcgatcattgcgtcaagaggcctaaaaatcgaaaagcaataaatttggatatttgaataagcattattcattcactgacccatctcaaatgtcgatccgattccactggtccataaagttccatccaatcgcttcttcttcccatttggcccatttgctttcgtcgcgcacaatcggacaacggatcagaagaacacggttgatatcgttcatcttcttcatcgtcaattgctcccgggtcaattcgttgatcagatcaaatggcacaacggagaaaccaaaaggcgacggaaagtgaatgatggcaatgaaattgactggagatgaagcattggcaaaagcctaaaatagggaaaaattggttaataaaagataatgacaatttacggttgggggaggaggcacgaaaacccagagagggtcgggatcactttggagcgcgacattttggcgccgccaaattaaaagtgtgccaaaaaacttgccaaaaacgagttgaaatattgtccaaaataattttctcaacgaaccccacaaagaccataaaaatgccaaataaaacaatcaaatcgaaatcaccgatttgaaggcttcaatccttgacgaccaattctgaaaattcatgtacaaccagcatttgaacacctttggcacattgtccgaacggggagtgaaaagccatttggccagagtttgtccattcgaagcattggcactgtcatcgcatggaaattcggcgaagaaaccataggaataggcattgacaacgcgaagcgatggacagtcgtcgagaaatgacgggacgaattcacgcaaatagcggaaaaatgtggtggacaattggatggcacaaatgtttgtcgcgatcattggccaaatgttgcgcaaaatcaattccatgtccttgaatgtatcgatggtcaaattaattggacgggcggcgaagattggacgaaaacggccgagaaaagtgatcacattgtcgttgaagtacctgtgaaaaatgatggaatcgtgtttacaaacaaaaaagcatcaaaatctatctcacttcaatgaaatggctttgaatccgacgactctctttggcaacggcttttgcgcaattccaaacgattccaaattggcattgacaacatccatttccttggtgccatccgcttcgaacttcattttgattttcatcgatcccagattccagcgacgagtcttgaagtgttcatccacgtagaagtcaaaacggtggctgatcatcgcaattccaaggccaagttgtgaagccggaagcagatcgtacacacaaagccaacaatcggcggagataaagctgaaaaaaaggaaaacaaaatttaaaattgaaattttaaaaatggcattttaattttacattgctttcgccatcttttgctccgcttcgtttcggttgtcagacattttgttgaggggaaattattaagacagttttcgtcggatttcaattggcttagcaaagatgaaaaattatgtgaaaatcagca

SEQ ID NO: 17270 - DNA, 1995 bp, Heterodera glycines
ctacactctacactatagaacactctacactatacctcttgtaaaagtgacagcggatgtgtaatttcgctgcgcttatatagacttctggagagtagtgtagagtgtagtgtagtgagtctctacactatagaacacacctacactctacactatagaacactctacactatagcacctgtaaaagtgactgcggatgtgcaatttcgctgcgcttatatagacttttggagagtagtgtagagtgtagtgtagtgagtctctacactatagaacactctacactatagcacctgtaaaagtgactgcggatgtgcaatttcgctgcgcttatatagacttttggagagtagtgtagagtgtagtgtagtgagtctctacactatagaacacacctacactctacactatagaacactctacactatagcacctgtaaaagtgactgcggatgtgcaatttcgctgcgcttatatagacttttggagagtagtgtagagtgtagtgtagtgagtctctacactatagaacacacctacaatctacactatagaacactctacactatagcacctgtaaaagtgactgcggatgtgcaatttcgctgcgcttatatagacttttggagagtagtgtagagtgtagtgtagtgagtctctacactatagaacacacctacactctacactatagaacactctacactatagcacttgtaaaagtgacagcggatgtgtaatttcgctgcgcttatatagacttctggagagtagtgtagagtgtagtgtagtgagtctctacactatagaacacacctacactctacactatagaacactctacactatagcacctgtaaaagtgactgcggatgtgcaatttcgctgcgcttatatagacttttggagagtagtgtaaagtgtagtgttgtgagtctctacactatagaacacacctacactctacactatagaacactctacactatagcacctgtaaaagtgactgctttattcaggttgccaattaactaaaacactggatactctacgctagtgcatttgaactacattagcctagtgtaggaaaggctagtgtaggaatcctacgctaggtcattagtcagcgtaggattcctacgctagtttttcaaaaatgatccgaggaagcgattttccactcccttttatagactttgagctcgagtatgataactacattagcctagtgtaggaaaggctagtgtaggaatcctacgctatgtcattagtcagcgtaggaagcatggggtgttaaaagctacactatacgataagaatgactttcgcacagaaaatttctccctttatataggctaatcaaaagcatagaaaataatgataaaatgcaaagaaaaataatgtacaccgcccggattcgaacttccccccccctcagaatgatgcctcagaatccccaagatgctagtgtagcatcgctacattaggttattaagctagtgtagcatggggtgttaaaagctacactatacgataagaatgactttctcacagaaaatttctccctttgaaaaagggtagtgccaagtattactaaactgaatattaaaattgtaagcgaatcatatttatccgctgtgattcagagaatagtgtgatttataaaacaaagtcaataaaaaagctttttttcaggtagccgatttaaaattaaagctaacgctttgggctgccacactccgaatcacgctcccaaagatccattccttcgggcctggggacactgcatcttttcaatcatcactctttatgtactgctctagagaactgaaaaacatattttgaagctatagtcgccaataattaaagagccaatcatttttaatataaatataaatcttctcacattttcatcagggtcaacaaattccagaaagggtgccagaactgaacaaaaaatttccttggctggatttgaattctgtttttgatgctt

SEQ ID NO: 17271 - DNA, 1977 bp, Heterodera glycines
cccccccccccgcccattgtcagaagggacctcccgtcggttggtggtccgtcgcccattttggccttgccaattttgcccgttttgctgctgtcgtccgccgtccttcgcctcttccgcccctctccccacaattggccgccctttccgccattccgccaaactttcgccgcccgtccgtccgaatcggagaaggtcaaccggcaacgaactgctgaagcccccacaagacgaccaccaatcggcagcattcagctctttgctgcagcttcttcgcccaaatgcgctcagtgacaaattataaacggctaaaaaaagaacaattaaacgtataaagttgataattggacgaaggaaaaagagacaagcaattgtccatttctatttctgtggcgaattatgcgtctcctccatcactctgtgctcgcctgctttttgcgagttgacgctcttgaccccggcgagcactcccgccgcaatcggcgacttctgaggatctggtgacttgggctgttccctgctgctctcccgacatttgtccaatttttccgtgccgatttcttttttggcctctttccatcccaccatttgtttctggtcaaatgaaaggtgagcactgttagaaaaagccaccgaagcagcggccgcgatcagaggctgttgttgatcggcctaaagagcgagcgactgatctttgatcatttgccattactacagaccatcagactctctcggcaaacacttcgcatgaaagcggcactttctgagtccagcggaaattggtccttggcaggctctttgatcttcagaaggcgatttcgggcggtgtacgcgccgaaaagatttgcctaaagagggaaacgaacacatttctcgtctgtttgtttggtaggcacctcataagtggccacgacaaagtccttttcgtcggacatcgcttcccgcgtcactttggcccctttccttcgcctcctttccccaaactttaggtccaattccctttccattgcagaagttgatgggcacgaattgtttagttctggtgacttttcaaaatgaagagccactggaagaagccccttcaggaaatttattttaaaactcttctggcgaagtatatttctttcactgtaattacagtaatcaatttgcgcgcgatgaaaatgccctcaaggggccccgaaatgataaggccctgttggttcagctgaatttgggtgttcgttctgaatgcgatccatcgtacggctcctaaagatggcagggctgtgggacgaagttcgaattggcactcgaagtgaagttcggcacccgatggcttaagagaggagaggagacttacagaaaactttcggaagcactcacaaaaacgccgattaattggcaaactttgccaaatgtccgcagcatttccaactcattttggacattcgacctgaaacggaagtgatccttcgataaaaaataatttcaaccgcatcaaaaagtgcagcgagcccatcagaggggggcattggctgacgaactgaacggacaaatcgctgccggagggaaaatgccgctggagctgagtcgggtccaggcgcggctgaagggcgtacaaattgcggccggcatcaagttgaatggtcacggcaattgtcagtggacaaatagcctaaacaaaaagccaaaagattgccatttgggaatatgcgcctctgtatgaccctgatcagttctcttgctttctcaacatcctttgcacatcccgagatggacacttggtcattcattgtagtcatcgagttggaaagcgatttgttggagtcggggaagtgaatgtggcagttggtttcacgcattatctggtcaaatactcttcgacaaaagatggtgaggaagaggaaattgtaagtttcgctttggggtctcctttcccagttcttacctcttaaagggaatgggtagggttggagagggagggggggggggggg

SEQ ID NO: 17272 - DNA, 2839 bp, Heterodera glycines
tgataaaaaagacatctttcacatttactaattcagagtataatcaggaaaaaattgtgagcagaagaaaatccgaccgggagattccgattctaaaccttaccaatgttgtatattatctacagtagttttacccaggttatcgtatttaattgttaaataaacacgataataggatttaattctgagtttattataatacaaatttttctaaatataattttattttaataatgtttgattgtttgtttataatatcactcaactatggtcaggaccatacccgctcttagacttaagcctagcttcggcatagttttaatttaaagcctaggccgagtacggtacttccaatttttaaattttgtgtataatcatagatatacccatattaaaaaatgctttctcgtttccaaataaaatccacatataaacgcgattctgctggccaatttgctaacccaaaaaacgtctcagacgttaaggcattcaacggggcaggtgcatttattgtacatgcgcttataatcgacctacagtataaactgtatgaagtgagttttatctctgtaatgctacatgcatacagtctgtattgtaacccttaggcttgcccaaccgtagctaaaaatgggctattatgcaaccgtaagctgtccgatcagagactttgttcgagttgcggttttgctaccaaaaatccaacagatgctgttatccttcgacttgaacttcaagatctaatggataaagaatgccgccaaaatacaacaatgttcaccagcagtgctcaaaagtatcttggccgtaaagcaagcgaaatccggatgatggaacaggacggagacggggaagggttggctaggcttttagattccttcattggaaagaagattgtagccaaaatagctattaaggtattatgctctataataataatcgactaaatttaacttgttcacttaaaaaaaattatcatatcgataatattaaggaaaaagacgccaattggggaggtgaaggcagcagtttgaataaatttgattgggtcgttacttctgttttcgtgcaatcattggagcctgctgaagcgtacgctaatgatgacggtgaacaacagaaaaccgaagaatgatcgtcataaagccaatatgccggagattaagagttcaagcttggaatgaaaagaagacctgatgtatctgattgtagtgtagaaacgattgatcaaatatgataatattaaggatcatgatttcagataaatataactgtaatcatcaaatttcaaccatttagggtattattaccctgttaatacttctaagaatcaactgaatccgatgttctgtaattaatatattcagcgacatggcttctgaaagaaaaaaagcgaaaattacggaaaacatctgtgggcagagacagcctcatccaaaacaaccgaaatgggatttccgttcaattgcatattttgaacaatatccaaccgagtcccaaatggatgaaagtgtgccaacacagcattcggcagctgacattcgtcaaacaggcatgggccaacacagcatatcgacaaatgccgatggtggacaggaacagaaaccgttgtacgaggaaatcaccaatcatatacacaagatggagcgtttctcggtgcaacgccatgtcactgaatttgtgcttaatgctcagcatgaacagccagatgaagcgctacgtcaagcgttacatcaacttgtcaatagagctgtacaaaatgcggaaaagcaaagcggacgctctgtttcaaaattaggaataatggtggctggaaaaggattaaccgatccggtagtgctgcctttgaggcctccagcacaaaacaatattgacgttgtaatggccgagatggacaaacttggccaaagcgagggagacgaaggaggcgttaacaaaaaaactttgctactcagcgagccggtggagatcatcgttacatgtttaactattccggcaggatcggcaccacgattctttccacatcagaattggggctacaatcaaacgcaaataattcatatatccaaccgagacaactattgtctctttcatgctcttgctgcaggccgagcttatcatgattatgaaatttttcgctccagtcgtagtccaccagataaccaagctccactttttgcagctataaagaatagaacagacttttgcaaggattatgaagcgtataaccgtctattatcaaacaccgggcgaatggaatctgtagttgaagatctgatgaagaactcaggcatcattattggccaagattcttatggaattgaccatctgctacctgttcagcaatactgggtaatttttgtctacaattttaatattttgtgctgaaaatttaatgaatgtgcttcaggattgcgtttttcctggaatgtaccgtatagtgttatttgaagaccggccagaagagttaccccgtcccttatggaaaggagcagggggacatcgttttaacgtcacgctttttctctctaacaatcactatgatgtgataaaaaagattcactgtttcttcaaacttggccggaaatactgtgttgattgcgagtgtacgtacactgtggatgctaaacatacaataagttgtaggagtagatgccctcaatgttctaaaggtttgctttttcatgaacattttgaaatgaccgatattttagttgggcctctacatccgtgcccgaaacaggacggtgttcgtattttctgttcagaatgtaaccgttactttttttcgtcgccttactataatggtcatcttggcctatcatgtaaactctataaa

SEQ ID NO: 17273 - DNA, 3054 bp, Heterodera glycines
aaatttaattggccgaaaatgatggaattttgaatgaaaatccgaaaataaccttaaaaacagtaattgaggcacaaacaaaggtaaaggaattggccaaaattttctatattaaaaaccggaaagtgtccaaatgatgttctgaaatggaaaagagttgtttctgattattgcctaataaatggggccatttactttataaaaggcaaagaaaatatcgaaagacctaaattaataatccctcattcattacgacaaaagcttttcattattttccattcagaaggcaattttggagtcgtaaagacttggcacgaaattaaagagcgattttattgggtcgaaatgaaagaagacgtgaaaatgctaatcgaggcatgtgaaaagtgccaaatgaggaaaatccagccagggcaggccaaatcggctccgagtgtccctatcgaaccatcaaatagcccatttcaaagaattcattgcgacttaatgggtcctttaaagagaaccgaaagagggaatttgtatattttcttggcgattgatagtttttcaaaatgggtcatggccaaagcaatcccggatcagaaagcgaatactgtatcagaaatttttgttgaaattgtggtccatcaacattcaactcctgagattgttgtgactgatcagggaagacagttcacttcgggaatttttaatgatttggcaaaaatatatggttttgagcatgtcactacaacaccatatcatcaacaggctaacggaatggccgaagggacgatgcgtataatggctaatattatttctcaaatggtcaatgaaaaagggaataattgggatgaaattctgccgcacgctattttttcatataatgtttcaatacattcggctaccaaattttcgccattttttatcattaatttacgacagccaaaattaccaactgatcgattacttaaactcccatcccccgatgagcttgtatcagatatttcggtctataccagaattcagactgaaaaagctgctaaagcatgggaaatagtgcgaaatgaaattttaaaagcgcaggaaaggaacagagaagagaatgatcgaataaggaaagcaagtgaaagagaatttgaaatcggtgatttagtgttgtttaaaaaagaagttttaagccataaatttgatcagcgttggctgggaccaatgcgttgtgtaggcgttgaaaaagaaaagaaaaatgtcattttacagtcaattgatggaagagccaaattaagaaaagtacaccaagaaaaagtgaaacattttaatggaccagcaattcttcctctaaggcagtcagatgaaccattaaattgggaaaagtacgtagatgatccgaatttagaacaggaagaaattgaaagtgaaagtggcgaaagtgactgtgaaaaaacgcaagagaatgaaaatgcgcaaccaaaaaacaaaatgggattaaaagtttcaaaatatggctttgagagttctgacgatgagaatgattggaatattgttgcgtttgtaagagaaaaccaaaattctgaggatgatgaaggcccggaagttataatggacagaaaccccgaaatcgaaataatgccaattttcacaatactcgaagtccttattgagggttcatttactgaagtatacaccggatggagagaccccgtaacaatctcattaatctcaagcatacctgaaaacctagtaagggaaaattgggaaatttatgttaatggaaatggctcacgatttgttatggcatggatttttggcgaaagttttgaaattttcattgtcaacgaatttgatcaaattatgttgggaattgatgcgcaaatgttgttgggtgaaagatggcgaataaaaaccgaaaatgaaattgagacatattgggaaatttacttcgatgaaaatggacgcgaattcgaaattcccagaattcctgaaatccttttttcagaaaggaaaacttggaaattgggtatgggccaaactttgtaactctccgagattcagaaggaatgataagtgatcaggatgatttagaggaagtaaatgatttttcaagaacagacattaatgtgataaattatgtaaaaccgtttaaaaatttattggatttttcaaacgaaattgatgaagatgaaggaaatgaagaattagtggaaaatgccggagaaagggagagaaatatgaataattctctagaaattttaggaagaatggaaaacgaacagttgaatgaaaaagggcggctgaataaattggataaaaaacaaaataaaagatatgaaagccattcgtttttcaaggaattggaccgaatgacatcaccggctccattacatttcgaatctttgattgaggacgaagaagaatcactgagacgtttggaaagacgtctgcaggaacagctgaacaaagtgaggcagacgttggcccaagaacaactagaggagagccacgtgaagacaagggaagaaaaatgccttgagcaactgaagcaacaaacggtacagagtacggtaaaccaaaaaggaacggcggaaaaagaagaaaaaagtggagaattatgtaaaaaaagagaaagtgaggccaaaaaagccgaaccggaagcaaaagaccgaaaaacggatgaggaaggacttgtacaagcaaaaatggagaaagagaaaaatacggtggaggatgtgtgtctttaggagatgaagaagaagactctccttatgaagcagcgaaggtattcgagacggggacgtccttttttgagagcgcgggggtgcgagtgaattcacgtcgggaacttgaggaattgacaaaatcccgaaatgaagcaaaaataaaggccaaaaatgagttagagccgccggcgctgttagacatgccaaaagaaggacaaagtgctcgaaaacgattgcgagaggggtcgccaaacaaaggcgaattgttgacgaacaatcgttgggatgagaagatgcgcgagatcgaagaagtgaacaaaaactcaaaagaagtgcgtaatgccttgaatggact

SEQ ID NO: 17274 - DNA, 3264 bp, Heterodera glycines
  unsure (1)..(3264): unsure at all n locations
tcagctgccatataacgaacacgccaggatttgtcctgcaccancgaaacagcgatcggtttcacttgggccaattttgccgagtcttcggacaacagaccaacgatcacaatgccagcctcaactgaaagcagtcgaacagagtcctaaatagagaaactaattagacaaaatttcatcaattcttcacttgttcgtccttggccaagtcctcaaacatttgggtgatttcatttttcaaatagtcctcctcctgcactttggcaaagtcgcccaatttggatgcggcagcacggcgaaccatcggtgtatcgtcgcgacagaggcaccggaatgcggcacgtaattcagttttttgagcaggattggcacgagcgtatgccacgctgaacaatccgcaagcggaggtgcgcgaagtaaaccaatcacctgaacggagaaacaaacgcagtcagtggaggaactaattaagacaaatgtgaacaaaatgcaaattactgaccagctgacaatcgcagaaccatcggaatgaaatattcctcgagttgagctgcactgtgtttttctgctattttttgcaacgattccaccgctttgtcacgcacgacagtctcctcaatgttcgccaaattttcaagtggcggcagcaaacagtgcacatactcaggtccgccaaccaacggagtgaaattccccaattgttcggccaatgccaatagaacttcatcctcgtcataaatggtgtctgaatttgtaataaatgtagaaaatttatttatgcaatatatttttatgtaattaggtaatcggattattagtattaaaataacctgtaaggaattgaatcaattctttgcgcgttcgttcaacgcccaatgccaaagcaatcgtcgacaatttacggattgagttgagacgaagcttaaaattgatcaattacaattcctgaatggttacagcgaacattcatatcaaaagaacgaacctgaacatcttcgttacgaagctcatcaataagcacagcgatagggtacaaactgtcctcaccctcttctgtcgcaataggcgctgtcgtagtcattttagccaaaatcagaaaagtatttagctaccttcgtttgtttttaaatgaaattatacaataatgaagcattgtggggttaaatgcttcaatctttttcggttttagacgtcctatgggcttttatgtgtttcttacttggtcaatgcttagattcctggtatcaatcaaaaacttaaaaattagtcaattctaggctagaatttctcgtataactgaattctaggctagaatttctaggcttaattaagctaaaagcagcagacaaaaaattacttttgaatgtattcgaattttcgattattttcacaccgagtcaaaaacgagagacgaaccaataaatagagagtgcggagaaaaaaacatctctcttatttttttatctctgataattgtgaaaattaattcacttcactctaagagattattatgaaaatttaagttacaaaaaatgcagacattggccggcttttcccgcggccgcggtaatcacgctaccgccgggctattattatacattcgcatttttattttttatctttttttaatgcaatttttttacaaataggtaaataaggagaagcaactttgattaatccaatggaaaagagattgaatccatctgcacttcctacgcttatgttatcgaatttcggtggttattcggtggagacactttgcacgcttgggaaggagttcgtattggaacttatgactcggatgattaggtaagtcgtcacttacagtttaatagctaaatttatttttcatactcttattgaatttggaattcggtcccacccttggagaaagattaccgataaccaagcaattaattttaaatcttttcagcattgtgagcactttaaaaatggatattaaaggagacaataaaaaagtaaattttaattttgatttaaaattcatttgcctttcaaggatctagacattgttcgaattcaacttgattattctcgtctcatttttctctgtcttactgaggttttctcattttgtacactgatatttctacattgaaaatcgtttttattaggtccgtcttcgcatcgatttaaaacttgctgagggaattggagagaatcagaatttgaaagatgttcgtccttctgatgaacggctgttggagctcctttcagagccgaatcaaccggaagaaaatgcgaaaaaggcaaatttggcagagagattcgaacaaaacagaaaggagttaattcgattgaattgtcatttaaaaaaattggattggttgtcagttaatgcggagaatggagataaataattctgcgactttttgacttaatcttttgttgtttttgtaaatacactaacttattccttactatttgtctttttatatattatttgattaatttagtgtcacattttatggcgttaaataattgttttactgagaatagatatccaaatgaatgcattctttcctatggctcgatcgctgtttcggatccggtatgttctggcatttactatgctcaatctcaccctccgactaagcgattgaggattttgcttggataacaatcccccggttcatttccggtttgactttttcattcggctttagctcgatgcgttcgtttgttgtcgtttttccatccatgaacaccaggagaacatctgcgcatttggcacagaatatggcagagtagtgatttgcgatgtgacagctccgattaagggcgaggattttatcaaacatcgtgagttacttctattagtctacgacggttgaaagaaattcatcaaaattcgaaaaatttggatgcttgtaaaaagttatgattaaagttcgtgtaaactacaatataatagataaacttttgctttttttcgcacaggatttgccactggaaaaaatgctgtgttcgacttatgtttcattcctgatcgccctaatttattactttctctttgtggtgcctcaaacctagagcttttggacatcgaacggtcgtcgtccatttttttgcttggtcatcgtgacacggtccgatgtgcttccgtgtggcctgaaaatccctgtattctttgtttgttttttcctgtccaacctcttcaaatttcagtttgcgttttgactggttcaagggacggtgacattttgctttgggatttgcgtgaaaaaccatgaaaagagaaat

SEQ ID NO: 17275 - DNA, 2811 bp, Heterodera glycines
tcccaaaattttaccgaaaaaattgggacaaattgtccattgggttttgttcattttggagcccataaattggttgcattccgtctcattgaacatgttttgaatgttctagcaaattcttggcatcatttttcattggacggtcaaacaaaatgtttggagtcgcgcaagaaaagcattcgttcgccccaatcattcactgcatgaaaaacaaattataaatttggatataatttgtaaaaattaaaacaattaataaattttaaactttgataaaatatgcactttgtataaatagatatttttgggcacagttttcctaagcataatgcgacttttgagccggacaacaaaaattgacacttgcgtcggggatatttgcaccgcgacatggccacgcagtcaaaaattacatttttatataattttcactattattcaacaaattttattaaaattataatcgattgacaaaaataattaatttaaaaataagcaatgccaattactcattcaaaacgatagacatttaaaaaaatttttgttttgtgcttttattttatctgttaagacgattccccccccccccccccaaaatgagaaaattgtgcttttttttttgtgtttccgaatttaacccagggatctcctatacatattttgcatatttaaaattacacaatttgaaagccggcaattttgcccataaaaaagtcattggaaaattttaagttttttggtcagcaaaatttctcaatttttgcacaattttcgcatttgtttttctattttctccttattgcatctttgaaatatataaccttttcaccgatcacttgaacaaataactttcgctacgctcctcattcgccattgccccgtccgatcactcttctgctgttagcctttctgatcagcatttgtccatccccttttccgatcactcttctattagctcgatgtgatcactttataaagctgcatcgctttattcattcatctctctccctctctctgaccaccctaataaataaatatgtcaccctgaccaccaccacttcgctttgctggttgatctacaattccttatctccttccaatagactgaaaaatagtgtagctccaaataaaacattctgatcacttataaatcattgtttatatttagtacccaccggttcctccgacttcacaatccattagcacctcctcattcgctgattactttaataaatccgtcaccatcacttcccatcaaacacaaagtttcttgacactcgcccctttatccgatcacttcccttttcgctccacttctggtcacttttatgaatccgtttaccatcacttcccataaatgcaccaatccttctgatcacgcacttttccttatcgtagttcttcgatcgcttcacaatctccttcttcaactgctttagtaaatccgtcgcaaaaaccttccgatcacctcatattcattgctcccctatccccagcgtccattcatttaatcactcacgccccccccctccctccccctttcccgatcactttgtctccaattctctctcacacctcatccatcatacattttgtccgtcatctttcccgcgccctcattaaatccccataaatcctcgactactcttaatgatattgtcgtcgtccaacaaattgtgtgtgtgtttgtgcgcgatttattcgcgcatattttgccctaaatttggcgtcctcgtttattcgtcgtccttccacaataatttcgcgcacaaacgccaattcgtgcattcatccctcccattcacatgatgacctcgaaaagtgtccaccaattcgccgttctgtgatatcggacaccaatgaatggaaattttcgaatttacaattttaagatgaaaacttgtttatttttcgggttttttcaacctccttccacctcagagcattttatgcatgaaaatttgcatattttcgtaaaaaaggactttcaggaaaatacttttaactgatttccaccattaaaatgcactttgttctcattgccttctgcattgtttggcaactgtgagtttttattaaaaaaattatttaaaaatacccatatttcttctcttacagacagaaaccccttccattagagccccccccccccccgattaaagctctcttcatagagggaatttaaaaatagaaatccccaaccacttgaaccccatttatattagggctctctcccatatgagtggagttgaaaacagtgtccccgcacccctctattagagccccttctgaaataaagccgtagaaaaataaaaatcccagggatcctgttaaaagataaacggtaaataaattttaaaaataaatatttttaaagaatcaacaattttcctgtttttttcccaagggttgtcgccaataacgtggagcagccggccaaccgtgccaagcggttcacctcctttggctcattgtccaccattgggggccgcgttggatgtgttgtgtcggtgcgtgttcagcccattgggatgtgatataagccgatcccgcttctcgtccccttattcccgcaaaaattttttaacaccaaaatttatcgttttttcgaagcgcgcgtcggtttgcacccctatagcgtatactaagtacggtaggggtcaactccgtctcagcaatgttcaaaaagctataacttttttctttgttggccaaacttcacaatcatggtatcattcgaaagccctagatgtttagaagatatttataagctatttctcagtgattaatcagctctcaaaaaagtgtcag

SEQ ID NO: 17276 - DNA, 1015 bp, Heterodera glycines
ttttatatttagaggttatcccagaaaaatggatatccctcctttgggataaattttatacacatacaaatgctctcgagcatgatagggagggcggtgcgcaatagaccttttatttttgagggaatttttaaatttatactctatcccagaaaaatggctatctctttttttgagaaattttatacctcacaaaagcgcttgcgtatgagacggagggctgtgcacaatcgccattttatttcacagaggatttttatatttagaggttatcccagaaaaatggctatctctttttttgataaattttatacacatacaaatgctctcgagcatgatagggagggcggtgcgcaatagaccttttatttttgagggaatttttaaatttatactctatcccagaaaaatggctatctctttttttgagaaattttatacctcacaaaagcgcttgcgtatgagacggagggctgtgcacaatcgccattttatttcacagaggatttttatatttagaggttatcccagaaaaatggctatctctttttttgataaattttatacacatacaaatgctctcgagcatgatagggagggcggtgcgcaatagaccttttatttttgagggaatttttaaatttatactctatcccagaaaaatggctatctctttttttgagaaattttatacctcacaaaagcgcttgcgtatgagacggagggctgtgcacaatcgccattttatttcacagaggatttttatatttagaggttatcccagaaaaatggctatctctttttttgataaattttatacacatacaaatgctctcgagcatgatagggagggcggtgcgcaatagaccttttatttttgagggaatttttaaatttatactctatcccagaaaaatggctatctctttttttgagaaattttatacctcacaaagcgcttgcgtatgagacggagggctgtgcacaatcgccattttatttcacagaggatttt

SEQ ID NO: 17277 - DNA, 2046 bp, Heterodera glycines
aggcattcatttcagcaaatcagattaaaccttaattctttttctcataataaaataaaattaattaaaaatatttttaatacaatttatattacggtagtcttaattaaaataataatttaataaattcagcaaaataataataagctaaagcaattctgatttcccgaacgaggtgaacgactgaaaatcagcacaacaaattggtggagtcaaaaacggagctcgggaaattgtccgaaagtttgtggaccaacggaagtggaacgaacggactgaaaacaaagccaaattgggttgtcatctgtgcattggaaaagtgccgagactgtgaagtcggttggtcttgacttttcgaaatttttgaatgtaaataaaataaattaaacatcggaaaatcttaaaatcaaataagattaaagaacaaggcaaaactaaataaaattaaaattaaattagacaacaaatataaataatacaaaattaaacagtcaaatatcccggattatttaactaaaagatttgttgaaaaaagtgaaggtgatagggaaagggaaagaagggcacaagaaagagaaagaagaaaaaagggtcaagaaatagaagaattaaatcgaaaaatggccgatgatgatttggaaattaaatttaagaatcttcaggggaaagtcagggacttggaagataaattaatgggccataaaataataaatgtaccatcggggattaaaatgcctaaatttgatgggaacggtgacttttataaatttttgagggaatttaatatgtatgccactgcggcggggtggcatccgccggaatgtgtgcgattatttcctctcttcctagaaggggaagcaaaggaaatataccagaacattccaggggatgaaaaaaagaattggcgaaatttaactgaaaaaatggcagatcagacaaagcgtctggacggaccaatgtgggcacgccgaatgttggcaaaaataaaaatgggaaaagaaacggtaacagaatttgcaaataaagtgcgggagttggtagagcaggcatctccgaatcctgactacacaaacgatgctcgtgaaaatgagagcatccactactttttaagtgggctcccgacaaatttaaaacgcaaattgtttttcatggaaaaaccagatacgcttgtcgaagcgatagctcaaacaaaaagggtacaacaagtcagagaagagttggaaaatgacgaaaaaggggatgaattgagaagtcaaattgctgagctcaaagagcaagtcaatgcaattgaaattaataataaaccgaataatgaaataaacggaggcagacaatttatgaattcgaattggaggggaaacatgcggggcagaggcaattttcgcggattaaacagggaaaatcattggagaacgaaccaaaatgttcgccaaaattttgcaaatagtagaaatatcggaaattatagtaataattacccgaggaatcccaattatatgcctctgggaggaaaccaaaattggaataacaacatgggaaacacaagaccaggaggattttggaaccaacggggcaattttccgaacaatcgcggaaatttcacaaatttcagaggaaatttacggggacaaagaaatgaccaacagagatacagaataaatatggttggtgaagaaagtgaatctaaaatacaaaaaagccgttcaccaaccccggcattaacttttttaacaatttctacaattttttgcttattatttgggggatcaatggcacagtaccaattatgttctgaacgagttgcaatgaccaaagtttcattaccaaatatttcggactgtaaaataccggaacagcaaaaagcaacagaacgaaaggtgaccttatttttgcctgtacgaatgcctaaacaatttccgatctataattgttatcaaaaaattacaaaaacatgtacgggaaattttttattcatttggtaggaagtaaaaagtcaggaaaaagttaagaagggtgtcggtgcggaaagatgccgaaaattaaaaa

SEQ ID NO: 17278 - DNA, 871 bp, Heterodera glycines
ttattagctttcaaatcttgactgtgccaaatgtgtgtcattgacgcgaaatagttttttgctgaccattttcgtgccgtcgtccatcggtgccatgccgtactcgtccaacttgatcggctgctccatttgtctgatcagctgattttcggcacgactagcaaccattttcgatgccattccatccgtgtcaaaaaattcttccacctcaaaaaattggtatgaaataaatataatttttgtgcccttccaggtacagtatgcaagggcgaatccgtcaccgtagtatcatcatcttccacaatagccaaagttgggttgtactgattgcttttcaacacgaaaaaccataagccgagtgcaaaaattgcagcacaaattgcaacagttgcaagcacataattagcggccaaaagtggggacggaattcgcatcaaaaaaataaataaataaaaattgaaaaattaaaaaatatataaaattaaataatttttccgttgataattttttttttctatattttgtctaaataatataattttgaattagttttaacaaataattataattatttaatagaaaatattaataaaaataaataaattttaaataaaattttaaaatttaaaatgacattgtttttcgtttaataatttatttaaatcgataaattgttgttggtaagtttcaaaatgggagatttaaaatctttttaaaaaattcagggctcaaaatgtgaaaaacagctgatgctcttcgtcgaagtaaataatacatagaaagtcattgaaatacttttagattaaatttctttaaaagaaaaaaaaagaatttgattaaatatttttaaattatttattttaattgataa

SEQ ID NO: 17279 - DNA, 2171 bp, Heterodera glycines
  unsure (1)..(2171): unsure at all n locations
tcagtgtatttttgtaattaaaatttaaagaattgcaatgtaaaaattaccaaatattgtagaaaatccaatggttttttataaattacaaaataaaagaagaaaaatatttcaggctaagtaaaacttttcaagaaactaatttgatgaaagcgtttttttaaattttaatgaactctttcactaaatttttttattttgaaatattaaattgtaaacataaaattgttttttttaataaaatttatttttataacaattaattaatatttctcgtatattcaaatttattttgaaaaaagcaataatcattgaataaaaaaatcatttttcctttaattttttatccattaatttttacaccatttctcaaaagttttctcatacaatttgtacatattgtatatttttcaatttcgtagtcgcattctgcgctttttccgctgctgcccgttgttcacttttgccggcacaatcggtgccaccggcccaaacggaccaattcgcattttgtcagtgattgatctgacaaaaattaaattaaaaattaaaattaaaaaataacaggaattaccatttttttaatatatatatatatatattcccaaagatttccaaaatttaataccaattttaatattttgctttctttgacattcaagaaaaagtgccaaattcgctcccaaaatttagaaataaatttttgaaaatttggaaggtaaaagacgaaaaagttgccattatttatttgtgtgtttttttttgcccactttgccgattcgttgtaaaactgttcgccaaattggcggacaagctgacaaaagtagggagcatcttcccggctgcacacctcacttccggtcgacgctatcttaattgtataaaattgcattaaaatataattaattttattggtttttaatccggtagaatttgaattttttggaatccaacaaatacatccataagggtaagttatctatggcacatccctatctgtttttccgctgattaaattagaagttttttttaataaaaattgtgaaaattttatattatatttagagcccggaattttaatttgccgggaacgagagttggaaaatggagcggggcgggattccgggacctagactcccgttttttccgggactgccggttccagtgatttgacaaaaaaaaagcgggatcagggccgggaggcctgacaaaatcccagcggggccccgatctctaattatattatcataaactaaaaaattttagtgaaacaaaaaaattatgacaactgaaaagacaaaatcaaataaattttgttttgtaaagagaatatattctttaaatttattattttataaaattaaatattttaaaaaggataaatttaattttacttctaaacagttgcagaatgtgtcatcacaattcttaaggcccttttggtctccatagcagcttaaaaacaaaaataaatttaattaattattcttttttttttacttgtcatgcgccacgcaacagttgttaattgcatcttcattaggcgcatattagtaattatttaattaatcaattaaatttaaatttaaatttggcaaataacttttcttttccgggcagtctttttcgaccgttgattcggcgagaaactgaaaattgtttttgtgataaaatttgaataaagaattaatgaatgtttttatatcataaatatttttgaatatttgggtatcgaatataatattaataattaattaactaattagttaattaattaatactagtaacaacaaactcgtgagaaactgtccgttccgcatgcccattctgcgtccagcttgatcacttccacgggctgctgttcgctgggatttaaactcaaattttggccaaaacacaatgccaaaatggtaaaaaataaagaaaaaagaaaaggcattgaactgttgtaaaaatgaaaaaattcttgaatgaaaaagagaaagttctcgaaatgcggacagggtaattcggcgccaaacgctagatatttttttgtttcataaaattttaaaattttaacgtttttcgaaggagtttgacaagctaggttaacctgcaaatttaataaatttgtggatatacccggggggagtatagccanaaaagatgcgaaaatgactttaatgtaa

SEQ ID NO: 17280 - DNA, 899 bp, Heterodera glycines
atcctccgttcattactgtatatgttagtgacactttcgttatgtgtccattcaggagaccgccgcggaaaacgttgtcttttgcgtgttgcacgaccttggcaccaatcagtaccgtaacgccgaccgcgccaacaaactcgcgtcgtccgcgcgcaaagcgcgaaatgtggacgccctcgtccgtctcgcgcaccaaatgaccgttcccttccgcgcccgcccctccgccgcgcccgcggcataaaaacagacgcggaggagaaggagaacaaccaaagccaaattgaccattcgattgactgaatgactttaaattatttttaaattatttattgtccatcccatctcaatgtaattaatatttccatttgcaatcactcaaatttcaatttgaataataataataattaattgctggtgataaattggctaatatttaattttttttccaatttttttttcggctcattttgcacttttcatgcaaaaagaaaattggccaaagattcgaagttgtcgtcgttctgcccattaattaatcatttgatggcaaaatgactttcctttttggtttttctccttttggctccctcttttccctgtctaagttgtcccccccccctttttgtgtaatttttccctccccccggggcatttcttccaatttcctcccattttttgcacattttctcctcccaatttgtccttttcctttgcatcatcttcttctctctctctctttctgatcgttcttcattcttccatttcattaatattaactcctttctttttgtctctttcccatctctctttttccctttttctttttctattttccctttgattaaaggacaaataatttgtcaaattccattattcaattgattaattttgca

SEQ ID NO: 17281 - DNA, 1519 bp, Heterodera glycines
  unsure (1)..(1519): unsure at all n locations
aattcattccatcagttgcccttttgggagattttctaaantntggaaaaaagtaaattgactaaaaacaaaaataaaagtaatttccncaatagtgacgaaataaaggcacatggccaaggaggaaaagggcaatgacagaagagaaagtgccaaaacaattcaaaggaaacggaagggaaagcaaaggaaaaagaaaagaaaagaaaagaaaagtgcaatgggaaattggaaattgaaaagattaatttgggggaaacgaaattaaatgggacgataaattaaaagggaagtaaaaaacaaacaaatcaaagacataattattgggttattaaaccaatgaaaattatcggaagagagaacccggcaatgaattaatttattgccaattattgcacatctttattcaaatgcgttattaattattattattattattcaaattgaaatttgagtgattgcaaatggaaatattaattacattgagatgggatggacaataaataatttaaaaataatttaaagtcattcagtcaatcgaatggtcaatttggctttggttgttctccttctcctccgcgtctgtttttatgccgcgggcgcggcggaggggcgggcgcggaagggaacggtcatttggtgcgcgagacggacgagggcgtccacatttcgcgctttgcgcgcggacgacgcgagtttgttggcgcggtcggcgttacggtactgattggtgccaaggtcgtgcaacacgcaaaagacaacgttttccgcggcggtctcctgaatggacacattacaaaagtgtcactaacatatacagtaatgaacggaggatgggaaaagacagtacccatccatccccaggaaatggcactttttattggcatggcgtgtaattaatgcgtgcgtgcattaattgtggtctaaatgagagggagggccagacgtgtgcatttggccaaagattggcctttcaaatgtactcttttgtctgccggggcattttctcggcgggggaatgatgcgcgagcgatgaaagtgccactttggtgcaattgccccccccccccatgtgagcaatgaatttgccaattgcgtccgatcagtcagtggactgtccactcaccggttcgatcagcatgtgcttgagaaagaagagcagtttccgcgtcagtttggagccaacagaatcggccatgtgcgtcttcaccgcccccggatgcactgcgaacgctttgacgccctcgcgcgtgttcaaatgctgggcgagcagtgcagtggcgaatttgctcagggcgtatgccctccagcgccttgcgccgtcaaacatccgttcccacttggaggggtccttctcgatcgagaaaaggttgccacataatctgaagggcgtcgtggatcagtgatcagtccatccgagctttggtccctctcctccgctcaccggtgcattatggaggtcaaagtgatcaccctgatcggcttggccggggattggtgcgcgatgattccgtcgatg

SEQ ID NO: 17282 - DNA, 1254 bp, Heterodera glycines
ctgaatccaacgcctgtacattttcacgcgttttgctcttttcccacaagtcgtttgtccatgaaattttgaatcttctcgaggcccgcttcgcgaaataattcgtccatttcctcggtggtgaagaaatagacgagagtgtcgtccccgcggcggtacaaattgtgttggatgagtctgcctgacttgaagcgcagttgggtaaggtcatgacgaccatagtccttcagcaacagcattccgccgggccgtaacagtgcgactaaattcgaaacggcggcacgcaaccgatcgggccgaacggcggagagaacgaaaatgcaaaggacaaagtccaaagtgccgtcagccacctgacacgccaatgaaacgcattaaatggctcaattaaaaaaataatcacttgagtctgatgagcattctcagtaatgtcccaaacgaatggacgacaccgttcagatgaaattctttggtcatttcgcagcgtttcgatggctttcttcgaaaaatcgcagctgtacaagaagaggtgttcagcactttgcagcagaggaattgtcgtattgcccatcccacagccaacatcgagcacattgattttggcactgtcctaaagagaagaccaaatacaagttaaagcgaggagagagagtgcggcaaccaccggaataaggccaacaaacctttggccgaacgaacagttccgagaattcccgtgacagccatttccggtccatgaaaaacttattgttgtgagtctcaaagaaggcctcccatcgatccttcgggttctcgagaagacttaacgacacactctcgggaacggcgtcggccatttgcgcttggatggtttggtgaatttctgcttccttctcctctggccagtcaacgtcgtcccacgcattgtagtcaaacacagcacattcgtccctcagatagcgttgtccgaaagggtcgttccgcatcgtttgctgccttttctcgattttgctcacctcaccagtgtaattattggaggcgctatttgtcgttgtcattgcatatcaaattacaaaaaagtaatataggtaagtaataacaaattaagtgaaatacgtgttacttgattatctctcataaaatttgccattgggttgccctctttttaattaaaaaaccttcatttgctctcgtaatgaatctgcgaagagatcctcctttttgctgctttattgagtatttctgcagcctctgcatgaaaaaaattcatttact

SEQ ID NO: 17283 - DNA, 1488 bp, Heterodera glycines
acaatatgaatcggagttccattggaccacacatagatagatacataaatacatatgtgtacgcatatagaccacatcaatacaattagaacaatatgatccatggtatggaaatctgcaagaaccctcagatgaagatgatgcgtcctactgtgctttcagaagcggcgtcctaagtcccagaactcccctctgagccagagacgtacgaatcgttctggaaagggggaattttaatcaaccacacgcatgccacaattcacttacgggacgaggcggtgcgttggcccccaggtgacaaaactcctccaccgagccagagcccgatgctgaagacgatcccgagccggaagttcggaagtctctgtggtcgatccttccgtcgtttccgtggtctcctccgtgtcctcggtcgtcttctcctttgtcgcacttttctccgcttccgctgcctccgcggcgccttctttcggttgttcgtccgctgccgccgcttcctctaccttcttctccgctgtttggtcgccactaaaaatggtaaattttaatgtgtaaaaaatgatccgccgcctttgcacttacccctcgtcgtcctttttctgctcttcttcgtcttgctccaacggcactgtcacgcccgaaagagttgctggagattcaattcgaggctccgtctgaaaatgaaaaagggaaatgattttaaaaaatcagccacgacagaagcatcgctaccttctgtccaccgccgcagcattgagtgatgattagggaatagaattacatggaaatccatatttttttcctggactgtgggaggcctgaaacgcacgaaaaacatgtttttagcttggtttgaagcttctaggaaggatttctatatccatattttccatatttttccatatttcgcgatttatgtccatatttccatattttggcattttggtccatattttggcatttttcaaaaaaaactctattagaacggcccccagcagctaaattagcctttttgagcccaaaacccgaaaaatttttcaaaaaatctttttttcgccaaaatttctcgagaatattgaataaatttaaattttcttaaaaattaataaattatgtcaaaaataagcaaaaaagcgaaaatttcgcttttgttgttgattttgcgctaaaaaattaataaattttagcttttatgttttttttcttttaaaatgattgcacgtaattgccgaaaaaattcgagaccaatttccgaatgttgaccgactaattgcaaaacgaaagccgtctttgtcagagcgccttaccgagtcaaaaaatttggaaatgtatctcatatgcaatttcaaccaataaatttgaagaaattttgcactcaattttgaaaaatttatgtccatattttggcatttttgccatttatgtccatatttcgcgatttttgccattttatgtccatattttgcgatttttggtccattattttat

SEQ ID NO: 17284 - DNA, 2487 bp, Heterodera glycines
  unsure (1)..(2487): unsure at all n locations
aattaattgattaatttggccaaattattttgctcccacctcttctgatttgtaactcccctcttctccttcttcctcttcgtcaaatcgcgcgaatttcgtacaaatgtaattttcggggaataatttgcgagtgatggcaattggatgaccaaaggcgcattgggcaaaagcactggcggaggaggaagaggaacaaaaagggaaaataattgtaaaaagaatgagaaaggacggaagaaaagagaaaccacgacggacaaaatctctaaaaggaacaaaacatcgatcgaaatactgacaaatgagcacaactaaaaaatgggtcgaccgtgccttgcttagacaattttttccatttttggctgcgtgtgattgggattttgtccgcgcgtcaatgtataaaatttagtaaaatttactcgttgtcaaaactgtccccgaagggcgttccttccgcgcttcccatgccaatttgaccaattttgctttctgaaaatgcattttgctgatcaatcccatttgatcattttaaaataacgaacccatgttccgatcactcattcgcttttggcattgttttttcgcttctgaatttgtgccattttttgcgcttttttttttctgattctgtcgcgccttttcattgcctcggtgcagagaatagaagaaaaagaggacaaataacagaaacaaaaggaaaatagtgcacagggaaaagagaaaaagggatgagagattggaggaaagagtgccgacagaacagcctgagaaatggcaaatcgaagttggaaaagagtggtcgaaatcactcgccggttggcaaaatgactgccgacgaatgatcggaggcggagaaaggcggccgcaccgattggacgaccaattcggcacaacactttgagtccgggccaaggttgagctttgctgagctcaatttgtaagttgagcccgaagtttgggcctaaaatgtgccggaattggaattcggagtttaaatttaaagcattcgcaccatttcttcccaattgcttttgccctcttttttcgcgtcacaattcttccggccttttattctgtacgaattcgcctctttcacttcgtcccattttaaaatcagaactccgggggttgaattcacgagaagaaaattggtgggtctgtccaattttgagcacgcttaattaagcgccttctttctttgtttgactcacccgccccttcctactgtaatgagtgccgggtatggtacaattggtcgtcccaattcggttgcttgcttccagtttaaattcatattcgccaaacaattccaaatgatccacgtgcagtttggactgatcagttcgttggccagtcaccttccatgcctcattagcagtaattggtggtgtgtcattccgaatttgctggtagaaaatccgaaaactctgagagtgatctccgccgggatatcccggcatccaatacactgcgagtcgctgctgtccttcgcattggacgcgaaagtttgttgcacattggggggccgtttcctggagaaatcaaatgagggcaaaatgagaagagagggagagaaggcattcacatgcactatcagttgcacttcacgcgaaacagtggcaacggaactgatcagaacgcagcagtaattgccatggtcagagtgggcggcgttggcaatcgcaaatttggcctcggagaatgagcggtgcctctgaattgggtggcactctctctgttgatctatctatctttatctctctctgttctctctctctctctcccctctctctctccttctttctgttgctctctctctctcggttgctttctcttctctctgttgctctctctctctctctgttgctctctctctctctcccctctctctctcttttccgcttaccccgtcctcctttcggctccacactcttctgatcggcacctccccaaatccctcgcattcgatctccaccctttcccccgccttcactatatattttggtgccgggcttctcgtgaattttggcgcttctgccaccacgacatgaatttccaaatttggctcggtgactccgatgatattttccgcttcgcatttgtaaatgccggcggattcgcgaaaatttacgaaaggaatacgcacggcacttcgcagcaaattcccttcaataagaagaattcctttgatcgcccagtttttcatacgatcgatggttttctccgtgtgctcagtgattgttcggccatttttcgtccatttgaccaaagtcggcaacggattggcctcgagcagacactccaattccgccggatggtccgagcgaagcgcgtaatagcgacgactttttcgggacacttcgggnttatctgaacagaatgccatagcattagctacctgctggagaatccgtccggtctcacattgcacngtcagctgcacttttacgctgtcgctctccaaagtgcgtccgctgagtccaa

SEQ ID NO: 17285 - DNA, 3247 bp, Heterodera glycines
ttagggtcctgacttttttctaaatttggttgaaaacggaaaaagtatggtccaaaaactcgtccaatgttttttgcctttcgactagacattgcgttttcaggtttcctaccatttgcttcgacgtcttcttggagtgcgcactgaggcagggaaaaaagcggcgaaagtgagcaaacttgccaagggcgaagtgctcatggtgaatattggctctctctccaccggaggtcgtgtaattgcagtcaaaggtctgactccttctccattccaatttatatttaaattatgcatttcttatttaatataaattaattttaggcgatgcggcaaaaatagcactgactgatccaatttgcactgaaagtaaccaaaatattgcattgagtcgacgcattgaaaagcattggcgtttaattggatggggcaccatcagaagggggacgaccatcgcagtgccccaaccatcgatcggataatttaaaaactattccaattgtaaacggtttttaataatgtgcgtgtttttgcttcctttcatgcatcttatttttgtggaaaggtactttgttgatcaaaatatacccataagaaatgaaaaattttctcaaaaattcaattcttaagtttatttatttattttcttgataagaatttccgtttaaaattatctacatatttcgattgttgccagagtgcgtatttgatgcaaaattgttgtccaccgctctgtcatcgcgcgtcccaaaagtgttggcatcggatttcccatcaccggcacttcacactccgtcgtgctgccattgaccaattgttaaaggccaacgagcgtcgcttcatcctttctgatgaccaccagcagtcggtattaagagtggacgttgcccaagtcgctgcaaaccgaccaatcgaggacttttactccgcttcaaagtgtctccattccaatgcctttttgtttggcatttttgatggccatggcggagcggcgtgtgcaaggcacgtgtgcacaagggtaagaggagaaggaaaggggcaaaacagaagggtttttattcatttttggtactcgaatatttagattttgtgggtcacaaatatgaaaatggtaaaataccttctttccatgcactttcagttgttcgactatatttgttgctctgcgctggacaaacaccgagtggtgcaaatccccgtgggggaacaaatccaatggcttggggccaatgccccgcacagtcttccacaagagaaggacgacgcccatctccgaaatgtgcgcgagtatcacagaaagttgttgcctgccccaagtgttgtccatgccattgccctttaggttcagaagcggcgtctcccccgccaccaccgtccgttcgtcccttcaggcggcctttttggcgttggacgacgacctttcgaagggtgcgatgcctgaccaaagcgggcgcatttgcaggtgctttccgaatttgcccacagcatccaggattttctgcacgctttctgagaattatcttttttgtgtccccctcattttcggtagaatttcttcctcttagttttacaatccttccaacttttctcatttttctccttttcagaatgagtgtcaatgttgcggccagcggttcgtgcgctttggtggtgcacgtgcgcaagaacaatctgtgaggactgaatgacacgtgccccgcccccgaggaaaaatggcaggaacagattctaaaatttctggtgaaatgaccctgggacaaatactctccgatatatttgccttccgcgagtcattcgtcctttcgttaattgaagtcatgtggccaatgtcggcgactcttccgctgtcctcggcgtttgtcttcccaatggcttaattgctcgccaactgactcgcccgcacacttcagaaaatgtcaacgaaattcataggatccgatcggcacatcccgccactgaaaatcggactattctgcgtggtacaataaattttcttaattatttaattttgatttttttttgctaatgttgaggtgatcgccttcttggagagctttaccccctgcgggcgtttggcgatgttcgttacaaatggccattggaattgcaaagtaagccctcccccctcacaaaaaataggtcaattcaaacgcgggagccataactgcgaacaaaatagacaaccgaatcgaaatttaacaaatttacaggtattgtattttctatttttgtaaaattttcataacaatggcggattttctgccgtttttgcatttttaagaagtcaaacgacgctcccctagtcgaaatcccttaacaaaacttttgcgtatacaaatttgagaatttaagtgtttatacattcatttccgtaccatttaactctccccgtcagaagtcgttctcgaacccctcggaatgcccgccccctccaatctgttgagtccgccttatctcactgctcttccggaagtgttttaccaccaattgaccaacaatgacagttttctcgtaagaaagtcttgtcttataaacacttttgaatttttcagatattggcatccgatggtacaattttttggaaaaaaaaaactaaattcacgttttaggactttgggagttccttgacccggatacggtaatcaacggaattttgtgactgttacataaaagttgtaatttaggctgtacggttagttcatgtaaggaatggatgtgctgcactttccttttggaatttgcagtttttctttattttttcaaaggatcacgcacttggtgcacaaacgttgagtgatttccgacccgattctcagcaatcactgggagaagtaagtttttggtggcacaaaacccggaaaagcagaaattgccatgtgccagttatatgaaacggccaaccccatgctttttgaaacaataaattcaaaccattagaatagaaaaattcggcgtttttggactccgcacaaaacgaaatttattatagatactcgggagccttgaaacgagaaaacagggctatgctagcaagccgctggatgaaaattcggcgacccatttgatccgaagtgcgttgggcggttgttcaggcggaacggagctgcaatacgcgcggttggaagaatcgctgatgcttccccctgggatggcgcggaattaccgaggtgaaatcgccttggaaagcaattaactgttgctttaatttagacgacataacaataatggtggtgcacttcaaaacaccgtg

SEQ ID NO: 17286 - DNA, 1836 bp, Heterodera glycines
taacatgtcttttgattatcaaggctcaccttctaaatgatacacatagaattggtcaaacaaagaaaaaaaaatatggccgcttaaattttgctctggcacaattgcccccaactgatcagggatcagcagcaggtcatgacaaaccagttcagaccgagactaagtcgaaatagctttccaagatcagcaattcggtaacggctccctcgcccattccgcgcccaccaccagtgactcacccaaatgccgatcagatcgtattgtgccgcccacagaccgcgaacattgatgtgaccgccctgggaacggaattggaccgcatttggggccacgaagctgaagttgaaccggggcgactggaaatgttcggccgggattcgcaattggctggcatttacacggcctagatgtgcaaagtgacggaattggaattaacaaaattgtgtgaccaattagactaattggggagtaatgattggattaagcattaaatggagatttacatcaattttggcacaaacacatttgaaccttggaaatatcaaaattggcataattacttttcttggattctcgactaggcaagaattagtgatcaactatcttccttaaggtacactgatcagccagcgtttttcttcctcggactgatcaggatactaaagtgcctcaaaaaggaaaaccgtcttattcccggcactgatcagcagacggcttgatctctcgaacaattttcaccggcttcttaccggtgcccggcccagcgtcaattggcaatgaaatttgcgggaaacggactgacggcagttccctctcgacaatgcgatggccaatggagctgaagaagtcgaggccacggggcgagagacgaagtgccaaagttggcggagaaagcgcgacgacaacggcacggaaaaatggggacacaaaaaggagggagaagaagaaaaagcgaacggagaagggagagggggaggaggagaagaacaccatcatcaattaggaaggcaaaataaaaatttaaataattaaaaaacagggctgccatcgtccatcctccgtttccaaggacgggtatgccgattttcaaggacatagtggggaaaattcatgaaatccaaggacatttaaaatttttattatatgcaatgaaaaatggttaatatttattcaaatggcttgtatttttcaccggaatggattttttccaatatttttttatttccgctgatcattttcctcatttacgacgacttttttctgctttaaaaacgcttttttcgtggcgcgctttttccaaaaattttgtgggacagaggggggggggggatccggcggtgccgacaggcgccgccggggaaaaattttgaaaatttgaatgcaatttgttaacagattttcaccaaaaactgcctaatttttgcgattttaagccatgcgacgactttttttgtttataaaatgggttttttttacggcgcgctttttaaaaatttttttgaggataggggggtccggaaaaatttgtaatttttaatgcgagttgtttacagatttttgtccaaaaatgaccaaaatttgcgatttttggctaattttttaagaaaaatagtgactagtgacttaatgccataaaatttcaaaaattctcaaaaattacatttttaaatgacataatgccataatttaatcaaaatattgttgaaaattacaaagatttctcaaatttctttgaatttttttaaaacttttctaaatgttcattttcaaggacgtccttggcatccaaggacgttttttattttcaagaaagagggcccaatttcaaggacg

SEQ ID NO: 17287 - DNA, 2112 bp, Heterodera glycines
  unsure (1)..(2112): unsure at all n locations
ataaagttttcgtttttcaatgcttctacagtgccaatatacttttttctattaaaacattttaattaactgccgaataaataattttttcatttatttnaaatntcatataaatattntagttcatatttaagcagctttcattaatgaattacctcgcgtagtgcaattttttcttttgatcgtttcatgataaagtatttttcaatttttagtattgtcagtattttatttttgccttctatttccataactattctcgccatcaaataatattttctcattttttaaagtttcctttgaattttaaattttctatttaattatttatgattttgaaagtttaaattagaattatttatatttctttctccatttctcgttctggctgcgggtttcccaatagtttttgtttcgccggaaacttattcgtcaaataataataattattagggctgccaattttatgtaaatacatatttttttttcctggcttctccttgctctaaatagcaggaaaacactttcttttttgtgtttgcgaacaaaaaccgggacttttatttacatatttttacatatttcggtgtttttatacatatttacatatatcgggattttcaaacatatttgttcatattttggattttttcatatatattttcatttttttacagattttgagtattttttacggaaatttttggaaatcctcaaaaaaaaaatccaaaatttcggcaaatatttttgtacatattttaatttttttacatattttgaaaatttctaaagaaaaaataagtttgaaaatgttgcctaaaaataccaaaaaagtaattttatgtcattttgtggctatttcatactttacggggattttctttcccaaaaaataccattaaaaaaaattctatttacatatttggggttttttgtacaaattttgggctttttcttacatatttatgtacatatttggaccatttttttgtacatattttttgcagccctagttggagtctttgagagcacaatttggcaaaatactttaaggaggggggggggggttgacgacatcaaaatttgcgcagggggtcatgccattgacatttttttccttttcaaacagctttttttgcgacgtttttttcaaaaaaaaaaatttggaatgggggggaggggggtctggcggtggcgatagcgcctttagacaaatttttttgtggattttcctctttttctcgcctttagacaaattttttttgtggattttccttttttttctccttcggcatgggcgaatcaataaacaaatattgttgccatggccattttggaaaaagaaagaagtgttggagtaaatatgtgtagccaacgactcgagagtgccattcgatgactgctcaagagtgccattcgatgaccgactaaagggccattcaatgaccgactcgagagttccattcaatgaccgactcgagagtgcaattcggtgaccgactcgagagtgacattcgatgaccgctcaagagtgacattcgatgaccgctcaagagtgtcatccgatgaccgactcgagagttccattcaatgaccgactcgagagtgcaattcggtgaccgactcgagagtgacattcgatgaccgctcaagagtgacattcgatgaccgctcaagagtgccattcggtcactcgagactcgcgccgagttggagccaaagctcttgttgataattttttagatacagtgcaggaaaaaagtgttgcatcaaaaaagaaaaataaattttgcataatttcaaaaaagttaagtgcacatatgggtgatctgataatggttacttttactggtccctaaaaaaaaagaaaaaaaggcgtttttaatgatattttgttctactcgggggttatcggggacgctgatcacgaatatgacatcagatttgtcatatgacatcatctaatatatgattttttcaaatctatgatttttcatcaagtaattttttttcaatttttttgttgatggcgaaacaaatgcttttatgagaagcacttttcgagatgaccagcattatgtttaaagatccttttatgcatctaaagttgca

SEQ ID NO: 17288 - DNA, 4032 bp, Heterodera glycines
aaagcaaaaaatcgttgtataaatgtcggatgaatttgagaaaaactcggaatttttgtaattgtatgttttgccaaaaagtgtggcttttttgttgaatgaacggagtttttaaatttaaattgcaacgaaaaatggcaaaaatttgttagaaaattgcattctcaaagagtcccaatttggttttcgacctcaattcgtaaaagaattaaagctcaaaaatagtgattttgcttgtgtaacaatttaatcaattaaaatagtatcaaatttcgtatttttcgcctcccctgatcattttaaacaattttggggaggaaataagcaaatcgtacatttaaattcaatagtgctcaaattatcagatttttaagaattttttttttaagaatctgagtgacattacgccataaaattacgaattttctgaaaaattttaagaaatcagaacaaattaaaaagtgttctaaaccttgtttgaagcttttaacatccattttttgtgacttttttcgtgttttttatgcctattttaagtgcctatttataaaattaagtgtctaaaaatacgatcaaaatgttattctataaattattaaaatgggattttcttaactttcgcctaatttttcaggacttttttgcatttttacgtgcttttttgtgttttttcgtgactttttggcgattttttagtcgactttttgaagaattttagtgacttaaatttcgagcatattcatgactataaaaatctttttttacacttgtctctcattatattgggttggtaaataagtcctgtccgttttttacattttcatttaaattactgttcttacaaatcgaagaattttgctaatattttgatatatagcctcaaatgtgctctacaaaattgcattaaaagattttggccgactttcaaaaaagtttaatcaatgaagaaaaaatttcattaagtttcttttattttcaactgttgtgcctttgcacttgtccaatgaataaatatttatttattccaatttggagaagacacaattaaataaagagagaaatggggacaggagtatcgattgagggaaatgggcacatacaacaaataaatgagggaaatgaacggatggtcaaagggacgggggtatttatggaggaggcaacagagagagagagtgggaggggaagagatagaaaggaattaaataataattaagcgggacaaatcagtacccttcccaacatctccccccttaaaaaaaataaaagtctgtcctcatccatcggtccgttgatcagtgatcagtccgctcaactcggagaatagcgttgaggaggatctcgattgcgttgcgggcgatcgacacggacatggcctcgtgaagcatttgcttcgtccgtctcttgtgcaggtgccgcttgttgatcagctggcagagctgcttcgttgggaccatccggcggtgccaacggaagaccaaaagcatcgttgaaaatgttcaactcatcattgccttggtgatccatgtgacgggccgtcatttggtttgcgtggaatcggttggaagtgccattcgggaactttacctcgtaaatgactccctgacattggctgacgattccagcgcgccatgattgcgattggcgatgacgagcaaaaaccttatcgccaagacaaaactttcgaggttttgcaccaaaacgacgattgaactgcttttccatcgcctcgtctctgatcagtggtgccgatggttttgctctcagcaaatccaatgttgtgcgaggctttcgcagaaggaaaagttcggcagaacttttgctgtcgggcaaagcgtcattcggcgtcgtccggtatgacgtcaaaaatgtgttcaccacattttgcgcgccctcttttttcagtttccgacatgccctcttaaaggtgtcgacaaagcgctccgcttgtccatttgacatcggattgtacggcgctgagaagagatggttgatgccattttctttgacgaattccttgaattcgttggagctaaactgtgtgccattatcagtgaccaaagtctccggcagtccaaaacgagcgcacaatgaacgtaattgttcaattgttgctgctgatccggtcgaacgcatttcgaacacttccggccatttggagtgtgcgtcaacaatgatcaggtacatctttccaaagaagggaccagcgtagtccatgtggacacgtttccatggcccttccgcttttggccacgaatttagctccgttttccttggcgccttcgcttcggtggcacaaggctcacattttcttaccacttcttcgatttggtgatcaattccgggccagtaaacatgctggcgtgcgaggcttttcatgcgcttcatgcccgggtgtccacgatgtagcattttaagcacttccgtctgcagcgatgcagggacgacaatccggtcggcgtacatgatgcatccgttttcgaatgacagcgcttctcgccttcgatggaattgtaaaatgtcatctgacatatccattttgtttggccattggttcatgatgaatcccttcacttcctgaagcaaattatcggctttagtggcattgacaatgtcctcgtggacaattggaaattgtgccgtaaaggcattcacagttgccaaatttgagctttctgtaattgttgccacaataaattcatcttcgggcactggcgcttttgcaattaagcgcgaaagagcatcggcttgaccaaaatcggcagtgttttggtattcgatctcaaaatcatacgccaaaagtatgagtgcccagcgctgtaagcgatttgctgtacacgctttaatgccctttttgttatcaaaaatggtcaacaatggcttatggtcggtttgcaggacgaagtgtcttccgaaaagatatttgtggaacttctgaactgcaaagacaagagctaatccctctttttcgatttgggagtagttcatttcggcaggcgacaaagagcaagaagcatgtgcaattgcattcaagctgccatccggaaaacgatgggagatcactgctccgattccataatcagaggcatcggcagatacaatgatgtccttttccgggtcgtaatgggtcaagagttggtcagatttcagcacttcgatgattttgtcgaagcattttggcattccgttgaccagacccaagccacgtcctgtttcagaagttcgtccaacggctgtcgaagaaatcgcatgttcttcacaaattgttggtaatgattgatcattcccaaaaatgatcgaagctccgaaacatttgtagggacgggcatttcagaaatcgccttaatcttggatggatccggtcgccttccatttttgtcgatgacgaacccgagatatttaatctgtctctgattaaaagagcacttttcgggtttgatccggaatccaaaatttccgattcgtttgaaaacttcattcaaatgttttcgatgctcctcgtgtgaacgactgaccacgatcatgtcgtcaaggtaagcaaaagcgaactgaaaatcggccaaaatcgaatccatgatcgattggaaaatccctggcgctgatttcaccccaaatggtaagcgcaaatattggaaatttcttttgtgcgtggcgattgtgcacagttctttcgatttctcatccaattcaacctggagatacgcatccttaaggtcgatctgagaaaaaatttgtcctccattcaatttggataaaatgtcttcgggcaacggcaatggatgctgattcaaaagcaacgcgttgttcaagcccgttgaaaaatctgcacaaacgcgtgctgctccgttggccttcttaacaaccacaataggtgcggcccaacgggtgtgatcgatcggtctgatcactttctgcgccaacaatcggtccaattcggcctcaacaatcaaacgtgtgttgaatggcctggacgtggcctgcagtacacggggaacagcatctgccttcagctcccaatgggctttggttttg

SEQ ID NO: 17289 - DNA, 1755 bp, Heterodera glycines
ctgattgtcgaccaaaaaaaaacaaattttgtattttgattttgaaaattttttagagtccatctttttccccattacatcaagttaaatatttaaagatttttttttctttatgccatcaatttttaaattttttggtgaaaaaattgggttaaaatttgtaatgaaatttttttagccataactttttgaaaatttttcgttgacctcaagaagagagaggcaaaaaaataacgaaattagtcaatttaaggccccttcgtgacccccccccccccatttacaaacagaaaaagaaaatgccgcctaatttggtacaaatcgtaacgtaacaaatcattaaaagcaaatttgatttgctccaacccaaattcatcaacacaaaaataattaaacagtgaaaagacgaacaaaaaaaacgccaccatatcaaatgaaaagatcgttcacagaaaagcccacaacatcagcagcaattaaagccgatttggctttatttgatctgtttgcggcctgaaatttgattcggcattcattgcttttgggcagaagctaaaccaattggaagggcaggagcagaagcacgaccagaagcagcaacagaacgaccgtcgagtgcagcggaagctccaactgcagcagctgaacgtccaggtcgagcatgggactgatgcggctgttgatcattttgctgctgctcgtgtttgtcatcgttttgcgccgaagggttgtagccgggcggctccaatggctgcgaatgcatccacgaagggattttaccacgagggggataatgtggtgatggcccttttggataggcaggataatggtcattatcggcatgcacagcgatgacaaaggcagcaaagaccaaaatgaccgcgatgggagcagcagggagacggacgaccatctttctgagttggatgggttcaattttttgggtaaaattaattttataggggtctaattttcgaaaaaaactcgaattccatgaccaaaattccaaaaaatgttcgatggaattaaaattaattttataggggtctaattttcgaaaaaaactcgaattccatgaccaaaattccaaaaaatgttcgatggaatcaccaaaatgttcaaaaaaacttgcaaatttggaaaggcctttttttggcattatttcttaaggctgcccaatgctttcaaaaatttctttaccgttgtgcttttatatgcaaattctttaccttttttttgctaatttatttttgtatacttcagttttatgctcatctgtcagctaaataaacaattaaattgagcacaattcattcatttgttagtcagtctcattaaaatttgcaaatttccaattttaaatctttattgcagaaacaacaaacacacaaaagagactcactcactgacagaatattcaaatgtttgcgattcgcaatttaaaaaaatgaatttttttatttatgcaaataatttttgagtgattgaaacaaactttatttgcaattgtcgcctgggttttgcaaagaaacggggacggggagtgttttgtttttgcaggaatggataaaatgggcaacgccatttgagcgctgccaatgggcgccaatcaaatgggcgccagccgtcttaagaatgaaagttttctcttaattgatcaccaaattttttatttgtgttttttcatttgattttcactttttaaaaaggaatctgctgatttcacatacctaatttggttttttcgattttaag

SEQ ID NO: 17290 - DNA, 2461 bp, Heterodera glycines
  unsure (1)..(2461): unsure at all n locations
ttagaagaattatttgatantttttttatgggagtgggcggggagaaataaagcacccgggaaaaagagaggctaaaagagggaggggggcacactgcacaaattagcggaaatgagagggaaaaatgagcagcatgaagccaagataacggagtagtaagcctcgaccctgatcaaagccaagttccagctcggatcatctaaattgatcagggccagccgggatttaaattcattataactcgaaaaaataaatcccgatcccgttcaaagccaaatcccggctcagactttcaagatcgatcttagccgggatttaaaactaaaacggaatcgggaaccgaccagccacaaaccctagtcccaatcttcgagactgctcgagaccagatgaactaactaatatcggtgatcccgtaaacaccctaattccttgggaccccctgtcaaatccaccaatgattttaccttaaaaaggttgggccaagccgtctgtcggtttgtatgtgccagatcaacaagaacaaccgaacgcagaaagagagcagaagcaatttgggatcagcaacggatcaacaacacccaacttgattcatgcatgccatcatttggctataaattaacggcggctgcggcgcgcaaatttttggcccgcaagggcgccacccaaaacaaagcggcagcggcagcgcatcaaataaaattgccgccatgccttaggcaattttctttgtcatctcttttctctgtttctctagcttcaaaacacacacatgcactctctatagctcttatctggtggtttctcgcaatcattgattgaccactttttaccgactgaccgaccgaacaatggaacaattagcgcaaattaaaattaaattatttgtgcaatgaatgaatgggttaattaaaaacagtgcaaataccaaaccaaaataaaacaccgcaaaatgatgttagtgcataaataaaataaaattaataaaagcattttgaaaccaattgatcagcagctgattgatctgctctgatcaaaacgtccctttgctgatcactaatcaaaaatcgcccccaaagccctccaccaaaatgtgtgacaataaataattgtgctcccaagcggtgaatgacaaaatttaaaatatttgaattggaaaaccaaataaatttagtaattaaggggacaaatggcatcaccaaatggacatccgactgggcccaacacaattaattttccggctactcaaattggtggaggaaagggggtggagacggggaaatttatccttaattaacggtaatcgatgcaaattttaaaatttgctatggcaaaaagaaaatgccaacggcagcagcagcaacagcagattatttcataatggggggagaaaatctccatgaaacacaataccggtgatgctcccaaggcatgcttggtcccaaattttgaaaactcattgagttggctcgggagttcttgagccaattttgtgggaatccgttcaaggaaggccgagaattgattctcgacaataatttcagaatgtccgagaatatcaccggtggaggagataaaacgacgacagacaagaaaatgacaaagacggcacaaaatgccgtcctcgtagtgcaccccggcgattgatgtgtttgatgatgtcacccacctgttgtttgcggcgccaattctggatcagcacgttcacaatgttcttgcgctccaggatcacggaggacagttcggcaaaccgtcggttgagcagctccaactcctcggtgaccacggtggcacccgtcttcggctgtggcacctggcgatgcaattcctgcttcacgccgggcccatggatgctgatcacgctgtcgtggtattggctgagccgcaggtcgtaactctgtgaaacatttggtgggtcgcatagggttacggtatttagttggccaaaatttaaattttttcaaaaattattctcggttttacgcagggtgagtaagccccaagacttttccgtacccaaagttttagaggaaaaaatagtatattttggagaaatttttcgattttttttgtttgtacccctccaatatttacctcacctaaatttgcccaaaaaatttctcgattttttctgaaagttcgcaaaagtaccaattttttgctgaaaatctgttaaaaaaaatcgagagaaaatatacaaaaactttctcgatagtgcctaatgcacccaggaccctgaaaatccttaactttcttaaaaaaacgtgctaaaaatcgaaaaaaaaaatgttgggaccatccagcatgaaaatggatgaaaaatagttttttatttaaaaaatattttattaattttataaaaaatttcaaaaaaaatattttactttttccatgaatgctattttatttaaatatgccatgccaataataataataataattcctctccccgaatgttct

SEQ ID NO: 17291 - DNA, 1249 bp, Heterodera glycines
  unsure (1)..(1249): unsure at all n locations
taaatgtaataaaattttagttatntggagaagcagtcgttcaattgtccttcaacttctgctattcggactgatgtcgatacaatggaaaagaattcgacccttcaaactcctgtttttatggactcaagaattgatgaaataaagaaaaaggtaaccgacaccccacttaaaaatcaaatatttttttaaaaatcagtttcttcttgaattggaagaaaaacaacagaaaatcgttcgcttggaggcgaaacttttggcagcagaaactgagatcgattcgtttgatcagttggagggtgggccatccatctctccctgggctttcctttatttgaccttttatagaagaaatgcttgcagagaatttcaaattgcaaagggagcttcttaaaatcaaagtccgtttcggtttgattactattgaaaatgcgttcaaagcgctcggctgttgtgacaaagaaattctggaggagattaaagccgcggcctgtcagtgattcgatttaacattgtcttatatttcatcagatctatttgtgttaccgattatccgtacaagtacatggtaatcgtacgctttactggtcccacaaaaaaaaggaatttccaactttgtggggttttcgggggcggtgatcacgaatatgacctccatttagacctatttcgaatctcgaacaaaagtcgaaaattaataaatttattttttcgacttttgttcgaattcgagtccggggttcagaattgaccaaaaatggtgttagattcgtgattagcgaccacgaaacccccaggaaaggcgtttttgacaattaatttttaattttataaaaaatttgttcgaattcgggtcgggattcaaaataggtcgaaatggatgtcattttgtgatcaacgcccctcgaagactcccgagtttttccaaaattttaagaaaattagtcgggcgtaataactcagacattcgaactccgaattcgaacattttttaaattctaattttcaaaaaaagtggctcgaaaatatggggctcctctacgcgagtcgaacgtgtccacgatgcggcggaaacacatgaattaggacaacataataaaaattcaaaatctgtgttcagatccttgatcagcgcatcttttaagcctagagaaaaaacctgcgaaaattttaatatattttgttcgtctggacaccaattcttgaccattgcccaatttgagtggatacacaaaagtccattggacgc

SEQ ID NO: 17292 - DNA, 1835 bp, Heterodera glycines
cgtgtattccaactgagctacgctcccctttttccccatttcacttatcttagggctaaattaactctattttcactgccgcataggcacaaagaaagagagggtgagagagaaaaagaatgctgcatttatcacatccgcgattcgtgaaattaattttgcccgcctttccttgctcaatttaaatgttttgcgtgccgcttcgtacatttcatctgagaaccctttgcgtaatttttccggagcaaaatcggaaagttttgcacagtttgcacaatcgacgtagtcgcgcataaacaaaaaagcgtctgagggactttcagctgaataatattaaacattatgtgccttcatttttaactcaccagttacgcgttcggcacggcataagtcattgtaaacggcacgcaatagtcgcggacccaacccaatgcgccggtaagttggtggaaccagaatttgtgcgatgcgcactcgttccttgtccggatggtggtaaaaacggtacaaattgacgtaaccggcgaaccgatggacggaagaaccatcgccatcggaagatggacgcacggcaaacagaaaataattgaaataacgatggtcatcattgtcagtgtaagagacctgaaaagagggaacaaatggatgagtggaaaatgggaaaatgaaagagcgaaaacactgaccgcatcgatgtaccaatgggccaacgcttgcactcgctccagaaatttacagccctggtcaaattgagcatcgtttggtatagattattggtcccgaaagtttttttttaataaaatttaagaaaattatttttaggggtaatcttaggcgccgagcacgaatccggccttattttgtctcagtctcgaaccccgaacccggattcgaacatttcgtaatactgtcgaatgtaccccgcaccctttttttgaaaagttttattttttttctagaaacaaagttgtttaggggttttcagggtcggagatccgattctgacatcaatttcgaccaaattcgaacccctgacccagattcgaataatagttcaaaaatttaaatttttcaaactttacatttttacttcaaaatggtttaaataatcttttattgacgtattaattttcgggaccaataatctatacctttgccttccctcccatcaaaatttcaaatgaaaaattcaaattgtatcactcacatgttctgcgttgcctgcaacagttgttcaagcgtcgggttgaaggtcgaactgcccaccgacagaggcggcggtgtcaacgatttttgctgcgaaattgccgaagaaaactgtcgatgttgttgttgctgcaggatggttggcgacgagccggacgacgaactgagcccagcagcagcggtgccattgctactgtggaacaatgccgagccaccaccaccaccgcctccaatggatgtgatgtcatgaaaaccgttggacggtccgcccccctgctgttgttgttccttgttggtctgtttggggtacagacgagctgcaaagaacgaatgaatgatgaaccgcgtgttttttagttagttatatcccccgaaaaatgaaggatggaagttgggacttgaaggcaaaaccaaacggattggaatctctctcttttctctctctctctctctctcctcatcgtttctcggtcctccagaaaattttttaggaaaatttttttatagattttaaagcaaccagcaaaagccggcatcgataaccgggcgagcgaacacagagccaacgattgttgtgctcttaattatttaggggagacaggagcagctcgatcgttcattttttctta

SEQ ID NO: 17293 - DNA, 1081 bp, Heterodera glycines
ggcgcatcggctcggggggactgccccgaaaacaaaaaaatcgattttttcaagtgtccgtttggggtactcaaacaattatggggagcaaaaatccaacgcagaattaaagtacaggctatagggaagctattccggaaggattcggtctccccataaatctgggcgcatcggctcggggggactgccccgaaaacaaaaaaatcgattttttcaagtgtccgtttggggtactcaaacaattatggggagcaaaaatccaacgcagaattaaagtacaggctatagggaagctattcccgaaggattcggtctccccataaatctgggcgcatcggttcggggggactgccccgaaaacaaaaaaatcgattttttcaagtgtccgtttggggtactcaaacaattatggggagcaaaaatccaacgcagaattaaagtacaggctatagggaagctattcccgaaggattcggtctccccataaatctgggcgcatcggttcggggggactgccccgaaaacaaaaataaatcgattttttcaagtgtccgtttggggtactcaaacaattatggggagcaaaaatccaacgcagaattaaagtacaggctatagtgaagctattccggaaggattcggtctccccataaatctgggcgcatcggttcagggggactgccccgaaaacccaaaaaaaaattttttggataaaaattatttaaatgaactgactagataatatttaaaataggttatttctcttcctttcagtatccctgcaaagtttggtgcgcttctgatcagtttctgaaaaaaaagttaagcctaaactttttggcctgtttaaaaaggaattaaaaatttttaaaaattttattcatctccctttttgatagaaaaagcatcagagtgcctaaactaacatgtaaataaaatttggtgcgtttcagaaccctttctgaaaaaatatttaagaattaattttgcaaaaaataaataaaaacgaaagactcagattttcgaaaatttttttgagccagctagctcggcgctcatttcagtgtaagttagtccttta

SEQ ID NO: 17294 - DNA, 3097 bp, Heterodera glycines
tatcattcaatagccctaagtggtttctattagtctataaaatttttaaaaaatttcattgagttacaaaaattttatggacaaaaatgttcgtcgttaaagtgattttttggaatttttgaagtctaatagaaaacactaatgacagttggatgatatcaaattcattcaaattttgacgactatgaaaggagtaataccccaaaaatggacccaagggccaatttaaaaacaaaaacaaaatctgacagttttcatttgagcggtccaattgacatcggatcgactgaagtaagttttgagcagtttaggacggccatctgcacggggcgtgctcagccattcgtacaacgcttggtcatcaggcgtatcagcgccgttaaattcatccccactaaatcgtttttttatttttgaaattttttctgtaactggaaatttttgcccattaattagccaattacatttgcccagtcagaggccggtaaatgtgattgacatcaattgaacgaagattggcacaatcgtgcagaatggttggcgagatgtgtgtttgtaaagcggtgacattgttgatgttatggaaacggattttaacaatcccggcggcattcagcgcgggccaaatcccgtaggtcacaacatcccaactttggcgttgtctaaaaaatatggccaattccaacgtgatatctgttgcgaaaaggcgttgaatgcggtggagaaaagcgatcacttttcggttgatgtgactggaacatttacaaagaatggatgattggacggtcattggaatgatcggaatcaatcaatatttggctgatcagaaaactcactaaacggcaatccgcttgaaaccgatcaaattgggaggaagcggctttaatggaattggcaaccgtttaactgtcttgtcactgttacatttgacaatttccgctccgtcattcgtgctggaacgttcaattctcaaacttccaagcttccattttcttcgtttaagatgagtgtccaccactacatcaaatctataggagacaaccgcaaattccaaaccgatttttgcgtgcccacaaaagggcaatgaatccaacaaaatgtcattgcagataaaactgaattttgtttaacgaattatggcattaaaattagaattttatacaaatttatctcacattttctcaaaaattcgtttctcttcacgtggatgatctgacatagaaggatatatgtacagccagtcgatgatcaaattgaaaattgttgcattattaattaataaaatattaattaggtaattagtgtttatttacacacaaaaaattccctaaatgaaagaggatttattttttttaatttaaaataagaagttgattgaagtttcaaatttcaacgtcacatgaaatttctcacaacggtgtcattctttgaggctttgttttttcgttgacgttttattgacgaacaaatacaattcaaccaaaccaaaccaactcaagaaaaaacaaaattttcgtttttttggcgtaacgtcactcgctgataagggccaggagcaattttttttttgtttgatcacattttcattcttttgattttgatcgactgtttggaatacacaatcaaaacctaattgtttgttacgcaattagagtagataagaaatgaatatttaaacttgccaactgatcattactgattaattcaattcaatttcaacaaacaggaaataattaattaattcaatttgtattttctcgcttcttatcaagtgctattagtagaaagaaatgaatcgtattggttcagcactttcaaaggtattttttgcatcagttttcattgaaaatccagcaaatttttggttgttgcttttgtacttaattaagagattttcgttttgggactttaattggaagccatacatttttttgccattcttggatctaaacttgagtttggggagattgagatcgagattaaaagcagtacggtgaatctaaaacatagtagaaaaaatagttaaattggaatttaaatgcgtttctcctgttttagtcggttttcatccctcgtttgttctgtcaccgtttcttcgccagtggacccaccgatgcgcgacaaaatgtgctcgttgtcattgtcgatttcaacggcgaacagcaattgcttgtcaacggttaccaatttcagatacttagaaaaccaacaatttttcatttttctaggaaagtacagcgaattgctcggccgttcccccgactttccatttcctggcaacgtgaaaccgttggctgaaatgcaacagcaacaacagcagaaagtgaaccaaccatttattaaactgcaaataaaaaaaggcacttttgcctgtttagggcccccaaaaaatacaaaaagtggacccttttgtagggacttggaattagttgaaatagatttcagacgattcgccgtaaatcaccaagtacagttttcaatacttatgacacgaaaaaataagaaaaaatagggtcttcccttttggaattttttgcgggccttaaacagcaaaaatgccaaaaaaatgcatagtaaatttaaaaaaaaatttttttcagtttccattccctttggacgccttgccaaccaaacaactcggcaatggcttgggtgctgtcatgccactccacaaaatcgtcgagccttcatttgttgtttcggacgatcgtaccgccataccacgagcgttaaggcatcaccgaatgtggcaaatgggtgaaaatgatggacggatgacggctaacacaaccaccgccaaatatgaatggaccgtggccggggtggatgggattcgaatgctgtgcgaaggtgggggcggggagagtttgaaaatcggggaaaaactaattttttttggcactttgcagaatagctgggcacatttcataattttttagtgttttaagagcaatggtcatcatgaaaataaattgactttaccccccccccccacatttgttaaattttttggacagttgattcttcaaaagtgctaatttgaattttgaaccaaatttgtaccatcaaaaaaaaaaatttttttttttgattctcg

SEQ ID NO: 17295 - DNA, 1013 bp, Heterodera glycines
ttagacataaaatgtataaataaatatgtaagggcacatgcattcattgtttgttcaattaaaatttttgctttttttatttcgggaggcaaggcaattaaatatgcattaggtaattaggctttatcccgagactcgcgaggtccgtctctcgaacctgggggttcctggcctgaattttcgattttcccgaattttttttggtcaagaaattaaagctcaaggtccaaaacggaagcaaggtccaccatgctcatgctaaaatgtcgaaatctaatttttatacatacatctactgtcgaaaatcataaaatcggtcaatcaaattcaatcccgagtcttttgccctcgagaattgcctgtacaatcccacctggaggcaagagcaaatccaaaactgtgccgggctttgccgtaccacaaaataaatggtcttgccgacgtcaccaacaaaccacatcagcaccattttgacactgcaacaaatgtttaaaatgtatgcataatgtgtaaaaattgaggcctaaaaaaatttggaaaaataaactatgaaatttagatggcttttttatatcctttttaagaaaaaaaagctataatataacgaaaaaaaattggaaaatggcgccatcaaatgtttttaacaatttgtttagaagcacagcttacgacctatgccaattggaaaagcggaaaatccctccgatcatcaaagtggaaattcaacaccgcttgaacggatcaacattatctcatcatccaccatcattatattaaatacatcaaaaaaggctcaagggcaattgattatttaaaggaaaaaatgaatccctctcaatggataacaattgttaaaatatgtattgtttaatttttcttaatgaagaaaaaagaaattatttttcaaatatttgtaaaaacatgagtttttttctgttgttttttttaatgaaaattttttaatttaccatttattaataaaactaattatcactcattattaggggtaggtc

SEQ ID NO: 17296 - DNA, 991 bp, Heterodera glycines
ctctgttcttttctcctctcctctcattcccttgcactatttttctcctctctctccctctctttgtcttcccctctcttcactgtctttctctcccccgttcaccaatcacatttggtcattgccaaaaaaaagttaagtttggctttggccaataaaaatgcaaattaaatattcccttaacatcactcttttaccgctcccctttcttcaggcacctctccccgaaatttgtttgtatgtgcacacactgctgaatcaaatttgctcataaagccggcgcttcgatgttcgccccccccccctaaaaaaccccctcaagcaattttagtcttcggcacaatgcatggtgctttcggcaaatccggattcatttttttttctcactgaacatgtatatatagctgtcgcatgccattctttgcctccaactttataatctcggcatgacgtttaagtgccaatgaattagtaagaagtccccaatactcaagactctcgaccttggaactcgtaattagtctcgcgaaaagaattatatatatatatatatatttaattttgaatcttgaatttaatgaacttcatatggcaaaatttcaaaaaaacgggggccaattcggtgccaattttgcccaccttatggaacatggcgttcaacagcgagcagagcacggtgaacaggcccagggcgaagatgtaactggacaggtcgttccatttccagaaggcgttgcaaaatttaccggctgcaaaaaaaaaattggccatcatttaatggcaaaaaaagccaagaatttcagtccctctttcaccccttcctggaaaatatccaaaaaaaaaacatttttcattcctcacaacgtacttttcttctattacccacacccatccaacccgcaaaaaacaaacatcaaactcatttgtcttccctccgtttatgtgaagtcacataaaagtgccgccccggggggggggggggggggggggg

SEQ ID NO: 17297 - DNA, 1302 bp, Heterodera glycines
tttgttgatgctcaccttacactgctccatgcacgccttccacgtgttcatgtacttttgggtgcagggctgaatttcggagcacaggcactgcttcaccgttggtgggttagccgcggcgaaaaacgccgccgaaatgagcgcggccaacagagtacagcaggcggaagaagaaagcatttttgtaacaatacgattattctacaaccaacgggggatcaagttcaagcagtacattcaacgatcagttgtcattgcctgaccctgatcaattgacttgggcaacatttgaaaatttaaaataaattgggcgacgaagcagagagatactcgattgatagggcttaatgcacatttatcagagtcaaaaatcgggcatttgggagattgagcaacatttcatgccataacagggtctggggcttaattgacaaattcagtcttataaaaaataagcgtccaagattgggtaagctaatcttgcgaactgtcgaacgaatttgatcaaaaaaggcattgaatttgggttatgtgccattgcagatgcgctgatcagtagggtgaagcaaaaataagacgaatttatgctatactgaatgaatgtgtatcgtcgatgcagaacaatttatacacaaaaatttcccctaaatttcgccgaaaataacacaaaattaattaatttattaattagttaattgcattttccccccggcgctgttgtgtgatggcgtgagttgtttagttgtttttaggggtatcaaagtctcacttaaggaggttaaacgaataaagattgaaaaagttgaccaacagtcctttcggaatgaatgggtgggcgatcagcgatcattaattagttaattagtaatgtgaaatgtcgcacatttttggccttttaccgcgcaaaatttgtccaaatgcaatgattaggagagctgctgaagcaatcatttataaaagaaggccccaaaaggcatttcattttaattacgcaaaaaattcagtctctgagatgaaaaccaatctctgatcagtgatcaatgtttcctcttgatcacattggcgatcgaatttttctctaatcagtgatcaatatttcaattttggtcatattattaatcttatccgtctctgatcagtgataccaatctctaatcaatgatcagatactctcttgatcacaatgttgatccaatccttctctgaccagtgatcaatgtttccttttggtcatattattaatcttatccgtctctgatcagtaataccgatctttgatcagtggtagtgatttatcctgcc

SEQ ID NO: 17298 - DNA, 1125 bp, Heterodera glycines
  unsure (1)..(1125): unsure at all n locations
aaaaaattcttatacataggatttgaaatttttttaaaaacaaattcataaaatgttttacaaaatcactgttttctttttgaaaacgcgggggattagtccctgtggatcttttccggcaaaattttgttttaatcccacagcgggatccgcaaatttgatttttttttgtgcgggatcaataaaaagcagcattaaagtgaaaaatgccaaactctgaataatgaatagttcacgatgataattgggatatctcttactttatcttgaccgaaactctttcgaaatttaaagaacatttatgactaccgaatgacaccaaaacaaaagaaaaatgtggataatttgagaaaagttttgttttttgtcaaaattttctttttgacggagatttttcaatcacttcgtttcttagctgatcaaaaagaggggcgaaactgatcaaaagttggcaaaaggcgagcgtaacaattttaaaaatttccaattgcattcttcggcatttcaagtaaaaataaatcacttttttccgtttttgtcaattgccattggtcctttgctttcaatgcctccaaatatgacttgttttctagtcccattttgaccattattttttgtattccttccaattcgatgtcaaaattttgccgaagtaagcattaatttttggttattcgttcgttttctattaaatttgcaaaaaaaaaagagtgcgaaatttcaaaaatttacttggtcccctttttcggcattttttgagtttagtgcttagtttttggttttcgtacatccaaaattgggaagaaagagtaaaaaatgtgccaaaaaagaacccaagtctctcggcatttatttgttgcgtttttcatttgccgctgaatccgtcgtttctttcgccatttgtacaacattttcttcgaatgtcattttcgaaatgtcttaatgtggttataaaaggtcttaaattatattttagccattttcatggaattttttaaacccctttttagtgcaccgggcgaaatacaaccctaaaaaaaaaaccgtcagcagatcataaaaatttagtttnagaaactaaaaaaattatttcagttttttctttctgatgaaaaactaaaaaaa

SEQ ID NO: 17299 - DNA, 904 bp, Heterodera glycines
  unsure (1)..(904): unsure at all n locations
gaaatatgtaaaaatatttaactataagtcccaacttttgttcgcaaacacaaaaagaaagtgtttttcctactattcagagtatggagaatccaggaaaatatgtatttagataaaattccattcctaattatgatttttgaataaattattaaataatgaaattcaaaattacttcaactctttcacaggccaatgagtgaggccaaagagggcagaaggaatttggaaatgatcaaacggagaagaaaaatattaattcgctgataatgaaagtgattcttttaagttacgcctaataattcgaaagttaaaaaaatttgaacaaattttggaattaaaaccttaatttgtacgtgaagaaataaactgtgacacttttaacagcaattataaaacaaaaatgaatttggaggtctgaccagagtacatatgtattttctaaaagaacaaacagctttcaatccttctttgaatattttatttgtttattaataaacaaaaacgaataaattgttatttcccgtttattatttttcggtactgaagtgtccattttcactgggactcagttgtcccagtgctcagatggcgtcggttcgaatttataccttgttttttagacttagctcatcaagactttcgaatgataccaaatttgtgtgattttgaccgttttaaaaggtcaggtgcctcccttttcacccaaattttcgagttttaaaccggttcaaaaagcggacgcttttccgcgcactttttttgatggtttaatattagagtgccacgggaccgggaattcccggtcatccgaggtcccagtcccggtcccggattttgaaaagctcaggtaccggtcccggtcccggattntgaaaagctcaggtaccggtcccggtcccgg

SEQ ID NO: 17300 - DNA, 1303 bp, Heterodera glycines
  unsure (1)..(1303): unsure at all n locations
aataataaaaatgaataaaaataaatcaaatgctttattcacaggtgataaaaatatagtgtaaatatggcaacatggaaaatcctactcagaactcattgcttttagtaaacccctgaattcctttgccttattaatttgcaccgctaccactggaaggttattccagctttttactattctattgaaaaaattattttgagttttggccgtgtggcgctttacccgtaaaagtaaaggcctcctgggcctttccgagaaaaagaaacttttcccagcatcgaggctggtgaacccttttataattttaaaagctgttgttaaatcattgatttttcttctttcttctaatttgtgtaaatcagtgattgttagtctttccccatattttttgtacacaaatccacattttctaaatgcttttctcgtgaaaaacttttgaacgcgttcaattttatctatatctttttttaagttagggttccaaacttctgtagcatattctaattgaggtcgtacaaaagttttataggctgctgttagagtctttatttccttgctttttaacactctcaaaatttggaaagttctaagatatgcatttcgtacaattttgctaatatgttctgaaaaattaagttttgagtcaattataattcccaagtcacgtacattatcagattctgaaattttaaccttaaaactccgattttttaaaaagttagttaaaaatttataaatttttccttcaattccaatctttttgattttttgaagtaataaatcaattggtacagaatcaaacgccttgacaaaatcaatatagataatgtcaatttgttgatccttttgtagagaattatatatatcgtccattgtttttaatatttgggttgtagtcgacctatttttaaaaaacccaaattgttctttatcaaaaaatcttataccgttcagaaattctaaaattttgctacttaaaattcgttcaagaactctacagacagtgctgattaatgaaaccggcctgtaatttaatggatcagttttttcgccttttttgaaaattggtaccactaatgatgttcgccatatttccggaatttgaccggaatccaaagcaagtcgaaatatgtcagctaatatttttgtaattggctcagcacaattttttaataaaatgtaaggaatgttatccggtgaaatggaatttcgcctgggaagctttcttaatatattccanaattatgccagccatttaatgcaatatccgaaagtttaattttattctgtgctgattgag

SEQ ID NO: 17301 - DNA, 2276 bp, Heterodera glycines
gtttttcacaaattagttttgtttccagcaatattccttcacgggtctctgcccgagttgccccaatgggcgcaacaatttgccgatcgaatgccacagaatggtaagaatcaaatgcaaatcattgcattttttgtgccaattcggtgcccgattcaactttttgtagccaattttgtgaggaatgtatgccatttttaagaccagcgaccataaaatctcaaaaacgcaaaattttacgagttgcacaaattttgttggtaaaagggctgttgttatggaagacaaaaagctgtaaaaagaggggggggggggagcaatggcattggcacagagcttggcactttttgcaaattaatttttcgcccctatttagttggttcacttcgtccgcaaaatgaaagtgtggccaaacaaagtggcactgagcggcaaaaggcggaggtaattaatgcaattagaatttgctgtaaaacaattaatttcacacttaatttaggctgtgaacgcccaaaagattgccgaactcgagaaacaattggcggaacagaaagtccgatttttccccacattttttcactgaaatttgttggcattttaaggcattggaacggcaaaaaattgcggcagcggtcgaagagcagcgcaaaaaggacgaaaggtattccatttgggggcttgttatcaatttgatggaattttgcgaatgcaataggcaaattggttccgatggcattacaggcgccgtcgggcaaaatattggcgcaacaaatttttagaatttctattttttgtcacgagaattccccttccgtcatcccttttattaagggtctttatgggctattagctgacgcttaattcaatgacttttgcattcaaaacaacttttttttttgtatttccagaaaggccttcgaatcctccgagccgaaacgaacccgtgacagtgcagcaattgacccggtcgacctgaaggtgtgtttcaaaaggaaaggcttacatttgtgtccttatctgtgattttttgataggacgatgaggagttttcttggaatgaggagtttataggtttttttggaatttttgagttttttttgaaacaaaattacccgttttctctcaaaatgctaatagtgtcaaaaaaggatggatttttcattgactttgatttgcctaaacccaaccaactacccgttattttagaacccggatgtttttaaatttccttctcagttcaggctaaaaaaggaggccacgggcgacccaaagcgacgccgcggggtgtggcagacaacgctttcgagtcgcggctgacggacgcattggacacggcgaatcggcacgcaaaagcggcagccaatgcaaagtatcaaactgttcaggtaaaatgggagcacagaaaacatcaatgaaaaagggggtggcggaagtcagggatggacccaggatttcggctcggtgagggcggcgtttccaaaaaaattatgacaagtgggcctggtaatgctgccaggcgccgccgtgggaaaaatttagaattttggcactattttttaacaatttgcagcaaaattacttttttttgtgtatttttgaaaatttagcaaattttcttggaaaattatgttagggaggtcggtcttggagctgggttcaaggtttatcattggttaagcctgccgctctgtccaaattaggccaaccataaatgcctgggttatggacagtaaaatccaggcggagaaagtaattgtctacaaaattgcatgagaatgtttacaggctcttcaactgcacaccaaactgatgaaggaagcggtggacagcgacgtgaagcaaaaagggggcgaaagaggcggcgattcggccaaatgggacgaagtgatggaaaagcgaaatgggaaaacaaaaaatggattttaaatggtgcccttttcaaggtgaaacgcgcaaaagcggaggcggaccgacgtgccaaattggacacggaaaaggaaggcacggcacgcgacgcaatcaaagaattggagaaagtcggtgttgaataatggggggggggttagttcatttgaaaaaatactcggcgaaaagtaaacacgacagcccctcccagcttaaatatacgaaatttattagaaaattgaaattttggtgaaactctttcagaaatgtttcacaaaacgatatttgggttccgaaattaacagaatttttttttgaaggtattgtaatttttaggattttctatctagtattttttccaaaaactaaag

SEQ ID NO: 17302 - DNA, 2448 bp, Heterodera glycines
ctggggtaaattagggtcctgagcaacatatgatgtttattttaagtttcagattttttggaattttttaaaaattcgaaaatatttttaatttttttggtccttggaaatttgggttaaaatttgaaaattcataactcaatggaggactggtcaatttaagtgaattaaagctttaaaaatagaaaaaaatcgggagaattttatgagatttatttgaaatttatatcacaaaaacaaaaaaagttattccagaaattctggaaaaattcgaatttccagaaaaaaattcagaactcggttctgaaaagctatttgagaaaagtaaaatactacaaaaatccgcaattttttgctctattatataaattttatttggtctttatgggttatttgggccgctgatcacgaatacgtaatcagattttacttttgacatcgttaagacctcagaatccctgtgtgattggggattctgaggcatcattttgagggggggggcggcaggttcgaatccggccggtgtacattatttttctgtgcattttttgattacttttacatgtttaatttcatttcaaattaaataaatattatattattaattttcattttaataaatataaatagttttgtttaatctataaaaaataaaattttttaatttaaattaaattattttttgtgaaaaatcttttaaattaaaataataatttatttacttttattaaagaactcctgtatttttaaattagaatttgtaatattaatttcaattcaaataaatattcaatccttgtacttttcaaacactctttttaattaataaaaggaaatttattttatttttaaaaatttattaattgcattcaatttttaatcttactttttaataaacgatttccttaattatttaattttaataccatgattgtaccctttttaaccattgttgtaccattccaacaatttttgtacctctcctaatcactgttgtacctcttgtaatcacttttgtacctcttttaatcactgttgtacctcttctaatcactgttgaacctcttctaatcacttttgtacctcttttaatcaccattgtacctcttctaattactgttgtgactcttctaatcactgttgtgactcttctaatcaccatctgttttacctcttctcatcactgttgtacctcttctaatcactgttgcacctcttctaatcacttttataccccttctaatcactgttgcacctcatctaatcacttttgtacctcttttaatcacagttgaacctcttctaatcacagttgaacctgttctaatcactgttgtacctcttttaatcactgttgaacctcttctaatcactgttgtacctcttcaaatcactgttgtgcctttcccttccgtggttgcacctcttctaatcacttttgtatcactttttcactgttgtacctcttctaatcactgttgcacctcttctaatcactgttgtacctcttctcatctctgttgtacctcttctaatcacagttctacctcttctaatcactgttgtacctcttctcatctctgttgtacctcttctaatcacagttctacctcttctaatcacttttgtatctgttctaaaatttaaaaaacggcgcgaagcggccgttcgaggccgcaaatcggcctaaaaaggccacaaaaagggcgcgaatcgcccgtctgagtccatcaaaatttaataacgggcgcgaagcgcccgtccgactcaacacaatttaaaaaacggccgcgaagcggccgaaaagcacaacaaaaattagaaacgggcgcgaagcgcccgtctgaggccgcgaagcagcctaaaaatcaccgaattttttgaatcgcttcacagtctaggtagcgaagctcccaaagcgcgaagcgctttttcccagctaaatagccgacggttcacgcacccgctagttaatatatacgttatattgacaaggagtttcgtttcaaaaactaatttgagcttaacggctaatgggacgggtctgaaagtggtggaagggtcttacaactttttgaggcgcatctgggaaaactatagaaaaaaattctcgacgcccaactgagtcccagcggctgatttctcattttttcgtgcatttgagggcccctaactttttttctgaaactcggatcaaaaaattcccgctgtgagggcactccgcagaagtgtcctctataatccagtattttttattttttgatcagaccaaatcccggacccgtacagacacggagactcagttaatttttttttcccacttcagtaccaggtgaataccacgtcagggtttggtctgagggagggggtgccagcgaacttattggaaagtttaatgagctctaatttttccaaattttaaaaatttcaaaaattttcaaaattttt

SEQ ID NO: 17303 - DNA, 2724 bp, Heterodera glycines
  unsure (1)..(2724): unsure at all n locations
atggtgctaggtcgttccacaaaaaagctcagtgatcgataaaattaaataaataaatttaattattcaattcacaaaacacggtgccgtccggttaatactaatgtacggcgggacgcaagtcattttcaaatcttttaatttttcaatttttgacatcacttctcgccaatttcctccatttgtagtagacatagcctaacaccattgataccattttgtagagctcatcgagctgtacaaaaaaagccgctggtaccggcacgcttagcttgggttggccatcgacagggtcgggggcgaggctgagggtcctccggcagatgtgcccgacccatgacgggtccaagtgaatggatcaagaaccggacccggcctgggagatagcccttgaaaaactgaacaaaaaattgttcttaaccgggccgatccgggttccggatcaggcacttttggtgccccgaaagtggtgcgataggcttccggaaaatgaccaatcaatcactgagttttttgtggatcgcccacactgagcttttttgtggaacgactcaccacggaaaattatgtcaatattcgtcactagttcggactttttgccattattttggaatttttactcactagttaactatttcgaaatttttcgttactaaaagttgcgaccctatccataaatatgtaagagaagatccggattttcctgtttgactgccgccgaagccctaggataatttcagcaaatgtaatggaatgtttccaccatagaaggggtgacaaatgggtgggggggggagtcggggtcgttttggcgcccacgttttggcgccgacgttctggcgcccacgttttggcgccaaggtcgttttggcgccgacgttttggcgcccacgttttggcgctagggtcaggtttttaaattttgtttatgtttgaataaatgaaaatatgtattcgtcagttttctgagtcgctaatcacgaatattgtattcatcttgacaattgcgaagcccggactcgatttaaatgaaatacaatttttgaacatattagatcaggccttctatctgttttgttttatcaaatgttttaatatggtgggtccaaatctgagaaaatgatttaccagattcaaaaccgtagttgtacctgtttcaaaaaatggcctgtacctaaattttgtcaccttttttaaaaagctattttagcggtttgggcgtgtgcaaattttttgatgaaataacactaatccgtcaataatttatatcatagacaaaaataaaagtcagattctttttctgcatgtaaaattaccctagaaaaaatttatttatttattttactatttaaattattaaataaatttacgttaaccacaactcgagttgtggttaagattccttaagaaagattaaaccacggttagatgagcataccggttggaaataaaccacggttaacttgcgttaaccgtggttaagaagggagtaaaccacggttaactcaaccgtggtttatccttaaccacggttaaaaagggaaggacgagcataccggttaaggatttttaaccacggttaacgccgttaaccgtggtttagctctaaaccgcgagacgagcataaggcccctgattcccgtttttgtttgtgagaaagtttttgcttttacttttctacattatttaatcgtttttttcccgcgtttttcattattgaatttgttaattctataaaagaatttgttattgttaaagagaaaagaatttgatagttaaagagacgtgtttttttgattttgcttagtaaaaaattgaagaagcaaaggatttttaatttgttttcactttgtaatatgaaaaagatcgactttgaatttgatttgtgattttatttgtaaatggttatatgtttacacttattttggtattaacgtttgccaaataaatttttaaaattgttgtcattaaaatattgagaagaaatgtctgataataagaaaatgccaaaaaagggtgcgaggccgtgaagcagccgagcgacaaagaaattgttaataggaaatgttagtaagtgagccgcttccgaaccgtccccccgtctggtgcaacatcctaagacacccaaaaaagaaaaatgctgaaggatttgctgaaattgagtcccagtgattgaaatgttggtgggttgagtcccagtgattgaaatgttggtgggttgagtcccagtgattgaaatgttggtgggttgagtcccagtgattgaaatgttggtgggttgagtcccaatgtttggaatgccggagatttgagtcccagagattggaatgccggaaatttgagtcccagtgattggaaagcttgagaattgagtcccagagattgaattgctggtgggttgagtcccagtgattggaatgctggtggattgagtcccggcgattgaacgatggtggattgagtcctggcgattgaaatactggtgggttgagtcccagtgattggaatgtcattgaaagttggtgggttgagtcccagtgtttagaattccggagatttgagtccattgtttggaatgccggagatttgagtcccagagattgaaatgctggtgggttgattttcagtgattggaatgtcattgaaaagtggtgnngtgagtcccagtgtttagaatgccggagatttgagtcccaatgtttggaatgccggagatttgagtcc

SEQ ID NO: 17304 - DNA, 748 bp, Heterodera glycines
atcagacagtgatcactgattttgtcacctgtaatggcgtgcattgccggccaaagtggtgaaggagacgacgtcgagaaagaaaatggtggccatttggaaggactcgggctccaccgcctcgcccagcttcagtttgtccgccacctgccgcggcagcatccgatagagcagaatgtcgctcttgcgcttctcctccaccaactctttggtgcgctcctccacctcctgctccagcgaactggcgtactgctcgagcatgccgaacacgtagtccatcaggttttggtttctgaacatcaaaagggcaatgcttcttcttctcctgcgtctcccacccgtcctggaccatctgcttaagcatcgtccgcaccatatccatgcgcgggcgttcggccggcacttcagcccaacagtctctgatcagatggacctgaggaaaagcacaaatgaattggaaagaaaaggcgatcagcagcagcaaatcgtaccaaactttgattggtgtcttcgcgggggcggagctgaggacggtgagggattgtgttgttggtgcgtttgagccgataaaggatttctgaggagtgagaaaaagtcgatgagccaaaggaatgaatgggcacggcacaacaaatccaataaactcaatttagaattgtggtccgtacttaggatgaaaactcgactttggtcagctcccaataattccccctcaaatgccagtgcccaccatccaccgtcgtccctc

SEQ ID NO: 17305 - DNA, 1419 bp, Heterodera glycines
  unsure (1)..(1419): unsure at all n locations
cgatgagagattactgtattgcgatttggggatgaccaaaagcaaatgcttaatagataaattagacaagtattanaatataatgtcgtttattacacttagaactctgttcaagttccgcttggaccgtatcccagaaaaagtactgtaaccaatttcccggtcaaaagtaccgtaggcaattccccggttacttttcgtctttcaccttacgaaggaagtttaaatcgtcgcccaaaatgcgcactctgacatggtatttgatggcgagcacaatctcccggttgtacacaaacagtgcgaaattggccgtctccaacactttgtggctgcccaccgtaagttttgtgcttcctcaacagtagtccagttgattactgtacctaccattcgttaccggaccatttggctacggtacgagtttttttctcacccgaatgactgctgtgcatgctccgcatgcttttctccgtctccgacttcagttcttccgtactgcgcaactctttcggatttcgtagctccgcaaatggaatcagacactcgcgcatcagtcgctctttctcgcgcattttctccctgaaatccgctaattagccaattagtcttttccaataatggtttgatcagtgctttggcaattcgacctcagtgcgtatccgatgccgagcaaagcaatgaagaggagaagaagcacaagcgcacttccgatcagaatgtacacagtcgcattttggccacattgcgtgccgttgtagccgcacaacggcgtggtcagcggccgaacgccgccccaattgacccaaagggacgcttcgctggtgtaaaggcggtccaaattctgaacattggcacaaaatgttggaaaaattggcaaaatgccctcctcctcctctgcttacaagcactcctttgctgatgttcactgtcattgtcactgtcggcacattcgctgcgtttagcatagtgacgaaaaaggtcggctgtctattgccgtccgagtccaaagtgatgcgtccggtctcgcctgaactgctctcagtttctcttaatttgccccccttttgcttcaccctgaaatgtgccggcagtttcggtattcatcaacgatccgttgcggaacaaatcttttgaggttgagtcgaactgttccatcgtgcgatttagtgccaaaaaatatgcgtaagaagtgtcgaacaatgctcgagcatattgcgaaggcttaacaaggccaatgataaaatgccgaagggtttgcccaaccgatcgttccgatgggtcgcccatgcaagtgccattgcagaaaaagggataagtgccgaatttgttggtcagatttcggttgaattcgttcgtttggtcaatcgtttggctttccaagtcgatctatttgctcattggtcattcaaaattgccaaa

SEQ ID NO: 17306 - DNA, 2156 bp, Heterodera glycines
gggtgaaaattcgtttccattttttagcttcgcgcactaaaagcatcaattattattaaatttcatttccatgcatttttttatatgtattattttttagcaattaaatgcccgcattattcactcaatttgcttttttttcaattaactccaacattaatattttttagcagatttaccgtatatgctttaattatagcccatgggggattatttttcaacctcctcagaaaaggggggataattagagactgggggattatgatagagggattatttttcaaaacacctcgtagactgggggataattggagactgagggattaatagagactgggctataattagagcatatacggtagtcgattttctgcaaataaaatatttgctaaatttacttatttacgtaaatcttacaaaatgggattggagattgatgagaaaatcattagacaacctaatcaattaggaatgggcaataaaaagtctttataatgtttatttatttttattatatttaaaattaaattaaaaaaccccccaactaaaatatacataacaaactcgaaaaaaaagttaagggctggcgcaatacataaaagggttggttaaggtggatgccgacggtacagcgggccaaaggtaccggcccagaaaatttcacaaatttttaatgaaatttcaaatcccgcgaggggatcctgtcccgggtagtcaatggcacaactttaaaatagtgaacatttaatcatataatttccttattagtgactgactttatgacatacatttttaattttgagggctttgctaaaaatgacaaaaaattgttcatgaaaatatgctttttcatcgtaaattttattcattattaataaaatattttttacataaattttaaccaaaatttaataaaatgaagcgttattgaaaatagtttgccaaaatttattattttttaaccaaaatatataataaaatggatgttcttgaaaaataatttgccaaaatttatcgggcgtcccgggcccggtccaaaattttgaccgggcgcccgtacgggaccgggcttttttcaaaatttttggaattttgattaaaaattcgaaaaaattttatagtcctttattttagcttagaaatgtcaacccattgtaaatcgaccttttttactcttcaaaagaattttaaggtgtattttttcaaaaagattttgacgacattagggggggggtcgcggcagtgccgacagggccgccgggtaaatttttgaaaatttgagtttggtttgttaacagatttacacgaaaaaatgacaaaactttgctattttgagctacattttagaaaaaaatttagctttttgtactaggcgacactgaagaaaaactttgacttttaatgaaatttattaagaaaatttttggtttttcatgaaatttgaaattttttttttttttattattaaaaattgttttttgcactttttttttgtgcccaccaaatttgccgattggcattttgttttccgccttcggcggactgtcactgcacgattgtcaatgtttttttaataatgtaaccaaaacaaaaaaaattgtacttaattagaaaaagaagaaataagtacaattttattaattgtagaattgcaattttctaaataaataccttatatgaaaatctaaaaaaaatttgccgtacgttcgagcggactcgaactttaatgaatttagccgacatactgcaacgctaacgactgcgatatgtgcacgacggcacacaaacatttatttcaggtccgaaaattttccgatttttagggcgaaaaaattccattaaaaattgtggacatttttgtgtcaagtcaatctgacattgcacaaatattaaaaataacgtttaaaaagggcagatttttaattcgtactttaaaatagtgaaagtaaacttttcttttttgtatattttttataagtcaatttaatatcactttgtaatgatttttttacaactattagtgtaatgaaaacaaaataattgtattttaattaattgtttttgtacaatttttttttgttaacattttaagggtcaatttaaggctgccaaaaaatagacaaaaagtggtcaaaatatgtatgcatactagccgt

SEQ ID NO: 17307 - DNA, 1681 bp, Heterodera glycines
tttgagctttgacattgttcccccattttcgctcccctcgagagttttgactaattaccgaagggggccgggacccgcaccgattttgctggactcaaccggcattcccgcatttttttgaattggatgaatttgcagagctaatcccgaaatccgacccggcaacatttttgaattaaagtcccgcaaccgaatccgcaaatttgaatttccggcctctgatctcgacattggttccgtccgttcgtccgtctgactctctgctcacctgaagtgtgttctctgtcttctctgtctgctacagctgttcactccgattggctgttgtcccctctctctctttcgttctgctgccgtcgtcccttttcttctctcgcttatcccttaacaatcttttatctctaaccctactctctccccttttctcttcatttgccccatctctctttttcgttttatctctgcatgtctctctgatttgcttactcttttcttgttgctgcttctgctgatgctgcttttcttcagtctttgactgttttttgcctccgggaaaaggctcctctacggtaaaagaagttgggttactgtacatggcaaaatgatgcgaaattgtggtggaaaaggaaggaaaggccgctggagagcaagctgaaaatggtggcccaataaagtgctcttcggaaaagtaagtttgggtttttaatttagcaaaatttccgaatccaaatctgttttttgttgtctgtccgacttaccattgtatgccggcaaaaagagaggcgctgctcttaattggccaaatccgccgtaggcacaatccgcggggccaaattcaatgggcggcaaatacgggtgatggtggtggaggtgatgaagctgatgggaggaggaggaggaggaagggacggaggcgaaggggtggagagggggcgggggaggcggaaggagcggaaaagcgagcgcggaagaggcgggggcagagaagtcggccaagtgggacactgaacagaaaaaggcgatgaaatattgatcggcgcaatcggaatgccaattttctaacggacgaggcgatgaattgatcggaaaagcgatcagaatgtcagggagaagggatgtctgatcgggaaaagcgaccaaacgggcggggaataattgggaacgctaaagtatgccggggggtctaaggggaactgattagagcggatctttagaggtatttgctgaccattcgaattccttccgttttcactgaccaagagactgatgagtcactgccactccgtttggtgctttcatttcacaatgcaatcccccaaaagtgatgccgtcgtcgttcggctgctgctgattgtgctggtggcactgctgccctccctctgggcccacaaattcccctccggcgccaatgggcggtgccatcggcggtggatcatcggccgggcacggcataaacatccttcttaatccgcctaaaacaataacatggccaactcagccaaatcacaaataatcccgtggaattacaagtggactttggtgagaggggggggggggggcggaagaatggtttaatgtgacagaaacgcaaaaaaagccattgggacaaaattagaaaagcaaaggggggggaggtaatgccatgccagaaagagagaagaatttttaaaaccccacgggg

SEQ ID NO: 17308 - DNA, 1910 bp, Heterodera glycines
  unsure (1)..(1910): unsure at all n locations
aaattatgagatttacatatcaaaaatagttctcgatattttcaatgaaaatcggggnaattctgtaaatttctcattagctttttggattttcccattttttgaattgtcacattggactttttttgtttttggttttctctgttggctttcggcattcgtttgttttttgtttcgttgtggtgaaattttgtaaaaaaataatcttctttacctgattaattttttttaattaaattaaaatataccaacaatcataaacacgaaaaaatatttttttaatggattttaacttttgagcttttctttatataaatctgagttgtgttgtgttgtgtttgttctttaatttaattggaaaattcttttaaagaaatttaatattcccttttttcaaatgaaaaaatgagtccattttatttttagagaaaaattatttatttatttattttcaattggcccaaaaagctttttcttaactgttttaaagccaaaagatgcaaaaaatcttttttgtttgatttgtaatttgagttgaatgagtgggcgaattttgtacaacaaaaagtcacaaaaccatcgcaattgtttcaacaatttgggcaattttcttttgccatttgtccaatttttgtcggtataaattaatttttaattctaatttaatcttcagacagtcataaaaatgcttttctacccaatttctgtttctttgattttgttcaccttttttgccggaagcgctgaagcgcaggtaaattcaacaaaatattaatgttattatttttggtatatttcctcaattatattaataaaaaatatatatgcataaaaatgaaattaatgccaaaagtaaatccaaaaatggaaaattttcggttttttcttgttttgtatttttttctgaaatggttttttcataccatatttagctatttttgagattttagcttaaattaaggaattagaagaaattttgagaaattatacccttatttggaaaattatctgcatgttttacagtttttatatgcatattttgcgatttttcgtgcttataaattaaagtcctaattattttattattttttaaaattaataacttttgtttatttctttttttagctttagaattatcccttactatatattaagcgagtaatagccccgccccttttttggctttttgaattcgcgccgaaatcgcactttttgtgaagcgcccaaatttgcacttttttttgaagggacctagcaccggagagagagaatatagattttcttctatttaaaaatcatttgagaacaaatacagagcgttttaattatcgcttttctcttcaaaaactatgatttttaattcaatttgaattggcacagaatgatgctggcgttttgggacccgtcgaggaaactgctgggcaaattggccgcaatttaagctgttccgctatacacgcggctgtccgcgccatcattacagcacatccggattggcaccagtggttctacgaggcgaggcacgaatctttttttgtgttttaatatttaaaattataaaatattatttattaaaaattatttctttttcacttttagacaaaatcaaagtgatcacattgaaacgtgcgcaaacacggaaagtggcgacgtccacgactatttgtcggaacaagtggaaatgctcagatgccccgagtcgcgcagccgtttgatggtgaattaaactgttaattagtgttaatggagggaggggggtgggaaaagtgaggcgattagagagtgtgcggcagaaaagagagcagagggtacgatagatggttggttgctggttttttaaagaaaatacagaccaaggtcgaacgggaattcagtcctgacggctcagacatgaaatcccaagacctgca

SEQ ID NO: 17309 - DNA, 1289 bp, Heterodera glycines
  unsure (1)..(1289): unsure at all n locations
agagttggtcagtaatttatatctttagccaaatttgaatccataattttttgaatttgttttcttttcagtttctctcacaaaagtgaagaagaagagtcgcgagggcaaagaaaacattttgaaagaggcggaaaaatttttttttaattttaaacaaaaaatttcaggtcagagaatgcgttggtcagtacaaacatttgtttgtcttctccacggagaatttgcgctctgcaaggctggcggaggtaaaatttaaaaaaattgcattttttttgtcataaattgttttttttgggtgggggcataagtgccacgatggggggggggcaatgggcgacagtccgatgtttttgagtattcctctttttgtagttctaatttctctaatgcctgcaaattttaaaaattacattgagtttcaaaaagttacgcccgaacattttcgggaaatcagtttttgctacctcacgaaaaacggactcggaaaaccattttaaaaattttgtaagcggatagtaaaacattaaatgataaatccccgagtttttcgtactcttccttgaattgtataatttttcattatttttggaaaactcgaatcaaaaaagaaattttttttttgtaatttttgtttttcacaaaggtccgccaacatttcaagcagaattcgcggattttcttcgccaaaaacaatttgatggccgtggcattgggcagatcggcacaggacgaacaggtggagagggaaactgaaaacattgacttttggccatggcaaaacgcccatttttagcgggacacataccagaaaaacaaatgactttaatcgctggttttccacgaccctaaaaaatgacaaaatgggagggtaaaaattaaatttggcaaaaaattccacccttttttcgccatagacctttcatataaagcgataaattggaaaatgatatcaaaaagataggtttttagaatgctaaaaaatggaaattttaatgaattactcccctccgatgttaattaaaaatttacaaaaaaaagaacccatttcgtgcccngaaactttttgcgccctttgtccanaatcggattcaaaattatggttttcaatccccgatcacctaaacagctttaataagcgattgaaagtagttgcatccgatcatttgattataaattaattgttgaaaaaacaaataaattttcaagcagcagaagtaatgctcctaacaaacgagaagacagtgttttcttaattaatgctgtttaggcgattagggattgattga

SEQ ID NO: 17310 - DNA, 1077 bp, Heterodera glycines
gatcttttaggcgaacgaattgcacaaagtgagcgcacttttgaggggccaaagcggactgatgttcaccaatgcgaaggcaaaggaagtgcaaaggtcggcggggacaattccttatttttgcaatttttgagaggggcacattttggcgaaaaatttcgaaagaaaaattccgtgaaattttttattttttaaatttttttcggggccgctgacacaataacaacacatccgatttgtagtcaatcgtattctatgattattcagcatttcccggagtttgaccctgaaaaaccgccaaaaaatttaaaaaaaaactaaattttcaaaggtttttcgacgagcacaccgaggcggagtttgcccaggcgggcgccgtcgcctcggcggacatttcgctcccggccggcccaatgccggcggaattgcacttgcacggcgccatggaaccgcagctgcgcaagttgggcatgcccacacggctggaaaatggttggcattttggttaaattgctgaatagtcgccgcaaaaaaaaaatttaattttttccttgaatttttttagtaaatttttttcaaattttttagaattttttcgaaccagactcagtagttgatcagtaattttttccagaaaatctaaaaaaatttcctgtttgaggttttataaagtattttcatattgaacccgaccgagtatttttgtgtcaaccaccgcccttggaaattcataaaattttgctgcactttcttcgatcgatatgtaataatatgccgtcccctttctcctgggcaggtgccattgagctgttagaggcgttcactttgtgcaagacgggtgaccaactgtccgcggaccaggcccgccttttgaagcagttcggccaccggttggcccaattccgcgtccgtctgctcgcccggtggagcaaaaagaagggatttgaacagattgaccgaggagcagaagaatgaatggattttgttgttatgtctatcggaggatttgattaaccatcattttacttttgtattaatttattgcgtaaattaaaaatgaatggttgatggattttt

SEQ ID NO: 17311 - DNA, 881 bp, Heterodera glycines
tctgtttggtttaagagagttccgttcctccaactgatgcaaatggctgcgctggtggcgctgcaacgcaccaatccgacgatgaaatttcaccgcccaaatgcgaaacgccacgcaaagttttatcttgttttttcaattggaaaatttgaattttgccaggtttttcgtaaggatggcgtcaaaattttcgctgcctttgtgcccgattcgcctgatcgctacgcattttctgagttttctgaactgaaaacctttttaagctcgccaattggcaaaaaaagaggtcagactcattgtacaatataatttaatgctacgtatgaaataaattgaatatttttcttttcaacttctatttttcttggctttttgttgtaatatctaaagtttcaaggcactcggttcaagcagtgtcaggacgaacaggcggtggactccttttacgatgagcagcgactgttgttgtcgaacagcatgtaagaaacgaaccggggggggggggggaatggggcaccaaaaagcggcactatttgtgcggttgattttctcagtggaaaattctctaaaaacaatttttcataaagaaatgatggactttaacgattttataaagtaaaaatattttaaaacaaatcttttgttctttctacctttgtgggaatggaagcaatgagtcaatggatgagcatttggacgactccatcaacagcagccgaagcagcacagcgagcggaagcagttcgatcagcgccgaacccgaattgccttataaggcatcacttttccattaggggaacatttgttacttttctggcttatatttaaactgttcatttttttttctgttctgaatacataattctaaaaaacagtcattt

SEQ ID NO: 17312 - DNA, 1866 bp, Heterodera glycines
  unsure (1)..(1866): unsure at all n locations
ctgctgatcgaccactccgatgaacaaccaaatttgtacacattatattttcatgctgcttatactttgattgaattttgtttcccagccaccaaatctcatctaatggtattttacttttttgagtttgtgccggaattgtcgaattttattctttctccaaacattacaaatatatgcatctttaaaaaaatcatccgccaaaaatattacacgaatttgcttatgattctgcctttattttatttcaatcacatttttcttttcttttttgtgcaaataaaattagtgtaaaatcatcttaactttaaaactgttcaaaaatgtttaaatacgttgccatttttcttttattttttatcattattcttacaattacgaaggaatgactgtcgttacgcgttcgaagcacattcatgcgcccggtgttctgagtctagcgatcgatcagagcggaagcgacgctcaaaccgtgggttctgtttcataaaaataagcaattgggatgaattctcatactcatgacataataggtgtcattaattaaagcctaacgggtcagcagtagatttttacaatgtgttagagacgtgaaaatagtaggggaatggataggaaaaaaattaaaatttttataattccatgactttctagcaacccttaatttgctcttaaaaacataaactctcggtgtgccttctatttattggtccatctcatcttttttgggacggggtggttaaataatgatgtttagtaggacaatatttatgatacgacccaataatgtcggcaattattctgtcctttgctatccctccccatttcacttaacttaagtatttgcaggtgttctgctgcagttccgatgaaacgctcggcttgtggacgtgtgccggggctggcgcgttggaagtggacattcgcaacacggccaacaattgtcgcggagtcatagcagtttttgtcagtcttcttctcctttttgctgcctaatcggtcaattttgcctaatatttgcctcttttggtcagggcgaggacatttatgttgcggagcagggccaagacgtgatcaccggcaacgaccaacacgtggtggtcaagtacgggttggccgcctttctgtcctcgtccccgttgctgatgttttctctggaactgaccgcgttggcctgtgacggcacccacctgatcgccgggtcgaggtcactcatttcaaaaatagcattgacccaatttctgaccgatctcaacgggacgggcccatggattttttgtgttatggtctccaattaatcaagaacatcccgataatatatttggtttatggctattttttatttggttgaataccacttgggtaactctttttggttttatttggatgactacgacggtcacggaatttaggatttttgagggatttggctacctgtgattagctgcttgtgttttaactttgaaacgtatacgctcttgcagcgatttcaccgtcaaatgttgctcattgggaagcggcggagagaccaactttgaccgatacgaatggcgacggtttgtttcgtatctgaataaattatccccccccccccccccccccggcatcgttttactcctgaaaaaagctccaaaaacttttaggtcaaacatgaagaaaacttaaggtccataanaatggtttttaattcagctgattgtgnnagtggntggtttacggaatgttccatggtctctttaagcaatttagaaaaggattnttttttttggtcggaacacgatcgagggggagaggggggtgaaattagtcttattattcaattctctctttagctgccattgttaacctttcaatttcgcccaatgg

SEQ ID NO: 17313 - DNA, 1205 bp, Heterodera glycines
  unsure (1)..(1205): unsure at all n locations
ttaattttttaaagtttgtgatgtatgcactggtcacagtaaggaaattagatgtttatctctgtgattaatgcttttctttagttaggcgtttttttgaaattttagtcaataaaattgttgaaattaaaatttattaaagcggcgcaagtgtcgatttggctgggcggcgcaaaaatcgcggcgcaaagtcggccaaccttaattactttccttttcccgcgtttctttctctccccgtcacttccaacaaagaatctgctgctgctggtcacatttttttgttgttattccgaatcgataaacgaaagagacggacggacagatgagaatgggaaaattggcgaatactttcggcaaatttaattttcaattttaaatcatttaaatttggcggaaattaaaaatttaagtgcctcggggcttattgaggagtgaatgttttattatattttaaaataagtgccaattaaatgtcttctccccctccgtccgtccttctcctcctctgatcatttgaataaatcttttgctttgtttttcgaactcattttccattgatttatttattccaattagtttttcattactttttactttttatactttgtgattaatgtcttttcaacaattgctaattattaattcataattaattatcgcttctgttaatcaatgggaacaactctttcttaaccaattaacgacaaatgttttactcattatcatttttaatttgtcgattgctcagcgaataatttgttcatttataaataaataaataatttaatttttttaattaaaattattcattttttcctttgcatttcgtttcgatccgctgattatttttcccttttcttttttccgaatttgtcttctccgatcgcttccgtctgatctgatctgatctgatcaactcattactcccaaatcggttttatttgttcccctcactttcttttcttttcattttcctttttcttccgcccatttttaaagtacaatttgcggagacaccgccacacattttgttgttatttattatcagtcgaaggcgaaagaatcagcgcttttcaaatattaaataattaaaaaacgcactttaatggctttatccacacaaaaataaaaaataaatattttctattctttcngcatttgtccgatcgatggttcagtcgcccaaaaaccaaacgccaaac

SEQ ID NO: 17314 - DNA, 1957 bp, Heterodera glycines
ggccaaaagtgcgcttggctccgtcgactgtcctttctgttggcagtggggaattcgcgtcactccgttgctcggcttcttctgcataatcactttgctgctttttgtcaaagaaccggtcaattaattaattaattaaatggaaaacaattcaaagaaagcaattaaaatattaattaattaaatcgcaggtgaggggacaatccgaacaaagtgtggcacaactgatgccaacaaattacgaaacgtattgaaaaaggaaaatttaaaaaagagaaaaaaaatttaaaaacagcggaacgatcagtccaagttcaaggcgaacagtggcatcagcagaagcagaagcaccgaatgagaacatttggaaggagtattaccatcggatacgcactcacactaaaagttattgcgcagacattggacatttaattgcaaagtaattgaacagccaattaatttattaacagccaattaatttattaacagccaattaattcattaacagccaattaatttattaattaggccattttatgcaaaataatgggacagtcaattattattacataaattaattggactaacatttgcttccttcgtgctttagccgtacattcgtgtggtcaactttggcctacaccgccgtggtttttgtcaccggaactttgtcatggtaataatttcctaatttcttttttatttcttcttttatttttggtggggtcccaccgccatggaacacgccaaagcgatggacgaacatttgaacgacacctcaaaattgagacctgccgaaaagaatcaaattgcgctaatttttggtgcaaattattccccttcaattttacggcgtataattaactcttaatttgtcaggagtgatcacttgcgttgccggaatttttggcgtttcgttgggcagtttaattgcgcaggtggcacggattgaaaaagcagaaaaatgccaaattaaattcagcattggaagacgggcaaattttgttttgcgcaccaccgctcggaaagggccgatccgatcgtttccgcggtcggttcgttcgtcgccgctccgttgatgttcgtcgcgttctctttgatcaccactgatcagcttctgtcatgggtgccttttatgttccattcactcatctagcaaaaaaaaagtcaaagaaaaaaatttaaaggaacagtaaataattaagagggacaattacggtatcaaagaggggcaactactgtatcttatatttcgaacgcaattaattaattattcatatcattcacctaatgtttctgttcaatttccattcagttcgtcgttttcctcaccattttgtgtctctgtttgaattgggccattaacgtggacatgctaatgtaagtaactagtcagctaattagtcaattaagactaactagttattacacccagtttaaatgcttgctttcccttttttcaggagtataatcgtccccgaaaggcgtagcattgccagcgccattcagattctcttttcccatttgttcggcgatgcctccggcccctatttggtcggtgccatctccgacttcgtccgcggctcttccgatttgccaaccgatcgtttccattcactgatcgtcgctttttatctgcccaatgctttgctttttctcagcggcgcggcatttctcggcgccgcttattcacttcccgcggatttgaaacgaatggaagcggaaaaagctgcggcagagagtgagcggcgggagaggagtaaaaattaaaggggcgggggagagaggtaatgagagaaaggatgaagaagagagaggagagataaagcgagaggggagggaaaaggaatgagggagagaagggatgagagagaatgtatagttggagagggggataattaagggaaatatttaaatcatttaattttgtcttttaggaatttattcgcttatttta

SEQ ID NO: 17315 - DNA, 2156 bp, Heterodera glycines
actttcattattttcgatgtgtcaaaattaattccacaaggggatataaaatttttcattttttctttaccaatattttactgtaattaaatttttaattaataaaaaaaatacacaaacttttatttttaaacagcctataaaatacaaagtaatcaaatatttggtcaattttttggcaaattttcaaccaaaactttgatcttttttgttacaaaaaagttttttgaaaaaacagcaccacaaaaagagcgatttaaaaacaaaaaatttaagagatttcatttattaaaacaattgaaaaacaccattaaataaaaaaatactcaatcatttacatagagaaatatgtattttgtgtttaaattatcattctaatttatgcattttgatgaaaatttttggaattttcaaaattttttctattggaaaataaattcccggttggtcacggctttttcgcggtcccggacccggacgaaaactgaggtcccggtctcgacttttctggtcccggtaagtccggtcccggtttttgtcaaaattcccggtcccgtgcaactccagaatttaacctgacaagtttgatatatttgactattaaagaatattaaaaagtagtaaaaattaaatcaatatttaaatttttataaagaatttcttgcaatcagaccaggatggtttttaacaaaacatatatatttttttgtttttctgtttaaatttcttaatttttattgttcgttagatagataaataatttggtgccaaacagtaccgaaaggcaccgccgaaaacttttttgattgtttttattaacataattttgaaaaagtgaaaaaagataacgaaaaatattaactcattaagttatcagcaactaccggcatggtcaattctataaaaattatcttaatacttactagaaatttatttataattgtttaaacgcattttttcttttatattttattatttgtttgaaaataaattctaaacaggaatattttatttgaagttcaatatagaaaaacattaattcgtaaatataggtatgcgaaatacataaaaaaattaaattcgaaatatataagaatatacaaaccctaaaatgtgtaccaaaatatctaaattaataattttttattatttgtattaatttttatcagataatttgtctcatcccgtctcgacgtcccgatgaaatcccgactcagctcaatcccgatgaatttagaaacgctcgggatgtatcccgaagtcgggatccctaatactatcttgcaggacctcgatcccgtccggtctctagcttatgtgttttttcaatgcttaattcgttgagtttagcttaaaacttaaagcagtaactaaatttgattacttatttcataataaattaattaaaatgttatcgtagaaattcatttatatttaaatatttacacatttttaacaaataaatgtttttcagcaaatcattatacattttaaaaaataattataattactcagtagtcataaaattgaaattgtcaatttaaaaattattttatttgaattattttttctataatattcatttttaaaataaattgttttttgttatcattttaaaatatctataattatttgctatcaaaaagtttatttttgggacgcgtacaatgccatggtacgcgtaaactgttgttgggacgcgttattcccagcgtataacttgcgatgatgtcatatatcctcaatttaaatttggtgaagattggtctttaattttaaaataattttaaaaacttaattatttaaaaaaatttggctttaaatttcaatcatcttttgttcctataacggtttagaaaatgttgaaataataaaaggtttaaaagattaaaactgtaattttttggatttaaaactttaatctttatggtaactttacgaaaatattgtttaatctttcgctatacactgaaataatttttaatatttagaagtaaggtgatgattgttagtggcaaaaatacccaaaattatgaattagaatgttatggtatataagtttttgcttattgatttttttatattttctaatcattaatcatttttagttaactttaaaggaacatagaaatattatattactatttgaataatat

SEQ ID NO: 17316 - DNA, 2241 bp, Heterodera glycines
tttttgaaaaatgcgacattaaaaaagtgttttgaaaagcaaaaaaggtcgatttacatagcttgatataattctaagctaaaataaaagaatataaaaaaaattttcgaattttttaatcaatattcaaaaattttgaaaaagtcccggtcccggcggggcgggccctaaattgggaccgggaccgggggtcccggaaaaacgggagtcccggtcccgggggtcccgtacgggtctattttccaagtcccgctcccgttcccggccatttcaaaattccgggctctagtaaacaatcccctctttgtttaaaattggaaatatgtgcgaaaacgtaaaataattaaggaaaaattatactaagaaatttttaatttcttctataattttattttgcgaatccccatttccgagggtctccgttttttttatccccgcttcccccgtttttcgttttggcgaggatacccctgcgccaaacctaatttagaacgtcttaaattcccccattaattattttatattaattcgagaatttcccttgtaaaaatgaaaagagccgatctcgagttaaaaacataacttcaaaaaaataaacagggattcggtagagggggtaaaaatattggcctatgcaaaatttcaagaaattttaaaagctagaaaaacttttagaaagggacgaacattttactaaattactgtccttttaaaggttaaaaatggtattggcacgtaaaaaacgaaatataaatatattcttcagaattttcccttcaaaatgagaacaaaatggctctatttggtttattaatgaccaagttataagcattagaaatttcagaaaaatcactgttttatcactttttcctcttggcgcactggtatgcatttaattttcattaactttttttagtgtagtgtctgactcattgtgtctgctgtttcttcatgttttatgttttttaattttcgcttcaacactcttttttttgataatttttgtcaaattgttgatatatgtcgagcaaaccaaaggcacattattagcatataatattcgtcaatcttatgaacaccgacaaacattttgtgtagcgggaaaaaaccccgaaaatccgcattgaatcgttctgttttaaaatcaaatgtcactttcttaaaaagagattgattttaaaatatttttgtttgaaaaaaatttatttctgttatttctttaaaaaaatcaaaagcaaaaaaggatttataaaagggcaaattttctcctttataatagaaaatctctcccttttttgatattgccttttgcattggttctttcttcttcatttgacccccacctttggcacccatttgtttaatcttttttgtttaaattactatcatttatggcattttaatttttggtcattttctcaatcgatcattagtgtaattaaggacaataatccaactatactaaaaaataattagtaacattatttgaattttcatacacaaattaataggttaattcttatttagaactcatttgtttttaattaaataataaatgaattgaagaacttctctgcattgaaaatttcttttattttttcctttttattaaaatttcatcccctctgactttcttggcatttattcggtattctttctgactataataaaacagtaattttcctgctctaatttaggatttaaaaaaactatagagttcgattaaagtttacaaaaagttacagatagataagcaagccaaattaaaaaatacttttctagaaaaaaactgggggttaaccgggcgatgtcaaatctgtgaaatggtgtcacagattatgtatggcacgcacctttctctgttaccgaaaccaatgaaaaaatatacaaaaatttattgagaacaaaaaactaagcattcatatgtcccgcgacagtaattggaaaacccggaccaggacaaggatttttgatcggactctttttactccgtacaaaaagtactgtcttaacaagactccggtcctgttgcattttcctaaaccttaaccggactacatatttggcatcctcaatcagttgtccatctccgtcagaaaaaagtaaatttaatttttaacatttgaaaaccaccctattataaaatcggtattaatcataaattgagcaatttgtttattagttgttttgttgtaatttgcgtcttttcttctttccatcaatgtcctcctccattatttt

SEQ ID NO: 17317 - DNA, 1727 bp, Heterodera glycines
  unsure (1)..(1727): unsure at all n locations
atggcagaatggtaaattctaattcttaaatcattccttttatttgcgccgtaaggcattacggcatattttggcaactaattaaatccaaataacaataagttggatcagttcaactgttggctctattgcaatttacgcgtccaatcaatgactatcttcagtttctttggtgcttgaacgcgcaaacagcagttgagcgctaccagccaaattaatgtgtcaaatgcaaattcgtgtaaaataagtttttttttttgaaatttaaggtttttaaaaaaacttaattctgaaacaattattttgccaaatttgctttattgttagaacctatgctgaccaatttgaaaagattcaaaaataataataattaggtaatacattttagaaaattttacaaaaaaatatactggcgaagttcacatttaattgtcccataatgtcttttttaaaaagatgtggatcggaactggaaatttcggaattttntccctttaagtattattttatttatttcttgaaacttcacctgcgtccattgttatgactcggacattcatgctttgaagactttttgatgacacttagaattttacacaaaatttttgaagctaaaaattgaaaatttttattttatgacgaattatgactttggaaaaggcggattgatttcacaaagcaattaacaaaatgcagcgaggggagtggagtgctaaatccataccaaaagacagtgggaaaacgaaatgaaaattttaaattccagtcatagaggttggccaatttaagtctcgcttgctatcccgcggaatgtgcgaattaatttcttttccagcaatttaaatgaaaaataaaaggaatttacataaaaagttacattatttaatcggccaaatttgggttttcaaatttttttttatttaaatgaatgatgtgttaatgagtggagggattggaaagctgaatcagccaaaattttaaaaagagagaaaactcgtcgtaaaatatggcccttcaatttgtcgttgttctcttatcttcactcttgacaaataattgtcggatactccggtcgatgtgtggtggtactaaaaacacaacaaattgattcatcgttcgtccctctccccttcttcacaaacactttttctaatgaaaatgaatggaacggaacggacgaacaacgaaagaatgaaaatgaatgaatcatcaatgctgaatgaggagagagcagcactatttatcgcataattggaatgcctatcaaattttttaaaattgtgctttttgtccgggagaaagcccctctcccgccccccttcctcaaaaaggtggtcagagaatgagtgcaaattttaagaaaaaatctctcctcgaactgtacttgcatataataaaaacatatatatttttaagagaatgccggtaaaatggtcgcaatcacatttttgtataatacgaataaaatggttttggccaattttgggaaggagaaagaagagatttgctgaaaatggttccgactgctctgctgctgttggtgatggtgggagcaatgacgacgggccggggatggaggggtgaggggtgagggggggggggggggggagcgtcggaggagtacggacaaatgcacaaatcaatactaaaataaataggcgcgatgaatgagaaaatgtacagccagcagcatcagcagaaagtcattgccctcatacataccgctc

SEQ ID NO: 17318 - DNA, 841 bp, Heterodera glycines
aatgattagggatgcctaaaatatgcacatgcatatttttttcctggactgcgggaagcctgaaacgcacgaaaaacatgtttttagcttgatttgattgaagcttctatgtaggatgactttccatgtgcatattttgcatatttgtgcatatttcgcgatttatgcatattttggcatttcgtgcatattttggcgtttttccaaaaaacctctaatagatcggcccccaacagacaaattggcctttttgacctcaaaaccaggaaaattttccaaaaaaataattttttagcaaaattttcacgaaaaatattgaataaataaattttctcaaaaaatggttaatttatgtcaaaaataagcaaaattttgcttttcaggttgatttttcgctaaaatgagtaaattttaagctgtatcgtgttttttgctcctaaaatgctttttaataccacatttagccatttttgaagattttactttatgtttaacaaatttgaagaaattttgagaaattacaccctcaattggaaaattttatgtgcatatttttcactttttatgtgcatatttcacgatttttggtgcatattttatgcgcatattttacgattttatatgcatatttttggcatccctacgaatgatataccgatcgattcgtctcaaggagctaagcatggaaaaatatgtcgcgagttgcggaaattccaaaaaaccggtttttgaaccagttcaaaactcgaaaaattgagagatttcgcactataactttttttcaaacgatcgaatcctgacaaatttgataccatttgaaagctcttgacgagcttaatct

SEQ ID NO: 17319 - DNA, 1380 bp, Heterodera glycines
cggggatgaaaatcgttgccacgttttcaatccccccccccctccccgcgtttttttgtgccctttgttcgcttcccttcccacccgaatgttcgtatttgtgccgtgccaaggagctttgcttgttgaatgatttgtcgcacagatcgcaaatgtaagttccgccgcctccgttttcgtccgtttgttgagtccgccgccgtttcgctggcgtcgcttgcgctttcctttgcctttccgccgtccctttcgccgttcgttttttttcccccgcggcgtcggcactcgtcgtttccttaagtcgaattcagaagtgaaaagagatcattcttttgatgagcacctcagtcaaatggggaagttcagctggcgagggatgggttccgagcattgagaggaaagtcggggaaaattcggcggaagagggccaaatggaggaggagggccttgggttttgggacggcgacagttggcggtggaggtgattctgatcagacaaagaagaagcagaagaggtggaggacgaggaggaggacagcggcaactccccggcacttccaagcgcaggcgaactgtgcccgctggtcggccgcagaagcatttgctgcagcgattggcaccctttgtccagaaagcctggggttgggatgggctgctattgtggccattcgaagcagcgaatcgcataccgaagaatggagagggcatcggccaaacgcggcacgcgtccgcttcagtcccccttcctgtcgttctttgctccttctcttctctttttatgtccgtcgcctccaacttttcattttcttcaattttcatccacttttcctcgtcctgttcatttcgccgaaacgacaaatccaacggatgttcctgaagaagtcacttcagtcaaaccttagcgcaattggccacatttttcaatcatggcgaattattcatcgtccgacccattcccatcccatgctttatctcttaatcccatcccatgctctttctccacattcccataatatccttccaattgttcccactttttgcgaccattggtcatcatctcctctcgggaattctttccccatttttttctctttttggcacttattcaattatgaagtgaatggaaggcgtacgcaatagtagaaaacaatatatgtgtagcagtaacactaacaatgaggacacattttcgcagctgcctgccattactctcgagaaaccccccccccccccggcgccaattcccgaaattcgaccaacccgcagaatgagtgaccattccgctcctccacttcatccctttcccattcttcatcccctcgattaccctcttcttccataacacccatccatcatcctgagcaattatctcgcggactt

SEQ ID NO: 17320 - DNA, 829 bp, Heterodera glycines
tatccctccccatgccccttcccccgttttcccctctctatccctccccctttttccctctctttattcctcccctgtcccttttcccctctctttatccctccccctgtcccttatcccctctctttatccctccccctgccccttcccccgttttcccttctctatccctcacccttttcctttctctctttctctctatccctccccttttcccttctctctccaccccctcccttctgatcacctcctcctcctcttcgcttttctgcgaagagtgctctttgttggtggcggtagcagcagcaaaagcagtttgagccaaaaaattctgtaagccaaaagttgaagcagtggacatttggtgctgaagagatgcggaagctaaaacggactgtagctgttggtaataaagtcgaagctggtcaagaaaagtcagaggcattggcaaggacgaaaaggaagaaaagctggagggaaaaagtgccgatgaggagggcgaagaggaagaaaagccggaggggaacggtgccggggaggaggaaaagccggaagggaacggtgccgaagtggacggcgaagaggaagaaaagccggatgggaacggtgccggggaagaggaaaagccggaagggaacggtgccgaaaagggcggcgtggagggcacaaacggaggatgagtaacaaacaaagctgagggcaactgaacgggcactagtgttaattatcacgagataaatgatttttggtttttaaccgaaagagagggcgtggcgggggaggggccgtacctttgctgttcaaattggcatttttgccgcgaggcgaa

SEQ ID NO: 17321 - DNA, 2313 bp, Heterodera glycines
ttgtcaaatccatgtgtgttgctttgtcggcagttgtcaattccatttgtgttgcgttttcggtagtttttggacggacacgcacacggcgcccgctcggagttgccgtcaacggcctcgggctcgaacgcgggccttaatttaattttcgcttctaaaatagtgctttttcgacatacgaaggtcaaaagttgacgttgacggcccactttcggtggcttgggttgatgtcccctctccttctgctgttggcacggcttcggtctgctttagcgctgaaaaatgcagtgttttaaaataaaattaattttggtcaattttcgtcactttttggcgtcaaaccgcctttctgagcgcgcttcctgcgccattccttccgttttcggtttgcttcggtgctagaatttctcatttccttgaatttttcagtttttttacgtgtaagtaccatttttagctctaaaatattgaaaattcgcgcagtcgtaaaaatttttccaaagttgcgattttcttgaaattttgcatatgcccatattttgacctcctctatcgattctaagtttattttgtgaaagttaagtttttaactcgagatcggctcttctatttttacaagggaaaatccccaaaaaattttaagttttgcaaagttttggcgttctgattactaaataaataataatcttatttgcactgggagcccaaaattgggccgctgtgtttacacgagtgaataaaattggacaattttgatatcattcgaaagctcttgatgagaagaagctttttctaagcaaaagctaagcaattgatcaataggaaaaaaggtttttttacggtcatcttttcaccaaaattcacgtttattgcccaaaatcacttttagggcacaccatcccagaaatgagctcctgtaccagaaaagatttgcatgtgtggctcagtggtttttgtaagatagtaaagggacaaagggtggtggttcgagtccgttgtgcaacatgaatatttttatttatttttgtccaaaatattaaaaaatgccgaattttgggaattatttttgaaggtttttcccaaccaaattggaaaaacttgatatcattcgaaagctctttatgaggagaagctttttgtaagcaaatgctaagcaattagatgagttagaaaaaagatatgatgctttgaaattttgttttttgaataaattctcgaatcgacctattttcaaattaacctgacctatcattagatgcagaatttttttctctatcgatatacaaaatttggtgtggatttaacgtgcaggaaaaaagttaaacgtcacgaaataaatgttgtttttcctaataataaaaatattagatagtacgccaaaaggagacaaaaaattagagaaaaaaagataatgtttttctctggcattctctatttattggtacacatctcgttttttgggatggtgtgtatatcagaatcacaacaaatagcagatgactccacgtcaacagactattttataccacaaataatcaaaaagcaacaattttcgtattctgtcgtgtaaaaaggaatcagaaagtaattttgtgaggatacattcccttggcgaggtgaaaacgtgaacccaggtaggcgaacagcaatttcttctcgggatgtttgcggaccacttccataacctgcaagtcaacagttttttggtcctccttgcgctggtcggtcacagcgtactgcttaaatcgggtgaatttatggaaaacattggtttcatagatttgtcatttcaatttacggcaatgaataaataaccttgttcgctccctccgcaaaaattccacccttcgatttgtccgccacttttccactttgtcgtttaaagtatttgtcgtccaaatgctccggaacattcaccgtcgaaatgtccaatttcgttttggtcgctatgacaaaagcctgtgcgatgcggcgcaacggtgtcgcattcaacttcattgggcctaaaaatttgaaatattttaacacgtttaacataaatactagaaaagagttcgtttattggtacttctaccgtttaatgatacggtactaattcggtttgtttgatcaccccatttttggtcaattttttcaaaaatttttttttgttttaaaaaggcttgaaaacgaatacccgggggttttcgaggtcgctgattacgaaatatgacaattattttggcctattccgaaccccgaacctaaattcaaacgaaagtcgaaaactcaaaattttgaaaatttgcttttatgttacaatcagaacaaaat

SEQ ID NO: 17322 - DNA, 1846 bp, Heterodera glycines
ttttcatcaaaatcttttccagtgcaatttattacctttaattttttctaagctattgcttcgctattagacaatttccaaaaaagttatacatgaaaattgcgaaaagtcgaaatttttgaagttttttcgtaataaaattttttccaggcttgaaaatcttttcgcttttggtaaggctaatagagcatgttaagagctttcgagtgataccaacaatgttgtatttggatgtcaaagaaaaaagctatcgtagaaaaagagctggcgccgaaacgcgtgggtcccgtttgtacatttattctttctaaaatattttatgaattttaaaaaaatactattttttcagaaaatttttgtgttttaaaagtatttaaaattaaaaataacagaaaattttttgtttataaacacgaaaatatgtatatttttgcttttcccaccgcttctcccaccactcactttatcgtgaacatcattcggctgtccgtgttggtgacactcggctgtgcagttgctgctgtcgttgcggcgccgtcctgcgactgttgctgcggtgccgtcgttgttgtcgtctccgttgctgttttgtcgtcattggtggcagtggtcgctttcgttaacagtcgctgcattcgtcgcacactgtgtggccattgccatttgctggcgttgagcatcagcacgggctacaaaagtggggaaaaattttaaaatttccagtggcgcctatcggcacccttccgacggtcctcaaaatttttttccaaaaaatcgcatttcacacacctgcacagcatacgtgtacaaggggtggtcacttccaagggtcatacgacgtacgatcgggccagggggggtggtcatatgcgattttccttatgacggggtccaaaatttttgacgacctttttttttttttgctttttaaaatctcttttttttgcggcgcggtcttctcaaaaaaatttcgcgaacgcgggagccggcggtgccgctaggcgccgccggggaaaattttgtatttttagtgccatttgctagcagattttgactaaaaaatgcccaaattttgagattttgggctaattttgttaagaaaaaatagggttttttttgagtccggcggtgccgataggcgccgccggaagaaaacatgcggacagcgacgaggcgccgccaaaactgtggcccatgcacacgcagcgatccaacgcgagacgattctgaaaaaggggggagggaattttccattttttacaaactttttcactttgaattgtgcccaatcgaatgtttggccgagaagaatttgctgttgtccaatttggcgttcgttgttgttgtccgtcgtcacatttttcagcaaattggcgtccatttcggctaagatccgtcgcatgtgcaccgtctcggcaacacgtcgtttcacctgagtttaggggaatttgaaaataaataaaaattccaattataaaatattaaaaaggcatgaaacacacggaaaatgcatgaaaattttttgagaaaacacgaaaaacgactgttataaagaggaaattttttgcagttttcaaccaatttttcgaccgcctcccccccccccctccgctttagcccggtctcccaccgcattaagtgcacgtccatagacttcatttgtttccaccaaatcgcccattgcgatcatttccatcggctttctttcatggactggagtcttttttttgggtttggagctccttcggtggctggcggtgctggcatcttttcaagcgtatacgtccaacagcaggagccgtccctggaaagcgagagggggaggagggatagtttgaattttcaa

SEQ ID NO: 17323 - DNA, 3683 bp, Heterodera glycines
atatatatatatatatatatatatatatatatatatatataaattttgcctgaatttggtgtgcattttgctgttgcggttcgaacacttcttcaatcagatgctgattttctctcatttcttccattaattggtcaaattcgtcctctttgatcttctccattctgatcagttctgccaatgttccttttttctctgttcgatctcccattttcccgcttctctcttctttgatcagatcagataatgtcactctcagcggatccaatgcgaacagatcagctaatttgacagatgaagatttcgcttttgaagtgttgctaataccttgacttttattgctgctgcccgctccattgaccaaaatgaatgaacaattggctaagaaaaaccgcagaagagatagtgcgaaaaataattccataaatcagacagaatttctaagagaaaattaaaaggctaaataaaattttagctcttaagaaaagcgaaaaattactttattaacttggataattatatgtaaaacaattttttaaagaaaaatcatgcaataaatctatatccattcaatttataatgagaaatgtagcgttgtcctatgggcattttgcaacgtacgcttggatgctatattggattctaaaaatataatttatattaaatatttaaatttaattattagtattcaatcatatttgtagaataaataaatccataacctttgctcgaagtttatcaatttaaacaatcttaatatcgaaagataccgtatatgctctaattatagcccagtctctattaatcccgcagtctccaattatcccccaccccagtctacgaggtgttttgaaaaataatccctctatcataatccacccgtctctaattatccccccttttctgaggaggttgaaaaataatcccccatgggctataattagagcatatacggtagctctagttcctcattaccatgtaaagttataaaaaaaaaatgtattaaaaatttaacaaataactaaaaagattcttaaaacttaaatccccattttgccttttggcattttgtgccggaatggtttttggatttcttagcggaatacaataaaatgtaaaattggcacctcaaaagaatgactttaaccactaaaaatggttgtcggataactttcttaaaatcaccaaacctaattttcttatgaaattttggtttttgaggttttttctaattaaaaaaattgaattgggcctaggaaaaggcttcatatatgatttaaagagaatttgtgatgaataacaaaattaccatttcatttttcaatttctctgccgatttgctgttgggaaatttattaaaaaaagatttcaaaactcccgaattttttgctctttgattttgaaaaaactatcgaattttttgctctttgattttaatttttgcctgttcataagcatatttcataaaatggaaagtgaattaattattatggcgtcggcggcgaattaattctctcctaatttttgtcgcgggttgcggtggtgaggtggtggtcatcttagagcaggaacaaccaatttgtcgatcggattggcggacgaacgacggacggacggtcggacaacaaccttagttttaaaacaaaatttgacctactctgatcaataatgacaaatcgttagactattcctaatcattttaattacttcaaaaaatcgaagagtttttagtttttagggaagtcttttgccaatattgtgatgatttttaaataactaagttttatgcctagtttagagtataattattttccgatttttagggcatatttttgggtagtgaatcaaattaactcgtaagagatcgaaatttgaaatttgcagatgggtagcacttattttatttttttcaaactcccaatcattgaattttttatgaaatcaactttctcaaactccatcaattataaatacatacagacaatacacaaacatagcctctcattatcaaattaaatcaacattgaaatccagttttttaaatttttaattaaaaaaacttaattcgacggttgatgaataaaatgagttgtattagcataattaaatattattctattagattcttagtaatttatgaattactagaaatttttaaaaaaaagattcgatcgcttactaacctgtttgaattaaagatgaataaaaatatatcgtcaataattattattttatcacattttaccactttattcacaatgccatggccaaataacagaacatcattgtccaaaaacatacattttaatgaaaacggtacgcacaacaagcgaactggatctcgctccggatttgctaggtcataatctcaattccgcgcctttttcagcttttccttctgctgattttcggcatcgcctaagggattttgttggcggcaacggcaacagacggggcaaagggtcgatttcacgcttgtcattcgatggcgtggatccgcttcagttgccggacccggatttaagcacattgacacaagttgcggaagctggaacaaaagtgaagctggacaccccaaacttccaaccggtatttttggagaattaattacatttatttgcacataaaataaatacatcattaaataaatgattttagtatatttgataaataaaaataaaatttaagtaaattaatgatttttcttttaatttaaacaaggaaacattgaattaattaattttttggcattattttattgattatttatgtgataattaaataaataatttaacagtttaaaattgttatgccaccaaaccttggaaaaacaaaaaatgacaaccgtgctccaaaagcgaataattcttttacttcttcaaatgagaaaacgccaaaaaaattgccggaagattttgaaaaattgtcacaatttttgcaggtgaaagtcagaaaaataataaataaataatttatatattttttaggaatttatcaatcaccaagacaaaaaatcattgaagaaaactgtgcaaaaacctctcaatatttcaaaattaactgccgaagaagccaggaaagatgatgaacatcgagagcaaagaccaaagatggaaatgccaaaagagagtagcaataacaggcaaaatttcaataactatgtaattacaaagcgggcccggattaaaaaaaattcccagatcctaaccaaggaccggcatttggaaaattcaatgacagtaaaaaggacaaaagccgaaagatgctataggcaccgcgacttcccaattttcaagacttacgataataataataataaattccgttgaatatcaattgaatatgattagatttaagactagaccagacatttatgaaattaatttttaaaataatatttttttgccgtttttaagagcaatttctttgtttgcaaattcaacacggggaacaataattggcactgtgccattgtctgttgaaattggcaatgatagagatgaaatggaagagcagcgaaagttgacagatgaaatgtcccaggtggaagtgatcaaaaaagtgaaggaagaaggaattgacaaagtggacgaagcagaacatggaaaggtggacttttctatttttaattatttaaaaagaaatttttaaagacgcaacaaaggtttttaagaattccttaa

SEQ ID NO: 17324 - DNA, 1531 bp, Heterodera glycines
atttattgaaaatgttaaataaaaaggcattgatgaatatgcgaaatgcttttatttttgaatgaaaaagggaattggtgaaaaggaaagatgcaaaaaaaggaaaagaagaaagagcacaaaaatgggggaaaggcgcctaaaaataacggatgagctaattaataatcattaattaattggttgggtaattaaatgaagggactaattgaatttgctaaaagcagacacattaccacaaaaaagttgagtgaaaatggaaaaagaaggcaacaaagagggggaaaaaatcaaataaaaaaaatgcttagtataaggctggcacttttaggtgaaaaaactctaaaaaaaataaaatttcaaaaaattatttgattttttttattaatggaatagttttttaattcaaaaaaaaatgaaaattttatttaaaatgtacaaattttagtagaattaaaagcgccaacccaaaaaattatgagcaaataaatgagtgataattaaatgaaggcactaataagcaatgcctaaatcaaaaaacaggcacaataattatgagtttcccgccaatgtatttaagttacgttgaggcaccaaaacattaattaagcaattagtgacactaatgaatgctattaaaggccacaacaatatgtgaaatgtcagagaatgataaaactctatggttttattggccccattattaatttgggtaaataattatcatcagagcaataaataaaaatgctaatgagtgcactaattgcataatatgagtgcatacaattagcgctattacagtaagcactattacgtaactgaaatgtaattgtatggatactgtatgggtgagtcatcactgttacagaaatccgtctatgggcgagataaataatacacagacacacagactataatattgtctatacagatattgtacatgaattggtgctatgaatggttaaagcatatactgtattggtatacggtaatggtttctctaacactgtactataaataaatccccaaatgactgccacgttttctgttgagtgtccattttgattatgtgtacacactttgctgaaacggatcgaatgtacgagtccatccaataatcatcctcaacatgagcagatgatggcatcatctgtgtggcaaaaagatctatatttatgatttttcggtcatcattttaaaaaattagcggaattttagggttcgactgtgttgaaaataatgtgcctcctgggaaacattttgtaatttttagcaagattagcacgtaccccgttcacggtagacgccctcccataatttctgtttaacatctatcatgtgccgacttagcttggtgcaaagcatgattgtctgcccgaatgcccgatccgaaaagttttatcatccccgacccgaacccatgcatttttcttatgacttataactagagatcgacctggacctggatgcaggcctggatttatcctggatccaggacatgtccaggacatttttcagcaacctggatttt

SEQ ID NO: 17325 - DNA, 1400 bp, Heterodera glycines
aggtccaggttgaatgtgcaaaagaattcaggtacagatccagacaagacaggaaaaagcctggattttcctggcacaaactattagacatttattttttcaagtgaccgatcctttttcaacttttcaaaaacagaatcaataaatttaaatccacattattattattaattagatattattagatgattctaagcaaataactaaattattcaaacattattaagatgtttaaaatagatataaaaaaatccagtatcaggcctggatccaggtctcgaggagcctggatttttcctgggactggattttcctggattttcgtccaggaaatcaaggtccaggtccaacatggaatccaggtccaggtccaggcttttttcaaaatgtcgatctatacttaaaaccaaacccgaaaattttgctcatccagaccgaatgccgacttttttcccacctcgtcccctgctgttgttgtgccaaatgctgcaaattgcgtagtcgtggtgttggcaacaaatccctgttggttgttgttgttgccaaaatccaccgtcaccgtctcattgctgtgatgccgtggcacaccaaatcccagcggcgcaaccggcggtgatgccattggatttgttgtgccatcgctgccgctgttgtggccatttcttcccatcgctgccaactggcgatgatccgccgccgatggcatgaatccgtcgttgttgccgttgttgtgccgatgcaattccacctcgttggccaacagcgaggcaaggtgttccgtgttgtaattgctttgcgcgtcggcgacggaggcggcggcggcactgtcaaaaggccgcccttcaaccattaatgagcccagctgatgatgattatgatgaaagttctcttaatggataggtaattaggaaataattagtttcattaacatttgagatcgtgaatctcgagacctattctcgatctcaggcctccctcggtatcgagtttccgttctcgacttgcgtcagcccctcccccgctattttcatggcttcaagcgcctcgcccccatttttagtctgagagcatcgctaattacattaattaattaattaccctgctggtcgtcccgcaacacttccatcaggtcgtccatctcctgactgtggcacatggacattgtagcctcgggcgctggtgacctatttgcagtgcaagtgccattgctgctgcatgccgtagtggtggtggcactgtgaggagattgttggtggctaaacattgccggaagcggttgctgatggtgccattgcgcgaaaaaattattgttgttacaagtgccatcatcaacgtattggccgcacatggaatgttgtgcaccaacacagaaaggaggaatggtcaacaggtcgataaat

SEQ ID NO: 17326 - DNA, 2274 bp, Heterodera glycines
tgcgaaccttaaatagcaaaagccatcggtttctttcttttttcagaaatggagaggcgaaattaaacttttgccgtttttaccttcggtcggatgggcggacgcattgagtggttgcgaaaggaggcgaaatcgaagtttttgaacctaaaaaaggaaagaatcagtgcgttcccttggcgaaatgtgccggattaaaaaggcatttctttctgccaattggcgccattcctcaccaaatgtcctgcctgacatcctctatccgagcatagcccaatcgttgcgtgggatcgcgtcggcagaacttgcagatcaaattgcgcgcgttgtcccccatgtaccggggccaagccaacaattggacaccccttagaatggaattgtaccttaaggggggagagggttggttggcaattagttgactaattggtcgggagtcttccccggctgacaatccctgcctacgtgtgcattgggtcggtggacgcaaagggcggactgccggagagaagttcgaacataaaaatgccgagggaccaaaggtccaccgcactgtcctgccccttgttgagaatcacttcgggtgccacatattcctaaacaatttgcgtttggcattcgcttcattggccaaatgtagcaccgctgtgccacagaatgtccatgcccgtgagccctccgtcggcaatttcttggcaaatccgaagtcgaccaatttggggttcccgtcgatgtccagcagcatgttctccggcttcaggtctctgtagatgatcatccgccggtgcaggtaatcaaacgcttccaatgctgcggcacagtaaaagcgcgcggttgcctcgtcgaatcggccccaattccttagcattgtccaaacttcgccgccgggacaatattccatgagcatgtaaagtctctcggagtcgcggaaggttttgtgaagacggacaatgaaatcgcaatgacagctcagcaaaatgctgcgttcgttgagcacatgttcgacctgagggaaaagcgacggaaagtgaaaaaatggacgaaagagaaagtccaaaaggacggaatttgatggaccaatttcggagcatctccccacctggttcatctccttgacatgccgtttgttcaatactttcagcgcgtacacccgttcagtgtcgatgtgtttgaccaaattgacccgtccaaaccccccaactcccaacgtggagacggtcttcaattctgccaactccaaattacccaacatggcggtgtcacgttcatttgcttcagcactaaaatttaatgagtcagtaatcaatcagttgtctctctctctcccctctctctctcggcccctctaaattcgcttctccaatttaggcactttaatcgaccgggtctttaatgcccttggcttagttaattgatcagtccgtgcccaatcgtttgccccccgcaaatccccaaaaagtccgtccgcagttgaacacctccttttccgcatcattccgccgatgaatttgcttagtgtgcgctctttttcccttcttcggtcattcttccggttcttttccttctctaatattttcagcaaccgaaggatgaaaatttgcaagaaatttgggctcgtgggagggcattcccgcgcaacacttacggcaccatcggtgccatttcgttgtgggaaaaggggcggggagaggggacgacccccgccaaagcaaccgaacatttgggcgaaataaaagcacaaagaattattggcacagcaaatggaagcgatttgaaatgctaaacggacaatgacaagaaaagaaaaagggaccgattggaaaatggaaaagttacagaatttgcccattcgtttaatccccccccccccccgcctactctttccaaattcgtttttcctattttcatcctccgattggcctatcgcgcgactgtcttctgctgcagcagcagcagttcaagtatttgctgtgctcatttggcgggaattggtggtcaggacaaaggtaatttgtggggatgggtgggaggggattaagcaattgggacgaacgaacgaataaatgggagtgaaagaagggaaaaggaaagatgaagcggactcgaaaagggggtcaagtcgaggggaacacacaaaggcgcgcggttggcaaacattagcccttttttgtcacaatttttttctctttttttgagtcaaatgcccgacggtccatccatctcaaaatcggttgggggacgaaaaaaatttccttcctatgaattccttttttt

SEQ ID NO: 17327 - DNA, 422 bp, Heterodera glycines
ttagcatatttaactggcttcatccccccccccccctccaatttgctcaccattcgttttccgtcatttgtccgtcttttccttggccttccgccgccccctcatagtttggcctcgtccccatcgcgtcgttcgcattttcgtccgtcaacgaagaactgctgctggactgctgcaggtgcgggtccggatgttcgccctgaaagtggcaccaatttgcgtcatttggcctttgttttgccattccatcggcttctcttctccttcgctttccctccccttcttgcctggtgatgttccagcttcaacgagtggaggaagtgagaatggcacagcgactgggggagtttggccgcgacttgctcagcaagcattgccagcaaaaagcagccctccaccgaatcgacaaaataaggcaatcg

SEQ ID NO: 17328 - DNA, 1061 bp, Heterodera glycines
tttgcatttgcatgtcaaattgtgcaatcaatttgtcgattggtgttcgaaaaagctccgaaaaaatcttctgtgtcatttgggcgaccgttgggttacaacgttcagaagttgcaaaagcagcggaattcatttgatgctgctcattgtccgtcaccatgaagaattggtactttttgacgacacaacgctctttcgaattatcagtccaatggatttccaatgaggcaaaacatttttttttgtccaatgtctgattcgtcgttgcgacgactttggtcctgaaacgtttagtttaattagaaactggaacaattggccactgaattacctgctgctgaacattccgcacgccaaaattgtctccagtttgttttgcagaaacaattggacacaaatcaattccaagttcagtgacgggggcgcaacgggttgcaaagaatgcactaaaactaattattgtcagcataaaccaaatggggtaatttcgactttttgttcgagtttgggttcaggatccgaaagaatcgttttcccgaccctaaaaaccccaaaccagtttacccgtataaatttttttgaagtctggtgacagataaataccccattttttcttaccattgtccgacagagtgccgtcgtcatgcgttgagtcctcccgctgattctgctgtccctcccattccatcattggttcgtcactgtttcctccgtcagccaattcgaatcgcacggcttcggcataactttttgtcttcttcgccgatggattgtcaaattgtgccgaattctgttgacccttttgagagaacaaaccaatatttatttgtctctcagcaatggatggatggttaaacatacaaattgcatatggtccactggtgagagaacatcggccactccaatggcttctaaaattgtagcaatgtttttggttcggtaaatcaaaattcggaatatgtgccaaccgaattcgtccggttcatcgctttcgaaactgccgttgacactttgcattcgtgacaaagtcaattgctgattctccgcctcggcattttcaa

SEQ ID NO: 17329 - DNA, 786 bp, Heterodera glycines
tgagtaccctatttctttggtcatacctaaagcctatagaattttttgtagccctaagttttctcgttttttcattataatcggtagttactcttttcttgtatttatgaattccagggacttgaagctgttatttgatactcagaatgtaaacataaagcattaagaaaaaaagaaactaaatattctacactacaaatccattgggcgccaaaagtgcattagaatgggtttcttattgtttaatattttttaaaaaaaacgaactatttatttgttttccactttccgttccataaattatttttcaatcttaataattacataccttaaacattagcaattcggggatgaatccattggcgtcaaaatgcctctttggaaggccgaaaaaaggatcgccgacggggctctcatcacaattgtttggtacacaaaaacatcctgacaattaattaaggttaattattgtgttataaattaatgataattaatgtaaaccttataaaccaatgctcagcaaatccggcgccccccgcgccaaaaaacattggcaaagttgcgctttttatgcgcttaaattttttccaaaaattatggttaataccttgaaaatataaataaaataaacaatttataattgatataatggacttgaaaaataaaataataaatttacaaaatttattaatcataggattgatattttttagctgggcaaaacaaacacatttatttttaatggctaccgatttttctctatttctctaacgcaattcctttcat

SEQ ID NO: 17330 - DNA, 1227 bp, Heterodera glycines
  unsure (1)..(1227): unsure at all n locations
gatttgtttttnttgtctttcggctgattcactcatcaaaaacattttctgtggagagtttgtgcaacaattctttgactacaattgaaccaccgccgattatatcattctgaatttaaacaataaacataattttaagaggtaaattgatggggagggtaaaatttaacaaaatatttttcaatcggaccccaagaaagtgtaaaaactaaagacaacaaatgttttgacatccccaatatccgtaattttcgccgctgacctctcatcaaaatttttcaaatttttttaaagatagaaagtggagtcaataacctaacaaatgtttcaacttaaaactagccttttcttacctttccgtacggcggatagattttgatgccgctgctctgcagagaaattaccgtcgatggcatttgtccctcagtctgtccattgtcaatattttgtactaaaacatgtggcttttcgctgaatttgatgccatatttgtttagtgcatcaatcagacaaaggcgcctcgaaagtgcgaattcgtcaaagattctcacagtttcggacagggttctgtaatgaaaccaagaccatgaattctgttcgtcttattcgctcgcctttttccatggctttcgattgtcgcttcgtcccccgactcaattccgtccgccttctcgcgcagttcggcattactcttcgtcccttcctccaattgtccatccttttttaccgtcccaattgtcccttcattaattgtaaccaatttggcagagtgaacagaactgccgggaatcagaatgaatcgttggctgcatttcccctgatccgatgttttattttgctgacgcttctcaaccaaaactattgagccgctctccgggtctgtcgttagtaaattgccggaaataattgtttttctgctccctgtcccaagttcaactctgattggctttccaatgcttgacgaagcaaccccaaaaacgtcggtttgatcggccatatctgattgtgaacgaaataaatgtttatgcataatgaccaaaatataaagaaataaaaatttcctacgcatgttggggatttaataaaagtgcaaaatctgtatttaaatatttacaaaatattaaaatcaaacaatatgtaaattaatgaaaaaacatttttatttacaaccagggttcgcagatgaaattttcaaaagcctcattttgggtcaaaaagcctcatttt

SEQ ID NO: 17331 - DNA, 1982 bp, Heterodera glycines
ctaattctcactacaacaatttgcaaaattttgctggtaagtttcaacaaaatacgcgttttccttttcatgaaataatttataaggctaatacatgtgaatcataggtaaaaaaagtctgatatataaattttttatttagatatcataaacatttattttttatgtcttttcagtatattttttagaataaataaatcttaattaaatctcaattattttttattgaaattagtatatacagaaagagaaaagcttgctttatctaaaattatcattttggttattttaaaattattggattaatttttataagcggctaaagatggtggttacttctgcaaccatgccctctcgcgcggtagctttttcaaccatggtcatagggttaaataaccatggtcgtctcttattctacgggttaaagttggtggctaaataaccacaaagttcatggttaaataaccatgaggtcatggttgcaaaccacgagctcttattctaccattttttactacaaggtcatggtcatttaaccactaccactctcttattctacgggccccggagaccaaaaatccctgtcccgtccatgcaaaattcccgtcgtatataattcatcgcttttggttcctctccaattttcgctttccaatttctctgcgcgaacgttcattttcctcctgcaattgtttaataagctgcaaatcctcttcagaaggattgtaaatccgatcgattatgatgcgatctttgaacatttttgcgagcagcaaataattggcaaacataagaaggaccaaagtgacaatttgttgccaatcgtttgtcaacaaaagaagccaaaattcgaaggcaattaaagcacattggaagacacaagtgtaagaagctaatgccacagggttcttcgcaattttcttaaattgagaatatttttatgggagggagtttttgaaattgaatgaaattattaaaaaatggccaaaatttatgatcagaatgccgaagaatttctagcaatataaaaaataaaaaactaaattttttacgtattaaaataaacatgatgtgcgagtattctttaaagtgattccaaacattgtagaccatttcttacaattagtctgttttgtgttggaaaatttaaacatttttgtgagtcaacggttggccctatcgtatttttacggtttcccattcctttacttacaaaaagtcgaaaatgcaatttgttgtccggttcagcagaaacagtgtgataatgggcatgacttctcgcgatatacaaattgcccttgaaaagcagtcgcgtcccgtcttgataaggcacagacgcactgacaataaaccgcacgatttttaacaaataaaaaatcatttggcaaaacacttacgactcactgaaagactcgtaagtttcattttgctgttgttgttcgttttgttgccgaatgccaaatcgctgctgttgggacggaatggcattgttttgttgtgagatcggctcaattaattcccaatggccaagatgaacagcacaacgatagagcaagtcgaagtagttgatggggaacaaataagtggaatacagcgaaaaggaagtcagggcgacgatgctgaacagttggaccacccaaacattgtcaatcagcatgaattgaggcacaccaatcaccgttctatgctaaatttaaaaaaaaatcagaaataagcaaaatttacggatttaccggcaaaaaaattcgcggcattaaaacggcaaagtaagctgttctaaaccaaatattaaatattgaatcaaaaggaacacttacaataagccagtgtatgcacaatatgcgcagcgaagttcgaagtcacgcaataacacaaccgcttcttctcgaatttgcacttacaattaacgaaaaataaaaacaggaaaaaagcggtcacccccagcgaaccgggggttgtttttacacaatggacaaggaatc

SEQ ID NO: 17332 - DNA, 2269 bp, Heterodera glycines
aaaaagtcactaaaaaatgaaaaaaagtcctgaaaaaatagccaaaaaagtcacaaaaattccaaaaaaaaaaacacgtaaaaatgtaaaagtcctgaaaaattaggcgaaagttaaaaaaagcccattttaattatagaataacatttttatcgtatttttaggcacttaattttataaataggtcctaaaataggcataaaaaagagattcttccaacaattaagaaaaaattctccaggtttcattgcctttttatcgatcgaaattttatttttctaaattttctttgtatttttcggcattttcttcgctaaaattcaaattttgcctcaaaaagtcaaaaaaatcacgaaaaaagtcgcaaaaaagtgcatgttagacgcttcaaacaaagtttagaacactttttaagtcattttaaggccatttagagtcagcaaaaaaagtcatttgacttaaattcccagccctattgatgaccagtctctaattttggaacagattcaattatggtacggttttaagatgagcaatttgggatttgaaaaaatgaaacaaagcaaaagaattgaataagtgtcgtcagcagagggaataatcactgatccgtagtgagctgatcagcagctgccaatggttgggcctcagttgggtcgccctctgtcggagggtcggcgatcaaattcagtgagtcattgggacagctccgatttgtcattttgttggcaatgaaaacgccgacgaacgtgaccagaaagacgaccccggcacagacaaaaacaatgccaacgacgaatgtgccccaaagtgccgtgacaggtctcgagatttgggcacgagtggccgagtcgatcagggcactttcgttgagccaaaccatggggacgaccaaattgctcatatttttggtcatccttgaagtaaatgaattggcaatttatccaaataataaacttatacctttttaatcattcattattaattattaaatttcaaatattcaatgcttttttgcccctcaaattgcctgaaattccctcgttgcattcccaaattgagctgatagcgctgctgcactccgaccactgccccaacaatcggttcaatgtcaaaaaagctgagatcatccgaatctgttggggacgagaaatttcccgcgagggaatggcgaagggccgcgtgggcatttcgaaaatgggaggccgaaaagaaaatggggggagagccggggaaacaggaggacatgtcgagaagaccggacggagcacagccaactgaaagggaaatggaaaatgcaccatggaagagcccatctcagaacgcatttacccggttggacgctctcgttgaagaaaagcggggaattcgggttgcaaaagccttgcgaccgctgcacagcgatgtccaacgccgagtcgggttgggcgtatcggaagacggggagaccggcggtgagagcgggctgacgaacttccaaatcgaaggaactataaaaaggcattaatatgtgtgaatttgaatgagttaaactgtgcgactcaccggcaaagttggccaatgaatctgaaatgcgaaagccagtctcaaattaccgccaaatcggcctttttacatttgcaatttcggcgcatccatcaaattcggtccaaacagttccgcgtccgtcccgttgatcatccgcgccctttcgccgtaccaatggtcgtcgctcagttttccctctatccctttgaaggagtacacgcggtccaaaaaatcggggtcgttcagtccagtgtccaccgcatattggccatcgtccgtgttattttgctgaacgaaagtaaatctaatgagtagaaataccatccaaaaacacgcacttacttagtggatttatggtccagaaaatcgccaaatttagttttaaacaaaagtttttacactaaaataagtacttttcaagaaaagaaaggtttttttcagtgccagaaaagcctggccaattcatactgatagtaaaaaaaataccccgtaaaagaggccaattctgtccggaatattcgccaatttgcacatcattttgaataaaacattgctgcaaatttcactgatcagcgggtcctggtaaccgttgaagaggagctcatcaaccgaaacggagatgaacacctaaacatgggatgcaaaatgcaaatcaaaagttttcccaaaatgctgacaagcatttctgttttttgatttgactgtggtgtatgttaaaaaattaataagtttactatttcca

SEQ ID NO: 17333 - DNA, 3461 bp, Heterodera glycines
cagcattcatctcttctccattggctgtttattgcatgatgagcactactcatcccttgcccgccttatgatcagaaagataaaatgaggaggaaaaagtggcggtccaaactgaacatccccgaggcgatgttgttgatcagtggtcaacatttgcaggtcgtcggcgcggcggtggaaagcggcggtggtggtagtacgtcttcagcggtcggggtgaaacggcgtcaaacttcgacgacaaagcatcgattgagggaaggcgacgctttcccaaaagcggaggattcggcggacacaccgccgtcgttgtcgcaggtcgccagcagttcgggtgacagttcgtccggcgtttcgtccagcgcgtccatccaatatttgggcactcgccgtccgacggccattaaagtgcgtttttgtgtcgaaaaagcgatggaaaatgagaaatgccaaatttgcttcacagattgaagaagaagactcgctgaccagcgcgccctcctcctcttcgtccacgtcagcgcgagcactcgctgcgcatattggcaatccgtcaaacggccgggcacagcgaacggtagcagcaccatcccatccaaagaagcagcagcaccaaacggaggacaaagggcacggcgagacgcacaaaccgcagcaaacgcatcagcggaaggacaaccaacgagacaagggacagggcattggtggaaaattggtcagtcatcagcggcgagtgggacaattttaagggcaaaaaagtaaaagacgaaggggaaaatggaaaggaaggcatagacattttagttaaattttcaaccattttaattgaaagagtggggcaaagggaagattggaagggatttgtttacaaaaccaccaccaaaacgaaaagctgggaactttttttcacaatttaccagtgataaaaccccagtcgaacttgatgaattggctaattttgacgacaatttcgggccgcaaatgtcaaaacaacattcgagaagttgtttgaataaaaatataatttaaactatttttttcacacgacgcattgtcacgtggcatttatcaaaaatttgttaatcacacttttacccactaataaatcacacaaacgtgtgatgtgtgcctctctacaaagtgcaaatgttgtacatctctgctcgtccctctctccacccccctccccctctctctctttctctctctccccctccccccccccctctctctctctctcctatcccctctctctctctctgtctctctctctcccccctctctgtctctgtttccatttttcgaattgaactttaatggggacggatgggaaatcttgtgcgttaacgatgcgtgatgacatacatatatattgacagggttgaaaattcattttcttttctttggtttacccggtctctccggcagaacgacggattccttccccactccctccccccgtcggtttactgctcgaacaaaaataaataagccatcatgggacggtcccacggggagggtgaggatggggaagtatattttacgcttggtagccccctcccccccccccccccccaagggggcattacaataaaccccaaagtcgaccctaaatgttttcccattttggtccttccatgtctccccgtccctaccgccgtcgtttcctgtttgatatccttattagcatttccaattgcagttgttcgtggacccgtccacctcgcatcacccgtccaaggcatccgtcgtccagcagccgttgcgcgacatcgaaatcgcggcagccgcggggaacggaatgttcggtggcgcaattttggggtttgtactttttgctattcaagcgaaatgttttttggcacgatattgcggcgcgtatacaacgccattttgaattttatattggcattctgttcctttcgaaattgtactccttgaccaatttacacattttaaatccaccaaattttagcggtggtttttctgtcgctggcaattcgtcgtcgtccgccgccgccgctctgtatcaacaacagcagcagcaacatttgtcgggccatggcttgggtgccgtcgcatcaaacggcggcggtgcttttctaatgaaaaatggcaccggttgcggtggtaatcttcgtgccgcggcacaccaccaccacaacaacacgaacagccatcacaatttcgtgcaaccgacgacgacggcactgctcaaaccgatgggcgggggaactcaaattggacaaacgcagcagccggggcagtcgaagcagcaccagtcgggccatcacaagtcacgacagagcacggagggcgagtatcaggtgggcagggattggggacgaattggatttcccggggacaatgggacagagcgggagacaaatccgagtgggacggaaattcccccaaatttagactaattagtgccaaaatggaccaattcatggctaattattgtgatcggattaattttgctgtttttagctgatcaaaaacgaagtgctctcctcttcgtacggcaatcagtacgaagtgttggaattcctcggcaaaggcacttttggccaagtggtcaaagcatggaaaaagggcaccaacgaaatcgtggccatcaaaattctgaagaagcacccgagctatgcacgccaaggccaaatcgaagtgagttctgttgcactttgtttctggcattttttgcatttatttattttttctttcggtgtccattttgtcccgtctgagcaacgaaaatgcggaggagttcaactttgtgcgtgcctacgagtgcttccagcataagtcgcacacttgtcttgtgttcgaaatgctcgagcagaatttggttggttttttgctttgccaatgggcagccggacgaatttcattaaaaaggcaccaataccttcaaaaatgacaaatttacttaaatattttggttggtacctggtgattaatttcgattttcgctatattttaaattctaaatttgccatatttttgaaacaatttgtcggcatggcaaccacaaactgaataattgaaacattttttgatagcgctttatcgggacccaattcccgacgcttttcacctgctgatgatcttttgcttgattaatgcctcctttcccaaaattcagtacgacttcctcaagcagaacaagttcacgccgctccctttgtcgtccattcgtccgattgttcagcaagtgctcaccgctctgcttaaactgaaacagttggagctgatccatgccgacctcaagccgggtgactaatgtcaaaaaagcagcaacaaaatgttgtttttattcattgactttgttttcaacagaaaacattatgctggtggaccccgtcagtcagcccttccgtgtcaaagtcatcgacttcggctcggcttcgcatcgcagcaaagcggtcaccaacacgtatttgcagtcgcgctactaccgg

SEQ ID NO: 17334 - DNA, 4089 bp, Heterodera glycines
cttagttgtgtttgtaccaaagaatggagcccaatagtcagtgaggaacaagttaaaattagtcaactcatccacgacaattccaaatggctttgtgcgctggccagaacgaggtccgcgaaaaagtgttgcaagctgatacggaaagcgaacgctgatcaactgctagcgctggtggaaatttgtttgaacattgtcgcatctcgatttcgcttgaacaaacgtcagaagaacaggctgatgccctacgcagattttgttcgctgcctgagcagagtgagaagtgaacgaggcgcgagacgtatgattgttcagaagggagcaggggttggcggactgttcgctgcactcctaacacccgtgttaattgaagttgcaaaatcatttgtgagcaaaaatgtataaataccgtaaaaaaattgttgttatttcacactcgttgtttcataaaatggcaaataaatttgtgcttgtaccacaagaaatttaccggggtctcacctctgcgacggacacgggtgacatcaatttggatgctgtacgacacgatttgacgcgtgccagggctgaacgaacaaacccttcagctaaaaatgtcagctacaatcaacagcttaggcgatacttgcaaatgagacgggaggtcgcggacaaaccagcacgggttgagctagtcaagggattgagtgttctgatgaggcgaggcggtgcggatgatgaagcagaagttgtagatacaccaccccgccctcctcgtcctcctcctccaccaccgcttcctggtcagcatcctcctcgtcgtccaccaagccctccaggcccaggtccgtccccgccggggagtcctccgccgcgtccacagcgtcctccgagaccacctagagctgctgcgccgccctcttggagagatgggcgtgtggaggaatggcgaaaaaagagaaacgacatacaacaacggcagccggttgtgcgggaccttcttgctgaagcagctgctgctccgctacccgaaagtgacgaagaggatgactacatgttggagagcgattcactctgccagcaccatcacaatattatggcgacttgcccgttctgcctgacaacgcggacgcaattgaggagatggacactgcacagcacaggattgcaaccagaagaaagttacataatggcgatgacgatttgcatcgcaaaaaataccgggtctattatcctcctcccccttctcgcccacccccgtctcgtccacagtcaaaaattgaaacacctcgacctccaccgcgtcctagcctcaagaaacaaccacaaccactgctcgatcctcggccatccacatcacaacaagttgatcgcaaacctaaaagggagccaaagttcgatctggatccgcgaccatccacatcacggcaagccgggtacaacccccctgcggaaccaaaacatgagcagaaaccgtcaaaaaagccacctcctcgcgccacaccctatcatattccgaaaagagagccaaaaattgaagaaacagtgccacggcaccagcaaccttctcctgctgccccacaagtgccgcctgttccgccgcctaggagagggaccaaacgtcgccaccccccggaaaatggtgatgagagtggtgagctgcgcatacgtaaacgagtgaggcaagcgcgaagagtacgagtgtattactcaccagagccgggtccatcaacatcagcacaaagcgatgaacaacaacaacaacaacaacgtgaactgtttgccattccgtcaaatcagctgaccatggcacagagaattgagctaatatacatcaaatgcaaccgttatgccaatcgtatgggtgtccggggaaacgcaattatcaacactcaaaatgctcaaccattggtgcgaagcaatttacgaacggccatcaggtatataattgacagaagagcgggtcgacctaccattagaccaccgggagcggaccaattggaggagcggcttaggcaggacccaattttgtattcattgacggctccaccaaagagaccatcgcagagcacaaacagcagaacgtcaataaagaaggaatttcagccgaaaaaatggaaatgatcaacaccactcttgacaagctgtacaacgatccatcctctcctgctgcgtttgccggtgttagtgcactgtggaaggaggcgcggaaaaagttaaaacaactacggaaaaaggatgtacaacactatttggagggacaccgcacgtacaccctgatgcgccccaggcgggtacgatttccgagagcaaaaactgtagctgctggcttcatgaccgacgtccaagtggatttggctgactttcaagcgctttctcgtcacaatcgcggtcaccgatacctgctggttgcggttgatgttctctcaaaacgcctgtttgtcgttccactcaaaaataagaaggccgaggagatgctggatgcattcaaagagcttgtcaagcaaatgccaatggtcccacaccgcattttctccgacaaaggcaccgaattcaaaaacaaattgctgaaggaattctttgaggagcaggagattgagaaacatgagcccgtgcattcgtcagtgaaagcgtcagttgctgagcgcgccatccgaaatgtgaaacagcgactgtacagatactttgccgaaagggagacgctgaattgggttgatgttgtacaacaaatagtggatggaattaacagcactccgtcacgggttcacggaatgcgaccaattgatgtcaattttgaaaatgctcagaaggtgtggaagcgaatttatgaatcaccgcaaaaacgcaagaagccacgtttccgtaaagatgaatttgtgcgcatgagcagagagaagggacagttcgagaaggggtatttgccaaactatggagacgaaatcttggaaattgacgaggtgctgaaggcggtgcgccccgtcagatacaagctccgggatgatcgtggtgaaaaattccggggcaccttctatgaccaggagttggcccgcgtgagaaaagatgccgacaccagttacagaattgaaaaagtgtacagaaagcgaagaaaaccggatggaaccacagagatgctcgtaaagttcattgggtatcccgaacgagaatggattgacgagtctcagattgtataaaagcgtttgaatttttgtgtatttctcatcagttgaataaatccataatgtcaaatagtttctttgtgtttttgcctagcaatgtgacggattatccggacaatcagccaaacaaattccgggtccggcttccaaaacctttgcatttcatcgggtcttgggtgcgtgggctgcacagcattagtcaaacgccgcatcgtacgcgtgccggtcccaaggtcttcacagaatcgagttgaacagctgagagactttttgacgacaacgctgagaaaccatgccaatgctaaactaaagccactcccgcgagaggaagaagcggaccgtaacaggacaaaaccactttactctccgccacctgcaaagcgtgcccggagatctctagcgctctcttcgcctcccagacatgaagaagctcctgcacgatcacttgaatcgcctcccagatatgaaaaagcgcctgcaaaaccacttgattcacctcccagatatgaaaaagcgcctgcaaagccacttgattcgcctcctaggcatgaacaagtgcctaagaagccacttgattcgcctccattgtatgacgaatcaaagctgcaaaaaccacaaaagtcacctgaaaaaccaacaacatccactccaactaaaccatctacaccacctgcaagtactcctcctcctctaccaaaaccagcaaccccagcagctgtttctaaaccgtctcaaccaattgctcctgcaacacctactgctaaatcagtagcaacacccactccagctaaaacggtttttcctcctccagctaaaacgccttctcctccttctcctcctccagctaaaacgcctaaggctcctccagctaaaaccgcttctcctccagctcaaaggagtctcctcctcctccggctaaaacggcttctcctcc

SEQ ID NO: 17335 - DNA, 523 bp, Heterodera glycines
  unsure (1)..(523): unsure at all n locations
ccgtcctgaggccgcgaagcggccgaatgttctcaaaaaatttaaaaaacgggcgcgaagcgcccgtcatgaggccgcgaagcggtcgaatgtcccacaaaaattaaaaaacgggcgcgaagcgcccgtcctgaggccgcgaagcggccgaatgtcccccaaaaaattaaaaaacgggcgcgaagcgcccgtcctgaggccgcgaagcggccgaatgtcccccaaaaaaataaaaaacgggcgcgaagcgcccgtcctgaggccgcgaagcggccgaatgtcccccaaaaaattaaaaaacgggcgcgaagcgcccgtcctgaggccgcgaagcggccgaatgtcccccaaaaaattaaaaaacgggcgcgaagcgcccgccctgaggccgcgaagcggccgaatgtcacccaaaaaattaaaaaacgggcgcgaagcgcccgnccnaaggccacgaagcggccgaaggngcgcaacaaaaataaaaaacgggcgcgaagcgcccgaccgaaggccacgaagc

SEQ ID NO: 17336 - DNA, 2091 bp, Heterodera glycines
ttatgtcgactaaaaacgaatgatcccacatttacatattttatatggaaagcaattaaaattcgagagctttttatgaagacagaaaaagatatattaaattattgctaaatttttttgtcatatgattagagggggcgggggggggggaggatgattaagcgaaaaaagaatgggaaatatgggccacgagaaatgactgaataatgagaatgaatgaattgatatatttttggacgcatgcaacaagtccaagaaacacactgcgaagaaagggacatttgcctctgcttacaaattaaaaagtcaaataatattcaaatatttatgtaagccctgacaaatgaggcttaagctgtctggtagagatcgacctggacctggatccaggcctggatccaaactttttcagtctttggtgttttgttagtaaagccatttgaaatgacgtttgatagcgcttggcatcttttctgttcattattttgttaggtgagcaaagagcagagtcatttcaaaacaaaacaaataaattggcaaagcaaaagtatttccaatggacgagaatcagaaatgatctgatttttatagacgaaaagtctcaatagaaaaagcatgagattctcaaaaccatggaaaggtgggcaaacgaaaaactcacaattgtacataatatgtatgtgccttttcaatttaattgaattgtgggcgaatgttggttcagattttaaattaatatagcctaattggggaaaagcactcagtaaactcaattttcgagaggtgttaaagcatcacatccttagcgacattaggcacaactgaacaaacaacaaaatccgatgaactttcagcgatgttgcctttgcttatttaaaaatcgcgaggacataaaaaattttacgtacctatttcgtgttgattagttggaaaaatttgtttgttaggtgattatatgttatccaaatgaggtaatagaagttagcaattgcccttgacatcattttccggtggtgggaaggaaatgggctaagagtcaccgcggaattttcatttattattttaatgatgtcaaaaatttaactttccattaaaaatttaatgattggttagggggttttgttttctattttcatttgtttgttctgtgagggatggaaaagcagccaattttagttggttttttgtaaacattttgcgcctcaggctaatctttaatcccaagaaatgtatcgagatttagggcaaagaaaaatcctaaattgacattgataaattcaccaaaattctgtgtaaaaaaggcgacttcactaagtcatttaaaatttcgagagcgaacttcgccaatccgtcatatttccccaattttctcactttattagcaccatttttttcacccgatgaattgagccaattttggaccaaatcatttaaaggcgaatttacgtcaataaaagatttttagaaaaaaaaatcgagaatatgaattaagaaatggccataaatggcatagaaatgcatgaattttttttattattctccccgttcattaagcatagaaaatggaagaaaatatcacacacgccaaagggaggaaggaaatggtggagaaagcggacggaatgggagaaaaagaacaaaacacgtcattgccgggagagggcggaggagaagcacacacacacaagcgacaatgatatttattcaagctgagaagtggcataaaattgcaatgaatgtgaaccacggcaatggttaaatgggggacaaatcgacgggggaagggaatttaaaattcgaattttgaaaatttggttaagagcaaaaagaaaagagataatggattaatgatactaattgggaaggaaaaaattaaatcagggcaacaaaaagccaattgattattgacactttttatgatcgacggaaataattaggggacacgggaggattaacgagaaaacaaaatgtgagcaaatattaacaacaataaaaattttataatgaaatctgggagcaaaacattcattttcacttgaaatcattcatcatgggacccctcctcccctccccccccccctcggcgtatca

SEQ ID NO: 17337 - DNA, 4870 bp, Heterodera glycines
gacaagggaacattccgaactgtgactgctcaaatcactttaataatgtaaaaaagtattttggtaaaaatgttaggtccaaccgaaatgtgaataataattgaattataaatgtcaaatcaattaatcaaaattatgcaggaaattagaaccgatttaatttgatgaaatgaaaacattacaaaagaacagcaataaaatggcaaaagaagctatatgaattgatcaaagaactgatcattttaatttcttcagcagagaacggagcgatcgaatttgaaattgggcccaaaatttgccacaattttgtcctcaaaactaagaagtgtagcaaatggaaacaaatgatcaaagtcaactgaacagtccaagtccaaagtgtgcgtgaatcctttaaaattttcattgctgttgaattaatttattatttccaacccaatcgttgtccatttttcgtaaaaaatatttgatgagtgccaaagtcaacgccaatgccaaccacatcgtcacgggaaaatttggcagtttcacctttcctcgagccattggcccaaaattcaccgcaatttgaaaatacgtaagtgccagtgtagtcctgaattttctcattcaatggcatcagctgtttgacggaaaagccgaagagaatggtcctgaaagtgccaaattaaaaataataaaaaaaacctttgccttattaattaaatatttattatttttattaatttaaattacgttaccatcgcattcttatgatcaaaatttcaaagtaaaaaatgttgtgaaagtcagtggtggtggcgtatggaagcggatgtttggcgaacacagaacgaaagactgaagaaaattaaatttccaaataaatgccataacaaaataaataccgtattccctttaatatagcccccccccccctgaattaaagcccccccagcaaaagaaaacatttcccataacgagttcaaacccaaagtgctaggtattttatctgttattttgtcttatacgtactccttcggtctccttcccattcttgaattgccgccgtcaatttttgggcatcagtgacttcaatttcgtagtgacaagcattcgcatcccaacaatttggctgctttacatttgaaaatttctaaatttgtaagtttcatttttaatttaaaagtaataaatagcgaaattaacgaattttttgtcatctttttcgtcagttcttccctctcccatttattcacctccttttgccgattctccaattcactgatccgttccaaaattgcctttcgatcattgtgcaagtgtgctgtgaattgatcatcagaagcttgaattaggaagcaaaaaattttataaatattaaaaaaaatatgattaatttttaaaagtaaagcctaattattataatttcaagtaatcaactttcttaccgtaattttccttttccattttttccaccttttcatgcaacaaccaaaattgctccatcatctgcttctgttgatctaactctgcttgaagtgcctactgaaaagcaaattataaatatttatgcaaaaagtaaataaataatttaatacaataagaaatttgtatgtataaatacttgcctcttcaattctgaggtcctccattatgcacaattgttccgtttcccgcaattccatttccatcctggcaagcttttgactaatttcctataattagaataatcacaattgttttttattaaatgtctttttattgtttctgttcatatttagacaaccttcatcagttgttgatcactggttgattctgaattgtccaatttttgaccaaaaataatcgaagaatcacaacaatacacttctgaaattttgaatgaaattcattagggaataaaagaatttaagcatttcaaaaccggaattttatttcaaaattatgttccaaagtgcaaaagctacaaaaattgtcgaaatttttgaagaaattaaaaaaaaatctgcatattccattctgaaatacataaggcctatattccggtattcggcaatttttgaaggcctgcggatatatatatatatatgccttgttttcgaacccaacaaatgaccatatgtcaatttaagatatttgaccaaaattcggcagctattttttatattagacagaattgaaatttaaaataaattcccttcttttcaattttttaatggaatattttttttatatatttcatcttttatttatccatttcaatgccaattcttttcttaccttcatctgcttctgttgacaaattggtaaaagttagcatttgttttttcaaataaaaagatccttgtgaaaattaaattatttctgatgcatttagtattaatgttttgattaatgctgatttatttgcaaaagaattcattgggtcaacgcaaataaaaaaatgtacggcaaaatgatgacccaaaaagggagagaagaacagaagggcaaataaataaggaaataacattgaagatatttgaatgattcttttacgacggggcaaaaaccaattaatgttaaggaaattttaaaattcaccataattgatgggaaattttaatttagcgaaaagactaccgaattaaaatatatccaatggagatcgggcgatagcactacaacccactacaacaattagttgtatggtggcaataaaaaatcttctaattgtctttttaaaaacattattaaataacgatgcaaattttaggtaggaaaatcgtaaatcatttactaaataggcacaagaaaacaatttataaaacattttttcaaaatatcccatttgtatgaagcgtaaacaagagaattattttgattctatcatttttggtgtgaattagacctgtattaattgaacaactctttctgaccgtcaaattttataaaagtaaggtctccagggtcggtcgggagttttgggaatgagtccgagtgccgagataaaaatgctaaagggataaaaaatggaaaaaaaatattttcttttacatatataatttttgaagaattcgaccaaaataattattaaaaagcgcactacctccacagagtttaaaagttttttcgacagagaaatgtcaatgtgcaaattactcatttattaaaatttcgcgaaaaatatacatgttcaaaggctaattctcattttgcgcggggaccgaagcaatttcgcaaaattaaagaaaatttttgaaaaacaaaagataagaaatttgcaaaaatgaattttttttcaaagttagattggaatttatcaaagaaaaaatattaatgatttttttgtctgtgttatggtttttttaaagcatccaaaaaaactgaataaaaagaacaatttctattaaaaaaaattactgcaagctttcaaaaaagaatttttggtcttttataaatttatttgatattccattatcgtgtgaattatttttattttattactttttaaattaaataggtacaataatataagtaaacagctgtgaaaaagagttagcccgttttgtggcattcattcgacattaatgagaccatccaagccgtgccaccacttctgaacatcgtgcgtccaatttggccgtcgcgaagggatccgcacgagtcgcgccgatattcacttgattaattgaattaaatggctctattgcagtttacacgatcataaaaataaacatgaccacaaaatagaatgacaactttaacgcttcaaaacttcttctagaagcatccaaattaaacattcttagtatcattcgatagctctgaaagaagaagctggctgggcggttaaaacgtggaaagcgggcttgataatccataaaagaaagggcggatgtgcctcggtagctcaatggtagagcttgcccatggaaagggtgcacgagtgggttcgattcccatccgaggcctaacatttgcccaattcttattattctaagagttttcttttaatctaagtgattgaaaaaaaagattcaaatgaaacttttgaaaatttattggctaatagcgaactcttagagctatcggatgatcattaatttagatgcctctgttggaaaaagttatgaagcgttaaagttgtctgttactttatgtcgtggatcattaaattttctatgataatgcaaagtgcaacagagccaattaatcatcctaattatgtgttaatgagttattaattataaattggcaattggcaccaatgagaatgggaaggtcgagcatttgtgcttggactgcgaaacgaaagccggacatcacagtgagtgaggagccgagcacaagcagaccggaacactcgttgatctgaataaagacgaaaattaattattggcgaaaaactcgatgaaacaaataaaaattcccctcattaaagaaactaaaattttacgataaaatttgacgaaatttaatcaaaaaaaatacggaattttactaaacaaaatccacaaagttaggtatataatttttgtccggagccgtaatccagaattttttaaaaagtataaatttttggtacccattagtttcactccagaaattttttttgaaaaattgaaattttcaatctttcttataattatatagaggttttttctaataaaaatagtcagaaaaaaacatgaaaaaaaatctcatttttcgaagcttcaaaaattatgaaaaaaattctacaaaaatcactaaaaagttgtttctgtcacatcgccaaacccaccttagcactgcagtgcttaaccgactcggccgacacagtgtcgccgaagaacacgacgtccgtcttcagcacggagccgggtcacagcgaggacagtgcggacaacgaaagagtgcaggtact

SEQ ID NO: 17338 - DNA, 3965 bp, Heterodera glycines
  unsure (1)..(3965): unsure at all n locations
aacaacaatcacctcggcttttgttgaaaaatttctatgttccttgggcttgccgaagatagtagttaccgactgtggtacccaatttatgagctcaacattcaaatcattggcaaaaacttggggattcgaacatcaaaccacagtgccctaccatcaatcggccaacggacaagtggacgatataaccgtaccattgtggatatgtttgtcacaagtacggaaggaaaaaattgggcggctgcgttaccattaatttgcttcgcttacaattcttcaattaactaccaaatcggcaattctcctttttatgtaatgcatggcttcgaccctagactcccaagtgaagtgacactcggaaaggtggaggataatttttcggatatggcaatatatgtgcaggagttgacaaaacgaatggaagaagttaagacaacagtaaaagaaaatctgaggaaatgtgccgatcaaatgataaaacaacaaaaatggacaaaagagatcccatggagggaaggaatgctggtactgaagcggaaaattgacaaaagaaataaactggaacaaaattacgatggcccttttcgaatagttactgtagagaagccaaatttgacactcaaagagatgcatgcagacgctatggggtttacggtacacatggaccagtgcaaccgtatttttcaaaagaagaacaaattctggtaccaaacgaagagccaaatttgggatccaaaagaaaaatcggggacaaaaacttggaagatacagacggagaggaagagaccgaaataaatgcaataagcatggaaatgcttaccgaatttgatgatggaaataatttgaacaagcacggattattatttttgatggaaataattttggatggtattgtcatcaccgccctatacccgaaagactcttttgaattttcatcaatcccaaaatctatggttcaatcccagtgggaaatacacaagaccagagaaggagatgaatatttaaccgcttggatttttgacgaaaacattcaacttttcataactgaggaaagggaagacttaattattgggaacgaaattcaagcgtggttaaatcaaaacggaaatgtaatttgcgaaaatagagaagcaacctactgggagacttatttggacatggacggactcatttataaaaataaaatcacccccgaattttggataacctataatgagcccgaaatgtgtaaagaatacgaatctcgatcatgctcctcttcaacgatttttttgaatgccgaagaatgttcaaattcaaatttacaggacaaaaaaatcaatatcctacccctgtctctaataatggctaatgctgactcaccaatactaatttctgatgaggaactaagcgacgacgaaatacatttgagaaaattactattgtcggaacaacagcaacaacaactacgtgagcaacaattcaatcccgatcggccctactcgtcgacagtgcattccctgcccaccaaccaggtccaaattgtgaccccagcacaaggacaacagctaaagcgtgaccaacagctagccctgattaatcagaaaataaaagagatggaagccgcaaaaagacaaattgaagaagaagaaaccgtcgaagaagaagcacgaattgtaagagaaaaggcatggaaagcggaagaacagaagaaaaggacaaagagggaattggatgaaaagatgaagaaaagggaagaagaaaagaaagcggaagaaagggcaaaaaaagacaaggaggaagtcaaagcggcatttaagaaaattggaatgagtaccgaagtggggggaaaagaagatggaaacaaacaaaaaaagaacaaatcgaagaagaaccaaaagggaaaggatacggaaagtggaaatttggaggccgaaaaactcaatgatggacatagggaagctaagaaagatgcagaagaaaaggcgacgagagaagcagaagcgaagaaagatgcagaagaaaaggcgacgagagaagcagaagctaagaaagatgcagaagaaaaggcgacgagagaagcagaagcgaagaaagatgcagaagaaaaggcgacgagagaagcagaagctaagaaagatgcagaagaaaaggcgacgagagaagcagaagcgaagaaagatgcagaagaaaaggcgacgagagaagcagaagcgaagaaagatgcagaagaaaaggcgaatagagaagcagaagcgaagaaagatgcagaagaaaaggcgacgagagaagcagaagcgaagaaagatgcagaagaaaaggcgaatagagaagcagaagcgaagaaagatgcggaagaaaaggctaacagagaagcagaggagaagagagacgctgaggaaagggcgaagagagaggaagaggaaaaggaagcggcagcagaaacaaaaagagacgcggaagcaacggcaaaaatacacagtgaaaaagaaaaaaagggaaaaagagaagggaatgtctcaatcaatgtggagggcgcaaagaagaaaattatggagacaattagcgaaaaatggatacccaaaattgtgggaagcatttttgacccgcgaggtgaagaattgggggacgattggacgatcaaaaaaatgccaagaaaaccgggaaaaagaggaccgactgagagagggaaaaagcgaagagcgaatgaaggcgtggaaggaatggacgcagccaaaaaatcaatgggaaagtggtggcacggcacaaggagggaaaagattttttgagaacacgctgaaatccgcagtgatctcggcgaatgagacacgagccatcccaccggaaggaatgggctggaaacgtcatgtaccatgctttcaagcagcgccgcctggccccggcttcaagcgccgacaccacgacgtgagcccaatcagaagaatggacagcacgggacaagggacatcggcggcgagcggaacggaagaaaagatcgtgaaaattcgaaaactgttgctgcaggccgccgacttattgggagaaatggcggacgaattgttcccgtataagaaatagggggacagcaaaaggaatatcaaaataacaaaaaaaaaaaaaaaatatatatataaacaaaacaaaaaaccaccaaaatcaaacaaaatacaaaaaataattaattacatacattaaccattatttttgctgcccccccctttttattngattgcaaatgaaatgtttgggtaaatgactgccctttgccttcagtcattttctctctcctttttcacatcacacacgctaaaatttctcgccctctctttttctctcattctattttttcgttccatttccttttcttcatctctatctctctctcttcatctgtctctcgttttcgctcccctgaggaaatgccaatactcaccaatcacggcggacggcacaacaaggcacggcacaatcaaaattccaaccaccaaaacaacggacatcagaagtgcagcagccatttattcggaatttaaatctacaaaaatttttgagagaaggaaaagccaaaaagatgaaaaatgacgaaaaagttggatgaacaaaagagacggttcgctgctgcacatctgtccaaaaatcctcccatctcttcctattcattattcttcactaatttgcattttcaatttacgcaccattttccacgacaacttttgaatgcaattgaatggaacgccgagggcggcgttcagcagagagcggagaatattgtgcggcaattttcgactctcttccctctccattctctctcactctctcgctcgtccatttctctctctaaagcttttgccccaatgttgccattgtccccgcccccgcccattaacttaattgcttcgatcagatttaaggggaaagatttggggatttgagtcagttgttgatcatttcgccttttgaacattcaccattttcccctgcctttt

SEQ ID NO: 17339 - DNA, 2632 bp, Heterodera glycines
aaacaattaattttaaccaaaaaatacatttcaaaagtgttacacaccgccagatttttattttatttttcagtcgtcatttcagtcctatggtataataaatttcagtaccgtctcgaagatagacatttttcggaattatcttcactaaaagtcaaaaaaaaggtgtgataccaactaaactattaccgctgtttattattaaatgtactctccccggctttaaatcttccatgacgccttgtttttttttgttaattctcttttaaccattggtctcgtagataattattaacattaaaatggatccggcattactacgacaacgacaagagtttatgaaacaggccatcaagtcgatgggtgttgctcagcaaattaaaaatgacagaaatgaacaacagattccgacttcctccgctgcaagcagtgccatgccgaagaaaaagaagaaaaagcctgttcagacggcagctgctggccaatttggcacagaatttgccgccaatgcgaccactgctgaggacagtgcacagaatgcgacaaattttaggtgacttttttcttcatcaatcgtcagttaagtcgaatattatttcagcataatggcgaaaatcgttgactatatgaagaaaaggcacctaaactcgcagccgtgggcactttcgctgaaagaaatattggaggagatgcaggtgaatcgaagcaattaagaattgacaaaaaaagcatttccctatttgattaggtttacgatgtcaaccgaaagtcaatgctttggctccaagaggcactcccgcggaatccgcggctgcaatccgaggcggacgacaccaaatttgtctacaaaccgttgtacaaagtgaagaaccgagtcactcttttggcacttttgaagaagtttcacacggaaggaaagggcggaattttgttgtcagatctcaacgattgtgtgaacagcgcggaattgttggtaaaagcgttgggcaaccaagtgattgccatcccaactcaggttggaccggcagatcctttctccaaatttgctggtccttcaaaaccgttattttagataaacaaacggaaggacatcgtttatttttacaatgatacggaaactgatcgcgaaattgacgacgaatttgtgcaattgtggcgaacggctggcgttgagcatttggacgagaacaaaattgaggaatatttgcagaaacatgggcttgagacggccagggatttggcgccgcggaaaccgaacgcaaatttgggaccgaagcggaaacagccgaggcaaagagtgccgcaacggttgcacaacgtccatttggagggagttttggaggactacaaaacggatgactgaatggacaatacaatgaaagtccgtttgttaaattgtgataattaaaattgtggatcgaattaaaagaaatcgtcatttatgtccaataaaatcagcgttttaatggcttaaaatttcgctcgttttttaatgttaattcttaccttttattttgtattttttattttatctgttttttatctgcagtgaatggccatcaatgaacgatttttcgccgctcaattgggatgaatttttcgaccgtaaagaatgtgtcaaaacaggcgatgacaagttcaacgtgtatgtgaagggttcaaatggtccgctgttctttctgttacacggtggtggctacacgggcctcacttgggctgtgctttcggttggttgggtttttattagatttgagctggaccgagagtccaagaaaaaataatttaattatttctcgagagaaataacaaaataaagttagttttttgggaaggaggtgacggtaccgaaaagcgccgctggaaatttttagaagttccgatcccgctcaattctatttttttatctcatcgaattgtttaacatttatggcacctgttaatttaaaaaaaagcataaatggccaaaacatatgttatcttaagaatgtagcagtgcaaaattggtacccacttctagtagtgatccataaatgaaaagaaaatgtattttaccgtgtcacaatgtccccaattttaggaacaactttcttccgtcatcgaatgtcgcattttggcaccggatttgagaaaccatggcgaaacggaggtgaaagatggggacgacatggcagcggagagtcaagtcaagtaaaaaaacgctttctttccgtttgcctctcgtgcctttgactgtccgttcttttcttttatagtgacctttgcaatatctatcagcatttttatggacatgacagtagtaagtatccgccgaccattctcatcgggcacaggcaagtgaagcgggagggggcgagggattcgactatggccgtactcaaaatgccacaaaatgaatttaaccccgctctgtttagcatgggtggggccatcgcaattcgagcagctgccagcggaagattgcccaacgttttggtagtcagtgccatcgatgtcgtggagggttcggcaatgagttcgctgtgcttcatgcagcagttcttgcggagtcggccccaacactttccgtccatcgaacgttcggttgaatggtgtgtgaagagcaaaacgacgtccaattgagagcagcgaaagg

SEQ ID NO: 17340 - DNA, 1252 bp, Heterodera glycines
aattgatggtaaaaattaaatgggaggggggggaatgactgaatttggtgattagtgtttcacccgcttttcagacgggacaaatgcgtggccaatttcaactcgaagttctgcccaaagttgggcatgccgtccacgaagactctcccgaattagtggcaaaaattttcgttacgctggtgaagcgttacaatgtcatatttcaaaaatatttgtaagcgaaggatttcctatttgtgcaacaaattcttttgtactttttttcactgaataataaattataaaataatatgcgaatccacaagccctaacatcctttttcttaagccatattttatcaaagaaaaacccaagaatatattgacattgactaattgtaagaataaaaaaacctacggccaaagaaaccaaggatggttatcaattggacgcgtaaattggaataaagcaattactttttacaacaaaaaaaatattgtataccgtttatgaatgtttttgttttaaaaatgtggaggatctcttataatattatcccttagaattctcttgtggagttggacatgacaaacattggttgggagcaatgaatcgacgaatttagtgcccaaatttgggcttcaggaattttttgttttaagcatatcatttagtcggaaattcatgcaaaaagtaacactcgaaaactcccacgggtacaacagagaaaatgcaaaaacccaattcccctttttgtagtattctctaactcccaatccaatgccatgtcatctgacggactcagccgtttttctagcgatcgtatcaaaatgtatgtgcatgaccagacgaatggtttaatttccttcctccaacttcacagcttacgatgacccagtcccgaatttaataattaggaaaaggatgagagcaatcagaatggtcagtccgaaggcgagcaggcacaacttcttctaaaaagagaaagggacggaagaaaatggacgaaaaatgacaaaaggaaaagggggggggaatggtaattaaatgaatggttaaaagcatttattgtgttaattatagtgaaaaagagcactagcagaacaacaaaatggaagagttcagagagaatgtgcaaaagaaagaagggacacaaataagggaaaaacaattggaatttggctaatttacaattagaagggcatcaaaaactcaatcaaaaatttaaaatttattgctcttttgaggccgattaattaagcggagggggggg

SEQ ID NO: 17341 - DNA, 1612 bp, Heterodera glycines
ccggagaacactcaggcagtccctgggacacgtaggaacaggcagaacaccaatactgtccggagaaggaatagttggccacttgcaggtcgcaaatggcttgcagacggatcaacgaattagactgttgtgccgccaatgaatttgcgacggcggctgcgcccgtcggcaattgggtcggaggcacttcccggtactgaccgttcagaccctggaaattggaacagtacagagagagagaaaggcaggggagaatagtgcctggggacaaggcgcgtcgaccacttggccattgctccttcgcaacttccaaaacaccgccggacgaggattgcctgagggaggggggggggggcaatcgagctttgggaccagtgatcagcggtgtagggaccgaccttcgacgacgcaactcatctgaactcgctggcccatttcgacgcggtttccctgttggaagggcgcgctgctctgcacttgctggaaaaaattcatcactttggaacgcttgtcctcaaattgcctgaaaattgtcctgaattagccgggcggcggtgtacgaatcgatgtaaacggcgggcgattggagctcttcaccgtaaaggccattattggcggcacactgacaaagaaagcggcaattttggaatggcatttgcgatattcgacctgcagcgagtgtccgatcatgtccgtgccgatcataaactcgggcccatttccgccgctgatcggtccgccgttcttcagccagcggaaagagttcgccgcggggttcgcctgcaccgcgcagtggagcgtcttccgtcgggccgcactttgctgacactgtccgtccgtcccgcgcacgcattccacataaaatcggaagccctggttgggaatgtggacggggccctgcccgttggagtcgaccacgtgcactcccctcaaatattgcacgtcgacaaccgacggcggagagtcttttgtccccccattgaccgcggcctgaaatgctaattgggcgagaaatggaaagtgccttgctcacttggcaaatgatcgtggcaccggtccacgagggattggcatcgaccggaggcaattcgacggcctaaagggagagattggcatgccaattcaaagggaagcgcaggtctaacaatgcgaacatattgtaataattcgttttgtcattcccaatttcatttccttttaccccctttttcttttgtcccttttttcattttatgttcccctggctaattatctttaaatgaatggacggaaagggacatccctttcaatcatttgttctgtgaattcggcattttgtattgtattgtccatccaccagcggagggaaaggcaaaaacggaggtcaaacgaatggcattttcgggtgacaaattccccccccccccgccctttccctccccaaatgtctctctttcctctatacttccggttcatcgagctgattagcagtaccaaagcatatcgaaatttgactctcattaaaaatggcttgacccaacgctttagaaaggtcgattttgagatggagaaactctgctgaagtgcgcggaacaaaacgaaggtcatttgaattatgggggggggggggggg

SEQ ID NO: 17342 - DNA, 1045 bp, Heterodera glycines
aaaatggaaggggaggtcgaaatgccaaaaattttaatgggcaattccctcctcttcttaaaatgagaaaaagagattaataaaatggggggcggtaaaaagagaaatcgaagacaaattcaaaggggaaaagggggggggggggaaagcaaaatgggaagggatgggatgggtgtcaggtcaaatttgtgcatcatttctcctacctccctccctttttcttccctttggcttcttttgccgcctcggcttcttcgggtccattttgcctttggcttctctttctgatggcttttcctctcccttcggcttttccctcctttctttggtttcattataattccaaatgttttgacttttcacatgatccgtccgaattataattagaatgggtatcatagtttggtgctgattgggtggaaaagaggggctaagattattggattgcgcactgctgaggggcaaaagatgaaatcgatcgtattttatcgcaaagcgggggaatttcgggttcatcgggggtggggtgaaggggggagggatcggcgcgtgggaccatttaaaaaacgatttgtcttcgttgtcaggaggagcgatctcttcccctgctcatcggtctcttcaaacccttattccctcccccccccactcctttcttctccgatcgacgatgaactaacagatcgaattgaaatgggtcgttatgcgcgatgacggggagccagccgagaattgggggaaatatgaacaaatgagggaaattaagaacaaatgatgagtgatgggctattgacacatccaaaagggcgcaagtcaaagagagaagggaaacagaaagaaaaagggagttgctgctgaattttcaaaatttaagggaatttgaggggataaaggtaaaaggcaatgaatgggagggcaaatgagtcacagacggagaggggggggggggggacatcgcctgctgcacaacaaatcgccgggtttgaagggttgggaaagcagtgcgagggcgggggatgagggaatgaccaccgaccgaccattt

SEQ ID NO: 17343 - DNA, 1740 bp, Heterodera glycines
cctcgggttatcgccgctgtaccattctttcgcgcactctgcacttttccgcttcgtttggtcctcccttcccgcgtcattccgtcccccccccccccttttaaaccctttcctcgtcttttgatttcctccctcttctttctcctccccttctttttcctcctcctccctttaaatcccatcttccctatcgcttctttctcatctccccttacatttcgcaaccattggctgcataaataacgcccgtttgaccgaatgatttgagctaatcaaaatccttcccgacccaaactgagcaaaacgacgacgacgacacacagccgacggcacaaattgcatttggattagtctctccttctgcggaccattcattatttacaaaacaacaatttatttactcgctttcgttttcttttaaatcatattttatttttggtccgcgcatttccacccattgaagagagccatcttttgacagtttatcacagcctcaaattgacaatgaatgattgggagcagcagcaacgatgataatgaggcgatgtttgttgaactgtcatggactgctctcttcaccggaatggagatgaaaggagccttatttactttccactcaacagtttttcagcaaatgggatcaccgctgatcattcttccaaattagaaaacggacaaatccaacagatttatgtcaggccgttttaggcacccgaaatgtttgttgtccaggcttttcaattgccgaatccctaattcccacggtcagggtcgttttcgtaccgccgttttcgtacgggacattttcgtacgagttcttgtacaagcgtcagattcaattagaaaaacttagtggaaaatgcgtcaatggaaaatgcgtcagtagaaaatgcgtcagtgaaaattttattgtcataaaaacaagttccttgcgttttcgggggcacttaccacgaatctggtatccatttcggccaattctgaaccccggacgcgaattcgaacaaaaagttgcaagtctaaattttcgaattaagcattttttgttcaaaaacggcataaatgatctcctattgcaggattgatgtatttcagtttgtttctgtgtatttaaaccgatttgaagaaaaacactaatttcgaaaattttgactttcgattttttgttcgagtttgggtccggggttcgcaattgagaatgattttcttatagaagtttacttctatattacaatactaatgccatagaattttattttaaaatatttgcatcactgacgcattttctactgacgcattttccactgacgcattttccactgaccgattttccggtcacgtgattatttcataacaaaaaatcattcaaccaaagtgtgaaaggatttatatgttttttaaatttattactttatgtaacattaaatgaataaagaagtattgacaaatattaaatttatgcttaaattataaacttttttgggagacttttcataaattgggaagccaaaatattatttatatgaatccacttaaaggatgcacgtaactggatttgaagctgaaggtgatcatgcgcagaaaaatctttaaataaggcttttttgcaagcaaaacgaggcttggcatcgggtctccaaaattatacatatcatttttatatcccctaaatgtcgggtcccctaaaagttatacatatcccctaaaagattatattcccaaatgtcaactcgacaatga

SEQ ID NO: 17344 - DNA, 2877 bp, Heterodera glycines
aaaaaggataattgtccactatatgcttcaaagatgatcgattcaccactgcgaggggtactgtagaccggtgaaaattcgcaataaattctgccgcaggcaagcggattcgaacttttgctctccaccaacccaacacactaccactctgccaagagaccacttgccagaaaaaggataattgtccattatatgcttcaaagatgatgacgtcacaactgcgaggggtactgtaggcctgtgaaaattctcaaaaaataagccgtagacttttccgatctataaaactaaaaccttctagaacattctagaacatacaagctgtatgcttccagaaacttctacctattactaaagttcagaaacttttggaactttctagaacaaacggaatttattagtttagtaatcattttaaacaaaagttgaaaaaatttactttcattatttgtatacaccggtcagctatgttgctaatcgataataatgttaacctttttgcatctattccctctgctgcttctcggtagtcattgtctctgcagctataacctcacctctgcgtatactctcgctaatctattatttggaccaagactgcggctctgcacacagtgtctcaacatctctaacctctctttgcgatgtactctcttgccaatcgataattttgtaagtctctgcttgacagccccccgtctatgctgcacttattgtctcaccatctccaacctctctttgcgacgtactctctcgtcaatcgataattttggaagtctcttcttcactgccacgtctactctgcacttattgtctctccatctctaacctctctgtacgacgtactctctcgtcaatcgataattttggaaatctctgcttcactgccccgtctactctgcacttattgtctctccatctctaatctctccgtgcgacgtactctctggccaatcgataacaatggccgtcgctctgcgtctctaaccttccgtatctctgctcctccttatctctacatctctaacctctcctatatgcgtgctatctcgccgatcgataaaaatggacgccactctacgtctctgcccttctgcttctctgcatctctaacctctgctatatgcgtactatctcgccaatcgataaaaatagacgccactctgcgtctctgcccttctgcttctctgcgctcccttgtctctgcatctctaacctctgctatatgcgtactatctcgccaatcgataaaaatagacgccactctgcgtctctgcccttctgcttctctgcgctcccttgtctctgcatctctaacctctcttatctgcgtgatctctcaactaatcgatattgttggcgtacgtgtctgataggcccacatacacacacacttacaataatgttttaatttctgagctcaattaagtttgtcgggagtgctaccccgaccggcacatgctgttggcggggggacgaagcgcggagttgctgtgggcgcgcacccagcaacgggcctgggagctcgccgagctgcacgggatggaggtgctgttggtgtgggagtgccagttccggcgcactctgcgcactaacacccgccttcgaaagctgtacaaggagaggtccgttgatgtgccgggcccgctcgacttgcgcaagcatgctctgttcggcggccatgtggagcccttttggctgttgcacaaatgcgctcccgacgaagagattgtgtacattgattgacattgtatgtttttgagtgacattttcatatgaatttcattaaaaatatttttctctccccaaggtgtctctgtacccgttctgcatgaacgcgcgccccttccccatcggcacaccgcacgtgtggaccggagagcagctgtggcaggcgggcgcccaagtgtttgaaggtatttgtagctgctgctgctcatttgtccgtatttgaaaacagcattttcagcttttgctccacctccagaagggctttgtcctcctcctgctctgccatggcgccgcccggaggacaaccgttccgcggcttactcttctgccgcgtgctgccaccgacagcggaggagctggttgaccgcgagccgctgcttccctaccgcacccaggccgatggacgactcatcttcggcctttgcgctcgttgagccgagctgcgccagcagcgaatctgtcatcacacggagcgagagcgtgggtggaccgctgcctacacgcatgtggagctcaattgcgcgttgtccatcgcgtaccgagtgctgagcatccatgaggtgtggcactacgagtgctgggcgtcaccggacaacggcaacggactgttcacctaatacgtgaccaccttactgcggctgaaggcggaggcgagcggctggccggccggctgtgacaccgaagcggcacgcgcagagcacatccgccaatttgcggagcaggagggcatccatctccggcccgacaacattgggcacaacccaggtctgcgtcagttggccaaggatctgctgaactctctatggggcaaaatggcggagcgttcagagcgcgatgaggtggtgtacaccaacagcgcacgcgacttccacgagctgctcatgcgtccggagcaggaggtggtcagcttcacccacctcaacgaccagctggaccgctgtgtggtgcgcaagcgggagccgttcgcacggacgccggagcacaacaacttggccgtcgcatgttttgtgacgtcccaagcccggctgtgcctgtacgactggttggaggaggtccgacgggtgcgcggccgatctctgtactgcgacacggacagtgtgctgtacgtgaaacagtggcgctgaaggtgtgcgcgagggcaacgcg

SEQ ID NO: 17345 - DNA, 1578 bp, Heterodera glycines
aaccaagtcaagtccagaaaagaatatcttaaaaccttcctggtttggtttggcattatgataccgaataacattcggtaattatggaaacaaaattggagaaattcgaataattttttgacttcaaatttttttcccagttttgattgggttttaaaatagtagtttggttcagaatttttccctctacaaaaaaaaatttataatagaattttttattattaattcgaaatctttaatttattggacaaatccaagacttaaaattgggagaagcatggggctgtagctgaggacccaaaatggggccccattggggaattaaacatgatttctgaaaagtccctgaaatgtcgattttttctttctatagcttcttgtagagctcgagctgctctttccaatggtcttatcccggtctcgatccgtgcagaactcaaaaagttatgaagtgaaatgtgaaatattgttttcgccacaattgggagaagcatggggctgtagctgaggacccaaaatggggccccattggggaattaaacatgatttctgaaaagtccctgaaatgtcgattttttctttccatagcttcttgtagagctcgagctgctctttccaatggtcttatcccggtctcgatccgtgcagaactcaaaaagttatgaagtgaaatgtgaaatatgtttgcaccacaagggattttttctgaaacccatcggaaccaaaaatctagggtttggtataagcgttttagaaattgcggagaaaaaagcttcgatattgagaaaccaagtcaagtccagaaaagaatatcttaaaacgaattcgtttggtttggcattatgataccgaataacattcggaaattatggaaacaaaattggagaattcgaataattttttgacttcaaattttttcccagttttgattgggtttcaaaatagtagtttggttcaatttttccctctacaaaaaaaaatttataatagaattttttattattaattcgaaatctttaatttattggacaaatccaagacttaaaattgggagaagcatggggctgtagctgaggacccaaaatggggccccattggggaattaaacatgatttctggaaagtccctgaaatgtcgattttttctttctatagcttcttgtagagctcgagctgctctttccaatggtcttatcccggtctcgatccgtgcagaactcaaaaagttatgaagtgaaatgtgaaatatgtttgcaccacaagggattttttctgaaaccgatcggaaccaaaaatctagggtttggtataagcgttttagaaattgcggagaaaaaagcttcgatattgagaaaccaagtcaagtccagaaaagaatatcttaaaacgaattcgttttggtttggcattatgataccgaataacattcggaaattatggaaacaaaattggagaaattcgaataattttttgacttcaaatttttttcccagttttgattgggttttaaaatagtagtttggttcagaatttttccctctacaaaaaaaaatttataatagaattttttattattaat

SEQ ID NO: 17346 - DNA, 1284 bp, Heterodera glycines
  unsure (1)..(1284): unsure at all n locations
cgcacatcgtctcttcgcggggctgatttctttcaaattccctcgggattttaagcgacttttatcacaaactttaccaaattgtaagaaatttttcggatggccttacgatggattttgggtaaaaaagcaattttgaagaaataattttaaaaaaatttcagttttgacaatctgccaaactaattttttaaatttttctcggtgacgaactgaacagtgacgaaatgatagggcgcctgtaattatttggaattaataaaattaaaaatccaaaaatagatttttaaatgcaattttcagatttaatcaatgatttttaaaattttataattgacttatcattttgcccattcaaaaaatccaaaattaagtacaagtttcaaaattttttggatggttataaaattaaaattatttaaaaattttatttttccgtgaaacagatgaataaaaattctttttgtctattctttttgcattattctatgtatttgtggtgaccgtagcacaaagcaattgggattacagtaaccagcagcaagacgacagtggcgatgattacgatgaatatttcatgactttatcaggttcactcaaaaattagcagaactcaaaaaaatttttggattttcaatttatttgtttaacagtaattattttatttttattaaatttaaaatttaagcaaaagaattggtttccgaatttttgaacaaattccaaacactagcggcacagacagcagatgtcggcgcgttcatgggaaggatttccttggaagcgtatgccctactcaaagggtgctatgacgttagtcaaaaaccatcataatgggcgttagtcaaaaaaccatcaaatgaaaatattttttgatataactttgttcaaaagcatctaaatttttaattcttgatatcattaaatagcactaagagtttctattagcctacaaaaaaaggtttatacagaaaaacattaaaaaattgaatttttaattattaaaaataataccgatgaatcaaagtgaaaattttcttaactaatttgctttttatttttagaatgtgcatgttccatccgcacatttgtggcaacaaattgactttttctgggacccaaatgttgacaaaaacgctgacgatgtgaggcgttttaaacagatgcgctggtgaaacagaaactcgggccagtccacttggcattttatacgtaaatatttttatgaaatattanaattaatanatattccgttgcggtaacttacctatgtctatgataaaa

SEQ ID NO: 17347 - DNA, 1771 bp, Heterodera glycines
  unsure (1)..(1771): unsure at all n locations
cggtgcaccccaaaacgtcgtcggccgaaacgtcgtcggaaaactttttgaaccataactttgttcgctgtcaatcaaattaagaattgttggtgttgttcgatagctctatgtgtttattattaattgtcaaaatctcaaaaattttcgttaagttttaaaaaagttatggccagaaggaactcaaaaacccagtaattcgaactttttttgctcagatttttttgtgcataaataaaaatttttgaaaatttgcaggctaatagcatttttcgaatgctttcgaataataccaagaatgtttaatttggttgagaaagaaaaaagttatggtcgaaaaattcgttcgacgacgtttcggctgacgacgttttgtcctactccgctattttcatacagtcaaagattgcacaatcgtcgagtggcacagttgcttacgattttctttgatgagctggcgtcaggtggaaaaattaaaaaatttgattacattttcaattaaagggctacacctttggtttacaaaacttgaaaacatgtggcagaaaacgttttaaaaaatggaagaatccatacgtatatttttttaaatttaattttatttgagtttggatgtttgagtataaaggaggtaaattaaaaaaacgtcgggatttcttctttccatattcaccaatgttttgacttttggtctttttcgccattaaaattcctagtgattaaattttgagagaaacaacgataattggtgaattttcgattttagaaaaattgacactacaattcggcacaaaacgcatttcgtgatgtcaaaacaattttgattggaactggcactgaacctcaagaagtgccttctccaggacataatcagtgaaaggctttttcatcgcaaagcaatccaggaaatggaaaacatcattcggctggacgtgcttagaatggtatggacgtgccgaagactgagtccactgtttttttgaaaaattctccaaaattatccgtttatctcgtattttaatccatgttttggtgttttttaatcaatataaatcccggcctttaatatatgataatagatttattaaataaaaaattaattaaattaaagattattgtattctttaattaaatttcattataaacctactcacaatcagatggcgttcaacggcatgttcgccaacattacttttgacggttctcagtcgagaatggactggtatctaaacaaagtaaaaaggcgagtcacggacatcattgaccatgttcagatatatgtatccactgaacttgtaagtcgctttttaaaagattgtcgaaataaaaaaataatgcaaaattcggcgccggaccgggagacccattttcttgattcgggtccgggttttgtttttcacaaaaaaccaaaaatgtttatggaacggagcaaaaatcgaatttaaattaaaaataatattatctttaatgtttgtcattagaatgcaaaaaataattgaaataagtagaataatttcagcaatttatagtaacacttacccaacttgactttttaaaaattcaatacccggtgtccaacgggtctaaaaggcgtggaaaaatcccagtaaaagttttcatgaaaataaagaaagaaagaaatttttgaaatagttttaaatttttaattttaattatgaattcttttttnaaaatattatttgatttgnntaataacatcgaaataattttatttaaaaattgtaaaatgtaagtttattcatgnaatttt

SEQ ID NO: 17348 - DNA, 3178 bp, Heterodera glycines
cgaaaaactccttttttagtgcaaaagttcttcccttaaatgtcactattcgtcattagaaatgcagaaaatggtgattttttgcaattagtaaatccaattaaaaaattatccgtctgatattattaatattagtaatttcacttttcccttcattcgattggtcaccattttattcattttgttccttttctgttcatccccataatccattcaagctaaaaataagaaatatattttaaattattaaattcctttacattttcttgaagtatgagggggatgagttcttggctttgggtggatctgttctggccaacgttggaatggtcagcgtaacagcagcggtcgattgtggcgacgacgtggagggcgagggggaggaggaggagaaagagaaggagggatttgtgtggtttggggttatcagagacggcgaagaattggcctaaatatggctaaaatttaatttgaacgacttcctttgtattgctgcatggattatcataaaactgcccgagaattgaatttcaagagtctcgacaaagaccccaaaacctccgagaaagtctcgacttttctggcgagaccgattctttgagcggtgcccacccgccctaatgactgactcttccaacaacgatcggttgttgctccaaagttgagccacccacccctgttgctgctgctgaaggtaccatttgtggtgctgcaacattttgcacagattgtcccgcctttggctgcgtagcatcggccgaaaagccgccgaattgaaatggcatttgatgagctgaggaggaggaggagggcatcatccacgcctgttgctcccacgtcgttgttggctgtccgtggaagcaaagcatcacttccattccgccgtgcgccaacggcaccgaaagttgcgccggcgaacgaccacctggagaataagtgaatagagtggcatttaaaaagatgcaacaacaatttgattgtaatattttgattttaaataccataaaatttttatatttggttttttcaaaatcatacgacttcacaaactaaaaaaacaactaaattttagcattgacttcgaatttcaaaatttgcatttttgtctaatttcgtccattttctccgttttgtattttttttatccgtttttattttggtcatacaaaattaattatttttgaaaaataccatttttagcgaacaaatgtggacaaatttccctgaaaagttcagtgttttgctcttcgttgaccggcgatttgcatagcacgccgtttaactttaaatggtcgaaaatgaaattgaaaagtcatacatataaaattacgtctgatgtggcaaatatcaattaagttatttaattgcctcttacatttgcacagaattggttggccatttctttgaaatacaaattcataaatggccgatggcacgcactttggacggatgtccaactgctgaagcacatttggccaccatttgtggtgacaaaaagcgagaaaagaacaatcggtgcagcgaacaacagaagaaagcattgcattttgctatttaattcattttaaagaaataaataaaaaaagaaaatggaaaatggaaaatgttaatttattttattaaagcattttaataatatggaaaatttaaggaataattgtggcagccataatatgtattggccccgttcataataaatgcattaaatccaacaaatccgttctaattgcatttccatttttattataaaatgtgtttggccattaaatttttaaaaaattttatttttatttatttatttttctttggacgaatgtgaaaacactgtgcatttaacaataaatcatttggtgccaacatttcgttattggcataaatttattttatttacataagctttcactttttaaagtgtacaaactgacgaaaaactcggccaaaggaaatttttttttttaattcgtgaaaatttttaattttttaatattaatttttattcctttttaaaatttctcgaatattatataaacacatgttgtctactattgaatttttacctttttaaatttgaattaaaaggcaaatgcctaaaatttttgcgcacttcgattgaaataagcagaaaattgggaatggcatttttgtgagtgaaacgacgattaaaattgttctaatttgaattacattagcttattgtcttacgcaccgcaccttctttctccccttcatacccactacttgtgctttcggcactacaataatattgccgtggcggcatcgtctacgactcagtcacaacaatttggccaagttttgagttcaaactttttcgattacggttgacatttctttcttttctacacttttatgtattttccaaacttaaaatccatgaaaaatatttctttgctttaacaaatgacgctcaaaatccattttaaattgacacatttattcattttttgactaaattattgcaaattcatcaacaaaaactatgacaactgcagaagaagcggaagttgagaagatgaaaaatacttataattcgtttttttatttttcaatttttattaattaaatttgtataattttctaataattgcattttgcaatttgccagtttgtttattgataaacaattgattttcttgtgcgtcatcagaaaaccaccacttttttatagcttttgcaaatttaatgggcttttcattaataataatatataatatttttatcattatatgaatattaattaatatcattatatgaataaataatacaaaaaatcataaattcgctaacctaaaattttcactttttaataaaatcaagaaaatttgaaatcaacaattacatttttggcaaaatacatagcacatatttgaaatcaaaatttgattgaaaagctactataaaatcactttagctttccataaattaaaaaatcctccttaatttactggaattagaagtaaaaattaatttaaaagtttcagcatttttttatagaggaaaatgccatatttttgacaatcttttggcatttttagttcactttttagtgcctatttccacctattttgtcattttttgggcttttccatacctgttttggcacttttagcacctatttcgagatccattttgcaattttaggaacctgaaaacccattct

SEQ ID NO: 17349 - DNA, 3378 bp, Heterodera glycines
aaagttgacctaaattaatttcagtataagaggaatattaaacataaatttaaaaaagacggaaatttttttgaaatcaataaaaattgacccatttaaaaaaaatattattttcaaaatttcataatttttaaagtaatatttaaaagcaggactcccattacaaaactttcggctaaattttcagatcaataatttaaaattacaaaatttatttaaatgagaaaaatgtaccgatgatgaaaatcagtgcatttacacagcatgggatcaccaaacgcatctccattgagtgttgtgatgttgttgattcactcttgcgcactgatttattgcttaaaaaaatattaaaaataataaaaaaaaattctaaataggtaaagtacaaagaaaattccaatatatattggtcatagccccaactctaccataatcaaaaaaataaataaataaagtaaattttccaatttgtggatggataacattggctaaattatcaatagtttttcctcttttcaaaaaaggggataaatgtaatcctgaaaattataggcctatttctctaacctgctcactttgcagggttatggaaagaattcttagccaaaatatttacaacttcctcctaaaaaacaataaaatttcggaataccaatttggttttgttagaaataggtctacgacaagtcaactaataacagttgtgtagcaattataaatggaaaaaatgttgactgtatttatattgattttcagaaagcttttgactcagtgccccataatttacttttataaaaattgggaaaattggtataaagggcaaacttttattgtggataaagggctttttgagtaataggatttttcgagttaaaattggggattccttatcctcaagtaaaaaaagttacttctggcgtcccccagggctctgtcctgggccctttactatttttgatttatattaacgatcttcctgatgctttgccatcaggagtgaaaataaaataatatgctgatgatgttaaaatatatatatgctataaagcaagatctgacacagaaaatatgcataaagcattgcataacttattcgaatgggcaaataaatggcaaataaaagtttcaattcaaaaaacttttgtattatatttgggttcaaaaaacccaaaagaaacatacaaatttgatgggaatacaataaatgctgtggatacaattagggacttaggagtaaatattgataacaaattacaattttccggtcatgttaaccaaataacaaggaatgcgtatttacgtatgcgttccttgtttagaataattaaatccaaatcatctaagatttggattacgttatataaaacttatattaggcctttattggaatacgctccggaggtttggaatccgtctcttcaaaaaaatattaaacaaatagaaaagtgtcaaaaatatttcaccaaaagggtattttttaaatgcagccttccaccaattccatacctaaatcggttagaatactttcaactgccaacacttgagaataggcgaaaactgtttgatatctgttcatggcgcataaaattgtttatggccgaacagatctgaaactattttctatttttaatccctcaacgcgctttaacatccccttttacagatttaactcaaaatataaactgggcaaaaaattcattccctttgctgggagggtaacaaaattgtggaatcaactcgataaagaactaatcaaaacaaattctttaaatcaatttaaaaccaaacttagaagttcactagggtaataaaaccggaaaagctagaacaaaaataaactcataagtgatttggcatttttacgcgtggccctaattttgactttgacctcaattatttagttatttattttcacatattttgtctttttaattcctgtgatcatcactttattttatcacttactctacgacacattatctgaacagtcgtcagagtaagtggttttcgcccttctgatgacttttttatttttacgaataaataaataattaaattttataataaaatttcttcaaagttgcactaaaaatagcgctttatcccctcttaatcattttgaaaaatgtgcaccaaaaaattcttacgtacaaaaatgcggcctctttttttgcttcagcagactgtgcaaataaatttttctaattgaagttgagctcaacactgtttgatctttgattgtttgctacgaaatttagagagtttttatgctgtccattaatcttttcattttaaaaatgttaacaaaatttatttattcattcactccaaaaaattaaaaatattattatttgtatgtttaattaaactttgcttaattgagtgaatttaatttgtatacattttttattatttatttaaacattcaagaacaaaattgtttaaataatagttacttttttaattaaattttattttttatttaatttttattgtctaatggaaatgcaacactttgcattgggacgctcagcctttgaacataatgaaccgtccaataatttggatctgccaccaattcattcaaaaggtgaaaaaactcaattatattatacaaattatatgtacaatatttattatatactggcataaagctaaaacaatcaaaattacttaaagtttttccgaaatttttattttgcattatttttgactagggttcgagccccgcccccgtcacccccacccccgccgggggcgtgacaaatattttggcctcacccccgcccccgcgacccagacccccgcaacccccgcccccgtgaccttcacccccgcgggggcgcgtgggtgaaaaacacacccctaagaatggcatattcgtgggatataaggcaaaaaatttatacaattttgaattttttttaaccatcttgagaaatttttatgaaataaagtaaattttacgtgtgttttcttttatttgtggattggtggatagtgtttcaacactaacagtacttttgtcatgagttcgactccggctaacgttttcatttgtatttatttttttctgattaatacagggtttctttatgttcttatttctaagaaatgttctaatttgggggtaatgccttattttcatctaaaagaggaaaatttctgaaaattttggctaagttaacaaaattcatataaattcttaaaattttcccccggcagcgcctatcggcactgccggcccccaaaattcctatcttttttcttaaaatttagcccaagatcgcaaattttgttcattttttgtacaaaatttgttaacaaattgcattccaattttcaaaaaattttcccggcggcgcctatcggcactgc

SEQ ID NO: 17350 - DNA, 2823 bp, Heterodera glycines
  unsure (1)..(2823): unsure at all n locations
acgcctccaccccgtaaatgatgagaatggtgaggtgcacataagaaaacgggtgaggcaaccgagaagggtaagagtacagtattcgccagagccaagcccttcaacatctgcacaagcttatgaacaacaacaacaacgtgaactgtttgctattccgtcaaatcagctgaccatgactcagcggattgaacggctatacatcaaatgtaaccattatgcagatcgtatgggcgttcggggaaatacaattaataccgcaaacggcaaaccgttggcgcatagcaatttgcgaatggccatcaagtatataatagaccggagagcgggccgccccaccattaaaccaccaggagcgaacctattggaagagcggcttaggaaggacccaattttgtattcatggacggccccaccaaagagaccgtcacagagcaaaaccacccgaacggaacggacaatcaagaaggaatttcgcccaaaaaaatggagctgatcaacaccactcttgacaaaatgtacaatgatccatcatccccagcggcattcgcaggtgttacagcgctgtggaaagaggcgcgaaagaagattaaacatttacagaaaaaggacgtacagcattatttggatggtcaccgcacctacactctgatgcgccctcgcagggtgcgctttccaagggcaaaaactgttgcagcgggattcatgacagatgtccaagtggatttggcggattttcaagctctttcgcgccacaatcggggtcaccgctacctacttgttgcggttgatgtcctctccaaacgcctgtttgttgtaccgctgaaaaataagcgagccgaggagatgctggaggcattcaagcaactcatcgaccaaatgcccatggtgccccaccgtattttctccgacaaaggcaccgagttcaagaatcgattgatgaaggaattcttcgaggagcgggagattgagaagcatgagcctgtccattcatccgtaaaagcgtcggttgcggaacgagccattcgtaatgtgaagcagcgactgtaccggtatttcgcggagaaggagacgctgaactgggtggatgttgtacagaaaattgtggatggaattaatagttcaccctctcgtgttcacggtatgcgacctattgatgttgatttttcaaatgctcagaaggtgtggaaacgaatgtaccgtccactatcatttttcaaaaaaacgcccccgcttccgtaaagatgaatttgtgcgaatgagcagagagaagggacaatttgagaagggatatttaccaaattatggagacgaaattctcgagattgatgaggtgttgaaagcggtgcgcccaattcgatacaaattgcgggatgaacatggtgagaaattcaagggcagcttctatgagcaggagttggcgcgcgtaagaaaggacgcggagacaagctaccgtatcgagaaggtgtacaggaagaggaaaagaacggacgggaccacagagttgcttgtaaaatttattggctatcccaatcgggagtgagttcatgagtcccaacttgtataaaagcgttcacatttttcaatatttatgcagataaacaatcatgtcgaacagtttctttgtgtttttgcctagtaatgtgagtgattaccctgacaatcagccgaataaattccgtgttcggcttccaaaacctttacattttaaaggctcgtgggtgtgcggactgcacagtatcagttacccctactcatggtcaaccattggcacattggatgagcaatggattgacattcacttcaccgaccgcagagcgaccgatgaggacagacagcgagtgatcagagtgccggtgcctaaggcatcgcatagtagggttgaacaactgagagaatttttgtccgtcactttgagaaatcatagcggtgcaaaactacaacctctccctcgtgaggtggaagagaatcggaatcgtactacaacaaagcctctcggctcgccaccgcctttgaaaagacagaaaagagatacggtgtttgacgcgagtagaaaacagattgcccctcctccattgcataatgaaaatgatgacgatgaagaaattattgaggagtcaccacctcatcatgaagaagaagatgatgaagggccaattgaggagtctccaccgcattatgatgaagagcaaaatgatacagtaacagctcctgtcacaccaaaagtgccggtaccagcgcctgtcacaagccctgcgaaaccaacaacagtaaaaacaccagctactccatctgtaacaacaccagcgcctcccacaactgcaaagctgccagtaaccgtcccttctccaaccacaaaaccaataacaccgacccctcctcctaccacaaccacacctacttcaaccacaaagtcaacaaccggtcctctacctaccacaaccacacctactccaaccacaaagtcaacaaccagccctccacctaccacaaccgtccctccagcaatcacaaagccatcaaccggccctccacctaccacaaccgtccctccaccaatcacaaagccatcaaccggccctccatcaacagaaaagccaataacaacggtccctccgccgccanagacaacaacaacaacaagtacgccagcaataagtgcagttcctagcccatctgttaagccgacgattccggtaccgccggcgcaactaaaaagctcgggactgtctccaaaatcaaaaaccccaatttctactgttaagcccgccacttccagcgttcggtttccgctaaagtgggcactaggggtcaaacgccgcc

SEQ ID NO: 17351 - DNA, 2506 bp, Heterodera glycines
caattttttgaaaatttttacaaaaaattgtctctaattcgggattcgaaataggtcgaaatggatgtcatattcgtgatcagcgcctgcgaaaacccctgagttcacaacaaaaaaagctcggaattccttttttcaccttttttttgtgggaccagtaaagcgtacgattaccgggttttcggaaatcgctgattatgtcatatatttacaattagaccaaatgtgaaccaggtcccgaattctaacaagtcgaaacttcgaatttgataacttattatttgtctacgggttaagagattttttgttaaaattttttttggaggtgaactgacttggaattgcgctgatcagccaccgaacacttcaaaagacgacaaatgaaagggaagcgaaaattcaggacttaaaaattgaaaaaaattatttaaaaatttgttttggacaaaaaattaacggagtcgaaaaaaccgtaaaagtggtgccgataagggcaaacaaaatgttacacatcaaccttatatatttaaaaaatgctacaactgcagaggccatcaaaacatgatcaatttcaattcgaacgaacgtcggctgtggaaggaccattcccttctgttggcccatgcgtatcatttgcgttacaaagttcctacaaaataataattgccttttactataaactcaacgacccacctgacagtcgattcttccaaatgaccaggaaaagcgacgacccattgagacaaaatgtcggagggctccaaaaaccgaacagccggattgatcttcaaaaaaagattaatttaaaattgtttgcttttttcgaactctgtcctggaaagaggtgacagtgttgccgaatttgatctgacaatgaaaaggaatggggttgaaaaaatgcaaatgactcgaaacacacctttggcatttgatggactccaattttaacggttgactcggcactgagtctgacaccaaaattggccaaaaaacccgacgaagtagcaccaatctgtttcattgtcatttcaatggcagcataacgacgggcgggaggctgtgtattggccttaaaattcaaagtaaatttaaaagaaacataataagtttacactgagaagttcgcgcgaaataaattcggacattttgtcgatggtcactcgctgaccaggtaagatgataacacaagacattggaaacagtgtctacaacagaaaatgtggttataaaaacagttctaattttgttaaaataagaacctctcggtcctgctgttggcgaacggccggcaactgtccgtttatcggaatgttcttcttagtacggaaaaagtcgaccatagacatagaacgaccatcaacgtcaaaactaaaaccatgttttatttgatccataaaaccctcaaaacctaatctcggacatcttccgttgactgatcgcatcaatgacaatgacgcgcgacggtgcataggtcagataaccgctaacgccgcgaaacaagtgattgaagtgggaccagaatcggtccatctgggaagcattgttgatgttgaaccgtcttttctgcaccatctccatgacgatttcctcaagattacgacttgcgaagaatgcacaagtcttcactaaagagaaacttaagcactcaaccaacaaaatacaaagtaaaccgtcagcaaccaaagccgcctttggttcaccattgttgtcaatgacgcgaactcccttagcaataccctcgcgcgtgacaatgccatcttcgagctctttgcagatctgacgcttaaaaagacgaccagcgccaatgatgtcatgggtcccactaagaataaacttaaaaaaaattaaatactgctaattacgcattgagaaatggctgggaagacagcatttcaaggaaagtccgcaaagatctgtccgattgttgatcaggatggtgcgaaatcgaagaaacaatgccgttgagatccagctcatgcttatcagtctgacaaggcctaacctcaattttgactggagacccacgcaggaaatcgcgaacgattccttggactttttccgtgtcaatttccaatgcctaaaattatataattacataatgttaaaagacaaaaagcaaacaaattgttcgattcgtttgttcgtgaataagattttacggttgtcgtaaacgaattgtgcctaaaatgaaggtaaatggtgaatgcgatttagagggaattaccgcttgtccaaatccctgcgtcgagtcgtgcacgaacttgatcaattcaaaacaaacgccgcggagcaatccatttttcccatcgtcgccaccgcccgaagtcaaacttttgtttctagtcagttgcaccatttcaacatcgtagcggaatgcaaaagcaccgccatgtgaagatggtcgggtttcgaacctaaataactttattgtctcaaaagcattaaactgcacacatacacataaacgcttgaaaacccttcgacaaatctggtacaaactgccgga

SEQ ID NO: 17352 - DNA, 620 bp, Heterodera glycines
agagggaaagtaatgatcggagagagtggcaaagaggaagagggaaagtgatgatcggagagagtggcaaattggaagagggaaagtgatgatcggagagagtggcaaattggaagagggaaagtaatgatcggagagagtggcaaagaggaagagggaaagtgatgatcggagagagtggcaaattggaagagggaaagtgatgatcggagagagtggcaatgatcggagagagtggcaaattggaagagggaaagtaatgatcggagagagtggcaaagaggaagagggaaagtgatgatcggagagagtggcaaattggaagagggaaagtaatgatcggagagagtggcaaagaggaagagggaaagtgatgatcggagagagtggcaaattggaagagggaaagtgatgatcggagagagtggcaatgatcggagagagtggcaaattggaagagggaaagtgatgatcggagagagtggcaatgatcggagagagtgggcaaattggaagagggaaagtaatgatcggagagagtggcaaagaggaagagggaaagtgatgatcggagagagtggcaattggaagagggaaagtaatgatccgagagagtgact

SEQ ID NO: 17353 - DNA, 1215 bp, Heterodera glycines
tgaatgaggaatagattctaaaattcaccagagatatcgttatgttgtggtgccgtttagaattaaaaatcaccaatttaagtgacaatacgccaaaatggtgccttatatcaatcactaagtgagtgccattcccttttatttgtgttctactcccttttagtttattgtgccatttctcattcaaatatgccaatgccatccaatttgaaagtgtgccattcccatccaaattgtgccattcatttccctctgccagccttccccccctccccctcacccacccgtcctttttcatccgatcggccattgtcgcgtcacttccacatgagcacattcccttgaacagtccgtccgtccacgacagaacaaaatccatggaagaagagaagagaaagaataataatattcaaataataaataagcgcagctgaaaaaacaaaaaataaaacaaacagaaaattattattttaggaaaatgaaaattaatggtattataattaattaattaatgaggatgaacaatcaaaaggcaatgataatttaaataaaaaggggaaaggcaaatggaaagtaaatcggaccaatcaattgattggccgcaatgatcagatgaaccaaactaattagcgattaattgattgattagggagggcattcgaacgatggcagtgacaaatcgacagtaaaatcacagtaacaccaatacattttgagcattatcttctgccatttgttgttgttttggcgttttctcgcctaaattctttccttttctctctcccactaattttctgtaaatcgcctcgactttctttaaatttgggctaattgttacaaaatatctgatgttttattattttagatgatattttttatataatttctaaaatgttgcaaattattattgggtgaaagctatcccattttttaaaaatgaaatatgagtgaaagttaaaaaatagggaaaatgagggaaagtggcgaaattgggggggggggggggagaatattttatcagataaaaaggacaattgggaaaacaaaggaaaaagagacgcaaacacaaacatatgatgaagatggaaatcttcgacgaaagggagggaattccgaggcaccaaaaattttcgaaagtcgaaatttttcaaaaattttaaatataataaaaatttttaaatgttttattaggctaaattttaaaattcttaacca

SEQ ID NO: 17354 - DNA, 1216 bp, Heterodera glycines
atcagcctctatctccccctccctccgctccactcttccgtccctaattcccttcatccccccccccctccctcctccctctcccatattttcccaatttggttgttttgtcactgcttttgttgtctcctcctcttctcacttcgttgtcggttgttcctcattacgtgcaaatagttaattatgtactaatttcgcctcgtcactaagtggtcttcgtgttcacaatcagcggcagaaaatgacgcggacggcccgcggggggagggaggggaagctgtaacagcgttttgtggtggtataaagtcattggcaggtgcagtgaacgaaatgggcgggggtggggcgggggacattgaatgactcggctgggacgacggacggacgtggccgcgactgtctccccaaaagatgattatgatgtgaaaagatggatggaaaagagatgagatgacaggtgatcatcatcactctgtgctgattagaccaaaagcaatcggatgaactgatcaatgggaggaagggggggcgagtgggataaggcggcgaagttaaagtttgaaggccaagtgtcactctgcccattcgtctgttgtctttgcttttcccatccgataactccgtccgtcactcttccgtcgaacagttcatcccttcccttctcttctcttcccttcattctcttcctctgtccgttcctccctcccttttctgttccgcccgttcatttgcaccgttttcttcgcctctccgttttttccatttcatccctttcaccgggtcttctcctcccccttcattcaattcattcattcattgcgtcaaaaaaggcaactcctcactgacaaatgagtgcagcagaagacgaacacaacaaactccctgctgaactcactctccccacaaacttcacaactcatcatcatcatcatctcctctcatcatcacgcccgatcatttcatctctatccgatcatttctccttttcctctttttggtgcttgtaaaattgttttgagaaagggcaaacgaagtaacaaataaactggttatgggaaggatgggcttttgggaagaacgaaagcggtggggggagggaagtgagaagggaacgctgggaaagggaagaggatcatcaaggtgagggaggaagagaagatgcgggagggaagaggaggggaaattgagggaaaaacataaagggtgggggagggcg

SEQ ID NO: 17355 - DNA, 3493 bp, Heterodera glycines
  unsure (1)..(3493): unsure at all n locations
atgcctaattcggtgtcatgacaactcgtacaaaaggcaattcgcaatgtcgtgcaaaggaaaacgtacaattgcttaggctaggcctaggcttaggcttaggctcaggctaagctataaaatanaatatgagttgccttttgtacgagttgccattgacccgcaaatttattgaattattatgaatttcataaaacatggggagagggtactgtactttatgaaaactgtactttttgtaaagtctgtaaatgatcggcttaaattttttcaatttttttgtccaaaaaacaggaaatattttttctcttttttgtgtgtgccctcctcctcactttgctggtgagagtcaatttaaacgctattcatccctttttggcttaatccgacggcagtggcggaatccggaaaatgccaaataccaaaaactgtgccaaattcaatttttgacacaccatttttcatgtggtggccggaattttaaagcattaattttgatgctatcattttaaatatgaaatgttttagtttcattttgcaaaattaatttaaaattaaatttttaatgtgattttcccatttttaatttattttttaaagaaataaacgtgtcgccaaaatggcatttttttaaaattcgaacacattcctttttttctcaacagacaacttaccatttgatgttcgacacgtgctgtgaaaagtgcgaaccatcggaggagtcggtgaagttctggtccgaattcatcgagtacatgtgagttttgggagttcaaaaattaatttcgagagtctcgagagcctttgctttgattattttcaacaattcctgacatatacaaaagggttttcaatgaaaaaatgccaaaaatatcgtcaaaaatttcgggaatttttctatatgaatttaaaaaaattatctcatgctaacataagcccggaaaaaatgcccgcatggcgctcagttggcaaaaacgggctttttggcatgccgttgtgcccgccggcatttgcctttatttaaattaaattataaggctatgagtagaaaaaagtcgcggatttttttaaatttttttttcaaattttttcattaagatatttttgagtaaaaaaaaaaatccatttcagtactaatgagcctgttcgatctcgacttttttagactttttaagcaccccaattttatgaaaagcccaaaaaggcttttataatttaaaaaaatttttttgaaattcgctaaaaagaatttttaatgactataataaaaactcaaaaaaattaattgttcatcccaacgaatgacgaaagaattataattggccaatttattttattttgccaggatgggcatcattgaagatgacaaaaacatctacacaccagtgctcagtcaatttccacaagaattaaacggtgcaattctcgaatacatttctaattgaatttttattttttttaattaaaatttattacaaaattccattcgttttattaattttgaattttttttagttggccaactgtccgctgcaactctgtggaatttgtataaaacggaccttaaagatgccttattgggtaattttcaattttgattttttcacaattttttcctcgtctcagagcatgccaaaacgaagcgatgcaaaacgccagattatatggtacgggcacgaatttaaaaattctttttacattttaaattaaattttttgcaaattttagaacctctatttccgtgtcaagtcattctactcaaaatatgtggccgaactgccccaatacaaagaatccattcccgaatttcctgagtgagttttgcggaaaattataagtaatttttaaaaaattaaaaaactgtaaaaaacgaaataacaataattaatagggcgtcaattttctgtaaaaattgtttcgaattcatagtttaacattttaattctctatttaactcccctttttattaaaaaaatgtataaaatggtctaaaattaatatttaaagcatttataattttgcaattaagtttggatgggaaaatgagaaatttattaaaaaatgatttaaaatttttcaattttaattacattttgacatattattgcttattttgttcatattttagtattctatttatttttctatcgttttcattaattttcaattagcttttatgtttagattgtttttttaaaatagattatatatttttaaaatgctaatttaaatttaaatttttaatcgttaaatatttaaagaatgatttttaatttttctgccaattttcaattatcataggtatataaaattgattttttaaattagttacatatatatttttaaaaaggttaatttaaatataaattcttaatcgataaacatttaaaaatggaatttgaaattttttcagcccttaaaatctgtgccaaatgaatttttaatgcttcaaaatgccacccatcgcattttgtcccttttttcccgtgcattttcctctcttttctaatgagcatcgaatgggtgggcagacggaccaaaaagcttaaaaataaaacatttttctccactgtttttcccaagcgacttaatttgacgattttggctttttcgcattcatttcgacgatttttttagtaatttgaaatggcaaaaaaaaaacacaatgccaaaaagcaatgggaaatgaatttatgtattatttggaaaattgaattagaaaataagggagaaaattgtcaacattccaccatttgtttttcattgtttatgaattaatgagttttcctcgcttttttttacttttggcattctgtccatgccaaaaatcaattttgttcactttaggtggtttgttccgtttgtgatggattggctaaatgagaatgacgaacattcaatggtgaggcatttcaaaatttaattttttaattaaaagcaatttgaatttaatttaattatgctttttaattttttttttaaattaccaatagtaataataagaaaataattgtgcctaaaatttttctaattcatatcaaacaatttgaatcataattcagtatgttaattatttaatcaattcaaataaagtaattaaaagcaattaagaggttcatttgactaatttttaattaccttattataatttaataaattgcttattgaataatgtctataattattaaatttagttctaatttggcaccatttaaacaaattatttcatatgagttttattgtttttaaaaaaaatttaatttaaaatttaaaaaagcattttattcctaattaaggatattttgcgaaatgcatacaatcgggacaaagtggacaatttcccacaaacatcggagcacaccaaattcagcaactccgtggtggacgtgttcacccaactcaacgaggcgcttaaagtgctcaaacaggtggccaatttcaaacatttgaattcattggcaattttaatttttagcgccgcgaaaatttattt

SEQ ID NO: 17356 - DNA, 1626 bp, Heterodera glycines
  unsure (1)..(1626): unsure at all n locations
aaaatttcgattttttgcaatttnttgtttataactctttttaataattgtctgatcgcgaagcaatatcttagaaaaagtttctaaacatattaagctttcgaatgataccaacaatgttggatttggattacaatgaaaaaagttatagtgggaaaacatgctggcgcccaaccgtgcgcgcccaactgaggtagaccggatctcgacagtgttggtttcgacagtgattgatttcgacagtaaagcttattttaaaaaaatttgttctatatggcataagtctcgttaaattgtgacaattaaaatgataagaacatggctcttatacttgcagaggggttcgagattttcgaattcttgcttaagagcctgcagatttgaattttggcacacaaacccggcattagttagcagattttcccacacgatttgagaatcttatctacgaaatttgttgtatttttgactacattacagcaggagagatatttgtatagaaaaagtgaaagcgataaattttttgcaaaaaaatcatacaactcttattttttattacttacttcaattataaattttgttatgcaaattgtatattcatataaattcatgtgtacaataaatcatgtagaaaattaattaaaaagtactttcgaaatcaactactttcaaaaccaatcactgtcgaaaacacctgctggtacgcatactattaccggatttttaacgaaaaaattcaaaaaaaaaaatgcgtacgaagtgccaatctgttccgcaaagatttttaaattttacgattttgttaagaatagacactcctaggctcactcatttctttttctcggtctcggctctcgttttttgctaaaaaataattaacaaaaaaattctttgtaaaattattcttgaatttgcagaaaacacccttcattcaacgaagccgtcaccagggatgtgcgaaaatcacaaaaaaaaattttcgtatacgaaaacgaaacgaaaaagggcattctatacgaaaacgaaacacgaaacgaaaaaagaaattttgaaaaccgaaaacgaaacacgaaacgaaaaaattttgacggacgaaaacgaaacacgaaaacgaaaaaatagccattttcgtacgaaacgaaacgaaaaaaccgaaaattttcagaagcagatttcattcatagtcaaacccataaagcaataaattgtgatgtaaaaataattgtttttccaaattttctgacgaaagattcttccgtagatcattcagcatgaaagtggcagtcgaaaagagtcgttccacctccattgtacccataggcgcggaatggtatttgcgaacaaggggaaccaaaagcgaatattttgctaaattggttggttgacgccaaaaaacagccgatgtgccctcgaacaaggccgagttcaaataatcggaaacttgctaaatttttgaataaacgataagacaaaaaataaataattgacattacccctgcagctcttgctttggcatcaattagcgacggcgtaggtgatgggaatgcttggaaatacaaaattactgggggactggtccataaggaatgttttaaaggggccgcgttttcttcttgaactccaaat

SEQ ID NO: 17357 - DNA, 1009 bp, Heterodera glycines
  unsure (1)..(1009): unsure at all n locations
atccttgaaaatgtccatgtaagtgtggtcaaaatattgcactttgtatgcagggtcgagaattgtagccaataacaagtccttattccgctcccaatctatacttaaaaattacggaattttccagaattaatacaaaagacctttcattctttcctctaaagattcggcaattctttttctaatttctggaaaatcatccacagccgtccagtgtgtcaaattttgtttcaaaactttgtataacggaagaacaccggaaataccgcttttccgattctgaatgtgcattgttgcgcgataaattggttggagtattttgcataacgttctcatcattgtccactcggtactggtaaaacaagggaatttggcatcttgggctggcatcatttcaatggccgatttgttttcaagaaaacggctgaccattaaataagttgaattccaacgcacttcgacatccttaatcatagattttgccttgttatttatttgaattttattactttttgtaaagtttttagtggaagatcattttcaatttgcaatgctttgaaatcgtcagcaattatgcgcgattttattatgcgacggattgcttttttcattcgttcctttacatcgaaaaacccaccaaggagctttaagccatctccaacagccttaaaatagccaaatatacacaaaattaaatgtattttatttaccaattgaattttgtgggcaaaacattgcatggaattataaccgagcaaattggtcgccaatttcatcgcactttcgtcatcacgtagaatcaagtgcaattttttatcagtaatttgataagcgttcaaagtcttaaaaacacagacatacattttaagctttacccaaaaacaaacttttgaaaccatgttggaaaaattttggcctgtatgacgacctatcactggcatcgccgcgagcacaacgaatttaggttcaagaagacggatccanaaaaatggccaattataccaaaaat

SEQ ID NO: 17358 - DNA, 2556 bp, Heterodera glycines
agaagccccgggggcttataatcgaggaaatacggtaattagaaaattttccaattcttaggggtgtattttaattatacgccaaattaaaaaaaaggctcttaccatttccttttattgaccgaaatttcatagtaaaaaatgtcagacgaataattattgttcagcaaaatcggatgtttagcgaagacggaacaccaagcttttgagaaaaaatagctacaaaaatttgttcaaaaataccacgatcttttcctttgtaatgggcagtcaaacttttgccgccaatgattttgagatctttgtgacaagcggtgccatcccaaaaattttgtcggaaatttaaaaacacctttaaataattcattaaatttattaaataattgtttaaattttaaattattttttgaaatgaattattcacctttctctccatttcgttgattttttccaaaattttcttctgatcattttgtatttttgagaattgatctgaatttgtttaaattagtttttaaaatttaaatttaaattgggcaattaataaaataaaataaatatcctttacaaaataactttttaattagataatttattcttagctaaaattccctcgcctttggtcgtgtttacgttctgtttctccaattttgacaattgatccgcgttagcttaaaaaaatcaattaaatttaattatttaaaattgtcaatttattttttgctttaattcttctcgccttttgactgctcattttgcttctcctccaactcattgattttgtccaaaattggtttcatttggccggcagaaactgaaaagtgctaattaaaacaaaaaattatcgccttttgttagattaccgggacagctaaaaaatcgaaagtccaatttttggatttaacatttttggttcaaattcaatggtttcaatgcacagaaacaatctaaaagccataaaccctgcaatgaaagatcatttaagccgttaacaaaattgctaaacccgactttttgcatgaattcgggttccgagattcagattggtcgaaatgaatgccgaattaaaaaccaataaatgaaaaattttgtaactttttgaactgatcaacggatgcttaaactcggcaaaatatttgttctgtttaaattatattttttgataatcccctaccgtatttcccctgctgctcattttgttgcttctctttttccttttccatcatgtcaattttcgcctgcaacgcgtttcgttcagccatcaaattctgtttttctaattcggacttaagcgccctctgaaaaaattggaaaactgaataattaaatgaataattttaattaaaaacgacgaacattctcgagatccttcatcttacacaattgtttcgtctccctgagctccgtttccatcttggcacatttctcacaaaattcctgagaaaagttttgaattttcaactcagaaaaaactccacaaatcgtgaaaaaaacatcgtaaatcgcgagaaaaaaacgtcgtaattcactgatcgcgcgtcgcggtcgcgtcacaccactaatgtaaacaccacttaacaatgcgattcgcccaccttctgttgctgctgctgttggtcatcaacagtttcgattcgccccgcattttcctctgattggccatccgccatttttcgtttcagcaaattgctcattttaaaaataataaaatagatcaaaatttgagctgaacaaaattaaaaattgtttctgtaccaaatttatgttatgttaacaatcttttctgaattttcataaaattcccggcgatgtcttttggcaccgccggcggtgccgggacgaggcgaagttaaatttaaatgggaatggggaagacattcgaaaagaggcacgtacagggacggcgagtagccttttatattctatggcaaactcagtcccatccattttttttctaaaatatttagcgtgaaattttcgagtaacgaaaagcgaaaaaagttatttttatccagagaaaaaaagctttttcttcacaatcagtgaaaggattatgcgcgttttgtgtgcgtgtgttttgttatttgaggaagtgtctgaccaggcttaactttcgaattcgtttgtctctttctctgcactcatcttcttttgtctcctttttctaattaacaattattattttctctaataccggtatgtacatatacaagatgatccttcctgatttttgcttttcgaatgaatttttttttaccgaattgacaagcatcacccgtttttagaatctaaagttgtatgtaccaggaatggcattccgaggccccaacaatcggggttcggggtcggggtttttcaatttttgccttataccatatagtcaaaaaactttatattatttttttatacattaataatttatgtgcttttttatttcataattattttagtatagaattaattaaaaacgcataaggcatttttaaaatggcaaattttcagtgaaaatctgtaaaatagtcaaaatttcaaatttttcctagcccgtaaaagagg

SEQ ID NO: 17359 - DNA, 905 bp, Heterodera glycines
aacaatttttgtcaatttgcaaaaatgactccgatttgagcaaatcatccgcattctcatcaatataacgcaagcaatcgttgacaaagttctaaaattaaaaataataataatgattaaacgattaattaattgtgtgttattttatcattaaaaaagtaaattaatcgttgaaagatcaatcatccaaagaacaaatttaaaaataatttaatgcgaaaataattttaaaaaatagttcaacgattaattgtattgtttattgtcaataaagaaaaaaaaagtccaaaaagggaaaaatccgctcacattaggacaaaaacaaaaattaaaaagtcctcaagtaattgcagaaacaattaaggaaaaccatcaccgaaaatgtgaaataaataaaaggagtcaaaggtaaatgaccaaacaatttttaatattttggctttgatttttccggtctatttaattggaatagaaatagttgcccgccctacaaaagatataaattttttgcaaaatttgatatttcgcattttgaaaggatttaaatttgtatcgatgaaaatgcatccaaataacaaatttaaaaataattagtgcttaattatttaattttcttcccacctccaagtcgaaaagccgagcatgggcaaacgcgaagaaaacattgcgcaatttggagatgggaatttgcaaagctgcgtcgaccagcgcagggatgttgtactttttggctaattgcgagaattcaatcgattactataaacggcgagaagatgccggatgaaaatttttaaaaatcaacgttttggggtcgaaaaatgagcgatttgaaaaaaatttcgtttgcttattttcgtgccgggtcgggaattccgtgccattttatcccttttttcaattttttg

SEQ ID NO: 17360 - DNA, 1443 bp, Heterodera glycines
aaattggaaaaagacaaattttatacgcaattatttttctcaaagcatgaggggacaacacttaggcccatgactgtattttctttaatttcaataaaagagataattgcggaagggtattttttatcctaaatcaatttttgcttaataaaaatgtttttaaaattaattttttccccgtgcctgctgttccccggcgaatggtcctctccccgtgccccgttcgagatgatcctccccgtcaacattatcgcattttccgcaatcccagtttggagcattaaagacccattttttaaagttttagtttgaagtgaaaaatttcaactgatttttagcttttttgtttttataaattttatatgaaaaaaactcataataaaaacaatgatgatcaattaattataggaaataaataaaaagttaagaaatgaaaacattaagtaagttaattccctagagattagagcatcaaaagaataataataattaaagaacaataattaagggaagatgaaaagaaaaaagacaaaaagcatagcgagattacgtaatttatttccttattattaaattttggttttctaccgctaatcgcggtcataatcattagccaactcattagcaaggttgtatttgaagtttggaccaaaatatgctacaatttcagcgtggcggaagggcagcgagacacacggaaacaaattgcaaacggtgcggacaaaaagtccggaagtatctgaaaatttaaaattttaaaatgaatttggacgattaaatttaattgttttgtgatattcctacccaagcgatgcccattctttgtgtaaatgatttggcgagtgtccaaattcaccccacacccgacaacatctccagcagaaaaagatggcaaatcaccggacataaaccgacgattacctgtaattttcggagagataaaaggcaaattgcgtaaaaaaataattttaatttcagtaaaattaccagaatggccccagaaattggcacaatcgaataggccagtgccgtaggcgtatgtcccattgtaagtgccgaccatttcgtttaatggcatttgctcggtggcaagtccaatggcaatcctactgtaaaaaaataggtaaaaatgttggaattcaaagacttgcaaaatatcttacaaataaattctcatttcttgaagggaataatacggtaattcttttaatattttaattgcgaattttgcgacaaaaagtagggttgagcggtaccggtaccggtaccgaccggtaattaccggtttttttggtaccggtaccggttttttcaaaaatcaaagtatcggtaccggtttgtctagtaccgatacagccggtaaaaatttgccctggtaagaatgggggtctggatggaaaaaagagtagggaatggtgaagaaggagaaatttttgacctgca

SEQ ID NO: 17361 - DNA, 885 bp, Heterodera glycines
gatagaatattattcatattttctttacgcattattttaatcgaaattctaattaaaaaaaatattccaactctttttctttcattttaagcatcttaaaaacccaaaaattaatcaattggtctttttttacaaattctgttaacaaatcgcattaaaaaatacaaaatttttcccggcggcgcctatcggcaccgccggccctccttgttccccaaaagtcttgagaaaaacgtgccgcgaaaaaagcggtgttgaaagcaaaaaaggtcattgatttacattaatttacatggccggagaccccttcgcaaaattggaaaattggccgctgatcccttgttttgcattaatctgaattttgaggtctacatctgaattttagtgttctttatcctgaatttgaaaaaaaaacttggtcaccctcaatatacatatacttctgaacaattctaatgctaaaaaacaggcactcgcgcgaaaactgaataaaaattttgtatttgaaaaattttgtccaaaaatttttacgttggaaaattaccggtttttaccggtaccggtaccggtggaaaaagttggtaccggtaccggtaccggtttttgcattaccggtcagtaccggtaccggtttttttacaattaccgattaccgctcaactctaacaaaaagagttagaaagcagacactatgccaaataatttcgtgaaataaaattgcaattttctaagaaatttcgcataaatccttaggcattataacgtttaatataaaattataggggtttacaactgtaacgcaccaacgattgaggtcacccgtgcataaaattttgacttcgacagtagaaaattccccgcttcggaattggctgtttggccagc

SEQ ID NO: 17362 - DNA, 3537 bp, Heterodera glycines
  unsure (1)..(3537): unsure at all n locations
agtgtccataaatttctataaaattggctgaagaaactcctcgaggngtgataatttaaaaaattatcacgtcatttacctttaaattttttatcaatttcaaaacatatgagaaaaatttttgaaccctttgttaccaagaaaaaccattttatagaacagtcgaaatcattaatttatatgattttttttattatcactaaaagtctcaaaaacaacaaattaaactaaggatttatggacattgataaaaacggcacacgaaaaactcattcttcattgtcaggctaattgtagactaaaagcaaaaagtaaaagtttgaattctaaattttttgttcaaattcaaagcccgtaaagaatcgcaaaaatttggcagtttttaatgaaaatatgttaacaaattgcactgaattttcaaaaaaaatttctggcgacacctagcggcaccaccggacgccgcaaaaaaaaaaggtcgtcaatttcatggctggaccatttcgcaaaaattttggttgacccccccccctttttttcatgtatgttggtggaattgtcatgtaactttgtgtttcccctttaatagttgttgcttggtgagctcaaaacagaattggatgcgttcaacagcagaaccaccggcagaacggagaatggcactgttaagccatcgctgatttgcgggaaggaggaggaagagacggagcaaatggccgagtcgaagtccgaattgggcgacgaattgtggacgggcatggaagggcctccggtgaaggaaatgaaactcgagacgagggcggaggaggaagaggacgagttcgacgaacagtttctgtgagtttttacttttcatcatcgtccgtttacactttccattttttcagaaacgaacccaaaacaattccaatggacacagaaacactcactgccgcggattctctccgctcgcatttcggctcactgaccaaaggcaatcagtgccttttttattgcacttttgtaaatatttccgtctcttaggaatttcaaaccgaatgcatcgttcgtctcttctcagtgcctgggaaccgccgacttcgtccgcatctattctcaaaaatcccgaacaacagcagccttcccttttgtcggacattacagaagtgttcagtgcacaacaaaatgtactcggtccatcgacttcaattgggaaaagtgagcgaatggccaaacattgcgacaattttccattttgttttaagttacggaaatgactcacaatgttccgttccaattcaacgccaaagttaccgttaaagagctcatctcccaatcatttggagagacaaaaggcgaagaattggccaaaattgtacaagccaaaggcagaccaataacaatggcaaaagacagaagcaccgaacagtccaataaaagtggcgaaactcagaggcaggacaatttgagacggaaatcaggtgggaattaatcgaattgcttagttgtgattttgaaagaaaaatttaaaacagcaaccttccgattttcagggttggccaacgctcttctgccttccccatttacggatggttttgctggttcaaccaacaaccgattgacttcccatcgtatcgcttctcccgcctgcgcttcgacttccaattctttgtcagagccgccgtttgaggaaaatccacaaaaaaattatgaaatggtcttgacttcgacaccgtcgacacagtcactcccatgttacgaatcgctgtcggaggaaagcgacacggaaacgggcggcgaaggtcagtgtttaagtgcaataacttaatgacatttgatgccattcccccaatattgcttaattcgtttccacaattctttttttcatcctttggtgttcgtttgcagaagtgacgaccaaaaagagttcctccgtgctttgttctgcttcagtcgctgctgctccgctgaacttcttctccctgttggatctgatggacgaaaacgaacagcagtcgcagcggagaatggaggacgacgccaccgatgccacggtcgacacggccccctctttttccactgtttcaccgctgcaaaaccaacaacaatgcctttcattttttgcgacagcggggcaatgggcggaagccaacaaaagggacaaaaatgggaccgaacgaggggaagcggcggaatgcgtttatgagccgctgtcagaggacgaaacatgacgagggagaaaacgaagcaaatacactcggattagtcattcattcatttgtggcaacttatttccgttaaaaatttatcaaaaatggcttcaatgagaaagacagacaccctttaacagtcagttgtttatgccaattgcacagtctaccttcatcccccctccctccaattgacatttttgaggctttctttttgcccaaaggtgcaaagaagccaatggcaccggcattgatagcttttccatcaaaaattcagtgtacaattgtatctgacggctaatgcatctgctgcttaaaatacatctgctgtccctctcccattcgcactttcttcatatttcatttgccagattcaattaaggccatgcgaagttttggcggaactgcgcctcaatgggcaattaaattattccatcatttgtcagccatcattggcttatttacttggcttttcctttccttctcgccaaaagtgatgcttattcactttataaggtgaaaacaatccgctaaatttggaagtgttaggttccaattaactatttgtcctccttcgacttggccatgtctttggccctttgcgcagctccctttttcctttttgctctttcttcggcttctcctcccttcttggccactttcaacggttgtccccaactgatcgatggccaattgctcgactttgttaactccgggggcattcggctaacaaaaagcaaaacggggaattgcgatcggttgatcagctgcgatttgatcggggctccagtggaagtgagtgagagaaggaaaagggacgaaacaatgccaattgatggcactacggttcagctaacaaaagtcgaatggtacgtaaacggaaggaaaatccaacggacgaacgaagggacggaaagggaagagacagcggaaaacgcacaatcagaaaacgaacggacagaacgaagcgcaattggagtaggcgaggcgagtcgaacgaattttgagggaaagggaagcaatttggaggagtaattagcgccatgggcaccgtttctggctaaacaaaactccaaaaacacaggcactttcccattgtgcaggtgagtcaccgtttctgtgccgacaattggctcgttgatgagccttcgcttaatgagaatggcatggaaatggaatttcgttgtgcggcgtcgttggactgcggcgagcaaaacatcgaaagcgaacctttgctttttgttggcactgcagggcgaagaaagcgcactgcaagtgagcacactctggggaatacactctgcctttttggcatttgccctccggcaattttgtttttgccctttttctc

SEQ ID NO: 17363 - DNA, 3603 bp, Heterodera glycines
  unsure (1)..(3603): unsure at all n locations
tgagtgcttcttcgtattcgatgagtttcgctttcaatatctcatctctgcgctctttcctttcggcataaacatctaagctctttcgaataaccggcgcatccttctcaccgaagaattcaattaggaccttgagtttttttttgattaaataataattatggttaaattaaaatcttacatttttgtctccgctgtcaataatttcctgccaaagctcctcttccggaggcattttcccaaagattcgcttctcccactctatcacttgctcgggagtccatttctcaacttcctcgggtgacggatcggtatccacgtcatcgtcatcttaagttatgcaaaattttgtgttatgagtaataaataaaaataaaataccgtcatcgatattttttggaaattgtttgttttttgatgggacggacattattaataaattgtttgaaaatcagaaatgaaaaaatgcaactttatttatattaatattaaagtgactaaaaatgaatgaaaatctgtttttatacttgttaatgtttacttaacctatattcttaactattataaatagcagttgaatttcttttttttcattaatcatcttttacaaaataattttgcaaatttcctctataaaattaattaatataaatctagattaattagaaaaatggtccttcttgctgaaaaaattgcacaaattttgaattgtcgaattaatgagctccgtgatcgtctaaatcatccatcggattgtgaaatagttgtgaaagcattctatggaaagcatattcaaacaacatacaaggacagaaatggatacaccaaaacttggtttttgggggtattactgcgcaaggagctgcaaccacaatggcatatgggcgattaggtagaccttacaatgttaatgtggcggcacatttctacgttcggcaccgtattaaacttcgccatccatttcttcattgtgtcatcgaacgctttcctgaaggacaagaggatcgattttatcctcttgagttatgcaaaattgaggaagttgatgaatcaaaatggcttggtcagattttcaccgagattgacaacaacaatattagtgcaactaattcaacaaattttgctgacactcaaacttcaaatgatgattcgaaaagtgttgatgggcgcgatgaatatagccaaaatgattgctactctttgtggtagattaagcattttccattttgtatcttctctctcttaattttgccatttttcacccaaaattgacctcttctattcctaatatttttcaatttatatttccatttaaataaatttttctttttcaactttatgcaacgaatcaatgagtggaataaccaaaatcaagcacacgaaaatcacgagagcaaacaatccctttgccaacatatggtttatatattttttgaagtggtgcggaggtgacattcccatcttttacaatggggcgtaggaaatgaggatacaatactttgattggtggtgattttccggtacgtacaaattctaagacgcgagttttgaaagtgtcgtaacaaagcccctgatttttggtcacatcataatttagggttatccctctaagtttgagcacgtagttaaactcattttcgctgcccttcttccgaagcttcagaccatattgctttgctccaccacttataaattccaaaatgtcatgctgaatttaaatttatttctttaaaatcaaaaatcaattacctttggaaattcgtccgtaaactcacccaagtgaggacccgtctttaaaggatttgcgccttttgggtgaacttaaatcaacgaatccgtatcttaaaaaatttaattttttcattaataaattatatttaccagtgtataaaatagtacaaccagaggttcgcgcgactttctgcattgcttttagcaagtgcagccgagctgcagaagttgtgaaaagtgaaatgacaacgttggagcaggggtgttcctgaacccaatccttcttctgattgtagctgattaaaatccgctccggagttaacatgtcgagcccagtcacttcgatcctccgattgtcaagataatttcccagctctgatggatcatcagttataaaagtttgagagagtccgtaattacggagggaaaaacgaccccctaaatttatcattaaaaaattttggttttttatacaacatacataaattgttcacagctaatttggccaaggctcgcttccccttgtttggtatcatctttgctcggtcaatttttatgtcaaaattttcccgacattcctttatgaatcgttcctcggcttcaaaatttccgcgaatttcttcatcaaaccctgatgcatgtaacttttggaccataaattcactcatgtagggtcgaaaaagttggttgtcacttttgttgtattcaagaacgcgtaaaagcatggtgactctgtatccctcctccagtgcggcattaagctaaaaaatattaattaaaataataaaatatttaatacctccaaggatgtgcatgtactgatccatcctctttgtttatcagtgtgttgacaattgtatgtttcccttacacctccattagggtattttttgcaacaactcatgcagagagggaagcatagccgatcatccactttaactggcaacaccggaacatcgatttttcgtggcggaatgacgaacactttgagaattgcaagcggataaggattgtcctctggtctccgccaatcaacgtcctcacacggaacatgaagtgttgggtgtccaaccggataatcagttacacaactataactttttttttttggggaaaataaaattttcaattttacttgatgaatggatagagactggtaaagtcataataactgatttcttcgtccgctgccaactcgtggtaaagcttcaatgcacctgttcttccacccataaaacaatcacgaatattgattggcccgccatctcccgtatattctttgaatttctgtttcatttccctgtccttggacagcatttcctcaatctcacattgccaaaagatttccacatttggaactttggtcaatataaattccattctctgtttgtttctctcccgaattcggcctgcagatttgccacaaggcattacatcattatcatccggataacattttgagcatgcatgccatacacagccatggatttctagtccttttcgttgagactcaatccaaccgtccaaacgaaaattgccaactcttgagaataacttttgctcagaatccccactctaaaattaccttttctctccttcagccgaaaaagcattttgaatccgaaccgcatatttttcggcgtaccactgcataaaactcattgccaaatcactttgattgtcgccgcagctatcgtatcctttttccggaacaagagccaagtgaccaggctttaaatgattagttcggaaatgacgcatgcatgctgatgcaattgttatgcaatgcttgagcnggtcaattccgttgttgtggagttgtgtaagctgctcgattttgctnntccgtcgggatcagcaggtcgcttgctc

SEQ ID NO: 17364 - DNA, 992 bp, Heterodera glycines
  unsure (1)..(992): unsure at all n locations
agaaaacgaaaaggggaactcatcccccaactgtacacaatgtacggtagaaaaacgaaaggggaactcatcccccaactgtacacaatgtacggtagaaaaacgaaaggggaactcatcccccaactgtacacaatgtacggtagaaaaacgaaaggggaactcatcccccaactgtacacaatgtacagtagaaaaacgcatcccccaactgtacccaatgtacggtagaaaacgaaaggggaactcatcccccaactgtacacaatgtacggtagaaaaacgaaaggggaactcatcccacaactgtacacaatgtacggtagaaaaacgaaaggggaactcatcccccaactgtacacaatgtacggtagaaaaaagaaaggggaactcatcccccaactgtacacaatgtacggtagaaaaacgaaaggggaactcatcccccaactgtacacaatgtacggtagaaaaaagaaaggggaactcatcccccaactgtacacaatgtacggtagaaaacggaggaaaaagggaaggggaagtgccaaaaccgacccctactgtagttgaaagagtcctcacaataaactgccaaaaacattcattcattcgcccccaatgatcccaaaagggagcacagtccggccaaaagcatgagcatggtgttcgaacttgcgcaccacgacctgttcgacgagatcacgccgaagatgggaaacaacgaccaccagtgggtccgtcgcactttctacgacattttgcgcgccgttcggccggtgcacgcgaacggtgcgaagcgcagaaaattgaaaatggacacaattttaaggctttgtacacggagatctcaagcccgaaaacatggcctatttcaaggccaacgcgggttcatttccagcagcggacgatgccnaaacgaacgacggattcatactgaagccaatcgactttggcggatcgatgagagtgagcaatttggacagggcatg

SEQ ID NO: 17365 - DNA, 304 bp, Heterodera glycines
ataagtatttttatcactgacgcattttctactgacgcattttccactgacgcattttccactgaccgattttccggtcacggaccgagccagtcgattttatcattcataattctataacacaatcgtactgcctagcgggggatgcgccgaagggactgggtcgttttggcgccgacgttttggcgccagcctcagtttttttattataactttttttctttttgaccaaatctaaaaatcttggtatcattcgaatagcgttacaaaaaataaacaaaaattttaccttctaaaaaagtta

SEQ ID NO: 17366 - DNA, 1609 bp, Heterodera glycines
atagactttcaccaaaaaaggccaattttttcaattaaattaagtcaagcgacgacttttttgctttaaaacactttttttgcggcgcttttttcaaaaaattttggaggatggacggagggtccggcggtgccgataggcgccgcggggaaaaatttttgcgattttaatgcgatttgctaacagttttttgttcaaaaaattaccaaaatttaaatcaggacaaaatttgatcgctacctccaaatcaggacaaatctgataaatcaggacagatcgcatccctgtttaaatcccaaaaacattgtctgaattgaaacactggaatatgctattgctaattgctagctagactgcccctttttcaacttaaattgttaaatttgggctctactgcattttaagcgtccaaatgactgttaggtaattagccataacgacctattttattactcggacaatacatatctacattcttggcatcaaacaaaagcttaaagtctagaaaatttttcatgatatattctgtttactcttttcttgtgtttatgaaatttactaagaataattatgatcggataaaagaaagttatggcctaaaagtagaagacaggacttctaacagtcgattggacgcctaaattgcacttgagcccaaatttagcaatttttattttcaaaaactgaaaccataaaagaaatataccatattatctccatttaaccccccggggataaatagaatttttattttttcgaaaaaataatttcttttaaaatttaataaaaattaattaaaatcgaaactaatttaaatgtttaataaacatgaaaaaataatacagaaaaatcagttaggtacttaaccgggatccgaacctcaccccacctcaccctcagaatgttgcctcagaatccccatttatgcaggattctgaagccttaacgaagtcctaaccaaaatctaattccaaattcttgatcagcgccctaaaatacacctaaagactttcttcaaaaaagataaaaaatataaaataatataccttgcaatgcaaaaaattacaaatttctgtgtttcttaatttacgaaaagagcccggatttttcagcatcaaaaaatgctaattaagcacgaaataagcatgaaaatggcaaaatgagcacaaaaatcgaaaaaaagcataaaaatttggtgctttttagtcaaaaattttaacagttaataataaattctcaatttttcttattttttcttagcaaaaataaacatttttaaatcaaattttgtctagaaaaattttgggaatgaattttgagaaaatttgcgtaaatttcccgggctcaaaaatgaaaaattttcaaatttaaaaactaattccaaattttctgaaaaggttcatattcatttttgaatattttggggggttttgtcaattttttataaatatttttgtattttttaagcaaaatccaaaattttttaacaaaatggaacggcgcccccacaaaatgtcccagccacgaaatgtccaagagtaaaaacccacgaaatgtccaaaatttttcaaaatttataaaaacaaaatgaggctaatttggggttttt

SEQ ID NO: 17367 - DNA, 910 bp, Heterodera glycines
  unsure (1)..(910): unsure at all n locations
cggttanctgaaagaaatttttcaaaaacgacattatatatatactgtgaaatttggtaattgtgattggactaattcggacctgctgtagactacctaatttttgtccagcagcaaattttttttgtataaattcgcgaccaaactccattttttgtcattatttactttttttaaactgcacaaatgtcgtttccgtttattttatttaatgtcttctctaatcatacaatttccttgtaaagttccaaattttccctgtgtttatttttgaattccaaaaacattcattcccagaattaaaactttggaatatgctattgctaattgctctagaatagactgtccttttttcagcttacctaaattggacgcctaaagtgcaattgaacccaaatttagcaatttttgttttccaaaacttgaaccataaaagaaataacaaaacgcttttctaattgcttttttcagcgatacttaagcacacatatttgtctactaattcactgttgtcagagctgccaatcaatgatgaataatcatccggttgctccgctgagttggcgcagaatagttgagcatctccagtacatcaaggtaagcaagcagcggacggacaggggggttaaatataatccccattgattgtcctgatttccgaatcttttccaggccgtctttccgtatttttaggtacacgttttggaggcatctttcgcccgtgcttgggtccatgaagttggtcatccaggtgagacaaattgacaaatcaattttaatgacccctttcttctccctcattaaggctgccattgtccgtattatgaaaatgcgcaaatcgttgaagcatcagctgttggtggccgaggtgctcaaccaattgacaacgcgtttccagccaaaggtgggg

SEQ ID NO: 17368 - DNA, 3507 bp, Heterodera glycines
  unsure (1)..(3507): unsure at all n locations
gcaaaaaaatttcaaaatgtacctntcttttaattattgccaaaaattcaaatttttgactctgaaatttcactttctaaacaaaaaacatcaatttcatccctttgtttttacgaatttactattttttaattttaggtcggctcaacgtgcacaactttatggaccacaaggatggtaacaaaatttgattttcatatcgaattggaattgcacttcgcttcggtttaggataaagccgagagttctgaacacaaacaaagcatttttggccaggactctcaaatcagtggaaattcatcggagagaccaacagacggagaaagaagcgaagagagcgcggaaagtgagggaacagacgggggaatgacagagacgaacaaaaacaacagcaaagataggatcgggagaaagaacatatcatcgcctttttgtatatttttggtaaaaaagaacttcagaacgtacactgaaatctgtattttgatattgtgtcgtttaaaacgaattaatttttaaacaacagagatgacggatattagagaattataaaaaaatttagaatcctagaaaaaatttatcatcaaaccaagataaaaaaattcattggtaaaaggaggacagcaatggaaaataattttattttgtctgtacaatatacattttgctatacgttttgtctgaagactgttcattgagtgcaaaaatggtcaatttgtttattgggtcttctgttcttcgttctgctgattgtgagacgaccatcggtcacagaatgaccctttcgttgttgttgttctctccgctgctggccacggaagatcttttcgactgatcaaagcctaatagattagatttggtagattaattagggacttatggaggaggatcaacaaggataattgtaagttaaccatccctttcaactgaccggacggtggcaattcgtctttcgaggagtgaattgcccgcccgtagccctgcgttcgacttttgatttttgagttctgcacaagggacaacatctttgaaattgcttggggactctccactcctgaatttggaggagttttaaattatttgatttgagtgcaaatttctcaccaaattttggtaaattgatcatgcctcgatgcctttcgtgcgaatgaactatatttgattggttggactgtgaagaaagactgctcggcgaaggagagggcaaccgacgccgggaaggaacatttgagttgctgtgatggaattgctgttgggaagaactgctcgcacccgaggcagaggaaagtggcggttcgcaatccaatgaaattcggtcgaggtcaatctgtacaatttgttggccattcgtcctaccgcttcatataaacggcgtacctccgaatcaatgattgggatgttctgcaggtacgccttcaccctgatctgcatcattgtgcgttcgtgcagctttttgcgcgacaccgccccgccactgctcgaggcgaaacggccgctcccgtggcccaatgcggcgacatttccgccgcttttgcgcattgtgcccgggtccaacagctgaccaataaaaaagtgtaataagccaaacaaacctcgacagagtctttgccatccaattcgaattttgtgactgttcccccgtaaatttctcacatttgccccgccgatgagcaccgattggtcgtagggtacgctgctgtatcgttggatgttccgcacaatctgcgcaatcatccgcagcttctcgaagttgaccagctgttgcgcgtcgttgcaaaatgtcgggttggcttcgtgcgcaaagatcaaatccttgcgcagaaccgggtaaatcggaatgaccggtgggtcctgcgcgaattgggccaattgctggcggtaacgggacatgttcctggacgggtccatcatctaaaaataatgcaataaaaccgagttgaattagtgaaagtaaaaatgaatacctgttgcaagtcggccaatactttcaaatatttcctgaattttatgtaaattattttctaatttttgtgtttttttcatacccaggaacgcgttcccaagtgtgcaacaatctccgaacggcctatttgtaaatttgattcaattaaattgatgcttttttgttaattataagtgtaccggcttttcgagtccgctaatgattgcaaacattgagttgaggtttcggaacactaaaccagaaaagtgttgggaaattataaataaacaataaaaacattggcattgtttggcgattttgatgaattttttgaccaattttgaccgtctgtacacattcctttcacagcacacttccgttgccacccaccacatttcacggttgaatagtaacttaataattatgttaacgattttacaaattgctccgaccaaataattagggaaattttataaaataaaattgttaagctaaaatgcacttcgaactgctccaactttggccacccttttgatcgaagagagcaagggtcttcgttgtcgatgagttggaacaaattgttcacatattcagtcggttcaattgcggtaaaaacggcgaaatcctagcaacaagaaaagagtaaataataacaataaaacatggattttcgtcctccttaaatcccactcaatttgactgctcaaaggaatttcacctgaagtgtcagttgggccgcgatacattgggcgttcagagtgtacaaagtgagccgcgtttgtttgaccaattccgggatcagttcgtcgggcagcaaattgctctcatcgggccgtcgcatgtcacgcaggtaaagccgtgcgttcagtccgacacgttcggccaaattggcggccgagtcgggcagccgtccctgcttggtcacaccatcacgactgaccgaacattcgtacagcgcccaccaaccatcgttctcacccacggggagaccaaactccttaaaatgggaaatgaataagtttttgtggtgaatttacctgcagtgccatgagcatcaactgtttggcgcttgtctcggccaacacggggaggtaacggaagttctggtccactcggtacactttgagcatttgcagtggctgaacaataccgccaaaagcggcgtttgttcctgcagcaccgccgccacagtttgtggagaaggaactgtgccgatgtgaggcgacagagggcacagccgacgaacaggaagcaaacggataatggacggagttggccgaaatgtccgggttcgaacggctggcacggagacttccgctggacgaaggcggcacggagaactgaaatacaaaatgaaacagtcttttggtattccaaaaaaaaatttatttgataattaaatttcgaaacgctggaagaaattttcaaagttaattcttttttttanatttcggacggcaatattccggctgcaattttggggtacacccgcctcagggggtcctatgtttncacattctctggggggatgtcagtgaaaatacaaaagatttttaaaaactcaa

SEQ ID NO: 17369 - DNA, 1992 bp, Heterodera glycines
tgaaaagtaacaaattaatcgttccataagcgatcacctttaccaaagcaatcaaaacccttccatcgatccattctttggtcgccgccacattaatcgcctgaggcggaggacgagcgactgctgggcggcgtgcgacgtttcctgctgttgtcgacctcggccgcgataggttgctgctcatgctcatctgctgcttctcggggctttgtgtcctttggatggggggaacatttagatttatgtaaatgatattaatattcggaagggggagggtttatccgaagtatctttgctattcagtctcaaattcccccccccccatttttacttacaataacatataaataatttctcattttattaccccacttcttctgcctttttgttcatttcccaattcaccttctcctccctgtctctgcgttctctcttcggcgacggcgagcgctggcgacgcgccgaacggcgaggcgaacgactgcggcgcggcggtgtgcgactgcgcgagcgactgggcgagcgcctacgacggggcgagcgagtacgcgaacgacgacggcgtcggtgactgtcctcctcgtcgtaataacgtcgcggaggaggcggcggtccgcgacgataagtcgcaccattcctggaaaatattgggctaaaaatgaaaaactggctctgaattttgtagaacattgaattggcatcaagtgaagatccttttcttaacacgaaaatgctattgcgcgacaataatcgtggagaaatgcttaccttggaagagccaccgtaacacgcgcacgacaccctttgatgtacgccgtgttgcccaagtctttcatgcaggcggacgcatctttgttgttttcgaacacgacaaaagcgtagaagggagggtaactgaatggggatttggagtagatagcagatttttggtaagttttctgagttatgtagtataatgtgtccgaaaagggtgaaaaatatatttattccatgcaattgtatctttttctgattatttttgaaaaatacaacttgcaacccgcatttcttttaaattgctaattgccaatttaaatatttcaacatcgaatcaaacctggccatccaacagtcgctgatccgtccatactttccaaaaacgtcttcaatgtcccgacgacggaccgactcgtccaaattgccttaacataaaacatcagcaaaccataaaggcgaaagtcaacccttgtccatttaattatttgcattcctattttccagtgagcaaaccgatgtgcagtcgtttttggccaggtgatggagaacgtgaaaaggtggaacgcgagcggcgccgacgctgctcgcgacggcgtggcgaacgactgcgactacgcgagcgagaacgggaggaagcgctcgaagaactgcgagaatcattagccatttgacgcagatcaaatctaaaaatttaagggaaagtgcgaatcggtgaaaaggaaaatcgttttagaaagagttgggagagaaattcgaagaatttgaaatgaaaaccattcatggtaaattatctaaagagatgacacgagaaaagcgaatgaaaattaagagaaaccagcagacgagtgcttcttttcaatcaatgaaaattggtgtttctcggcggaatagccaccaattccgtccgaaacgaccctaaaaatcttctcagaccatttttgtagagaattttaagctctatcttatgtgctttatttggtctttttatctttaatataaaaaaagttataaaacaaaaatgaatttttaaatgcaaaaccaaaggggggaccccatggatttgcatttcatgagaaatttttttgctcttaaaattgccaaaaaatacttttctagggtaatttgaggtgctgaacacgaatatgcactttatattgcgttttggattttttggagggtggtaaaaaaaatttgaaaaatccataatttttggcccttgaaaatgcaacctaaatt

SEQ ID NO: 17370 - DNA, 1170 bp, Heterodera glycines
  unsure (1)..(1170): unsure at all n locations
gcatgcnnctgcaggtcaccanntttacttggattagaattaattttatgcatttttgttcaataattaccgctaatttgccccctttttatttttgcttaattattttttccccctctaattttgtgaaaaattattttcaaaaaattattttcggccctatgcctccccttattttcccccaatttttccacaggtggcatgccatcgacgaggaaggaagtgattcggcataaaatccgtgcaattggcaaaatggcacgcactttctccgttttaaggtagtcaaaaacaaatgggaaaaatatgactgacgactcattgacaaaaacaaaaccaacaataacaaacaattaatttattaattgcccctaattacccccaaagcccaattacctaactgctcactttgttgtgtatttactataataataccttagcaattaaactgtgtttataatgtgtgaaaatggcgaaaattattcttcgttacataggcttttcgtgatatttttacaaaaagaaaaatctaaattttaaaaataatgttttagctctgaaaatggcactaaatttttcattttctaaggcattattatatacctgaaatttgaatggttgggcgggctttatatttttgaattctgaattcattgggctgtgccatttttgttaatttaatctggtttaattggcacgcctaattagcccccccccctaattagcgatgcgtttgttgcgcttttgctaacaagatttgatcatttcccggatgtgcttcttcttcgctttcagagaggaaagtgaaactgtgctccagctcaagggcctgacacccaccggctcgttgccgctcggcacgctgcaggagggccgcaagggactgcacaacggtacggtagatttgtaatcatcgcgtaccgtccgtttaccgtacaccaacacgcattatcgtctctctttctctctctctctctctctctctctctgtgttcccctactgtatctttttccgtctttctttcactgctcctcattttaactgctattttctttttccattttcatgcttgttgctgattcctactaattgttcctcccatcgtacaagtgggtacggtatcaaaattacgggcttaaatctgtggatcttactgccactcccttact

SEQ ID NO: 17371 - DNA, 1409 bp, Heterodera glycines
ccatccattaaaatgccgaatttcattttgaaaatgccaaaaaattcgcatttctctttctctctctctctcacttttgtttctctcactttatttttcttaaataaaatgcccgggaggctgtgattttagcgagattcccgtcaataatttatacaatcccgaagtattattaaaaaaatttccagtctgactcggcatttaaatcgcgatatcacaaatcttccaaatgcactttgtctttcatttcattttggcatttggcattttgtctctgtcttttttatgcctttgttgctgcatctctctgttctgttctgtatgccaattcctccatgaacacatcagtgtgaatttgttcaacaatttcagcgctcaaaggcggcaacaacgacccgacccatccgatcaaatcgtttgaggaggccaaagcgttggacaaaatcaacgagcaacggtcggttggtccgtgattgattgatagcacagcactctgatcactgctgatcagaagtcgtcaaattgggggcccggcaaatttccattcctttcgggcgtccctaaaaagggagaatggtggaattgaatcacaatttgggatttccatgggcttttgccccctcccccgtccggaaggcatgattagggattaaattttccaattagggatttctatgggacaggcccgtggggtccccctcttttccgggatgcatgtcgggattgcaattttcaatttgggatttcgtcgatgagatttctctcccctaattaccctatttttttttgccatttgtaggcctccggccatggcctcgcacaacgcctcatcccaaggcagcagccgcgacgtgtcgccccaccagaggagaacaacggcgacttccgccgccgcatcgtcggccgccaactcacaaaattcggcgggtgccgaaaattcccatttcaaatcgtccggcagttagtcgatgggggagagaacccggcggcacacaaacaattaaaaaggtgccgacgaaatttcccaagaattttttggtttccaaattttttcaaaacatgttcggaatgccgaaaaaaatgaatgtcttcatcccggaatttgtgtctggcgaattaagtcgattccgtgttctcgaatgatggctttttcgcaattattcccgagtcgggacaacaagcaggtgttttcgatagcagggatcattttcgaccttgagttcaatcattaattgggtttaagcacagcttcgggatcaaatcctaatctcggagtctgagatcatcgccgattcaagacaataattggttttatagatcacgaactcacggagtcaggactgtaattagttttagggattgttaattagagggttcatttttaaatcgtctcgagtcgagacagtaat

SEQ ID NO: 17372 - DNA, 2181 bp, Heterodera glycines
ctttcaaaaattactctcgtcttctaccctccctctccttttgtgactgtttcgttttaaaaattggttccgaaattttttgactctaagaaattaaattgtaaaaattcaaaacttaaattctcctctgaagttttgaacttggcttttcaatgtttttaagtcccaccgtgaggcgggacagttccaaaatttgtaccacattttactgtggaaagtccaagtaccttaattggacaattacttgtcaacgaactcagtcgcctctggcctcttatggaacagaaaaggggaattatcagatggggtgcgtcccttcctaaaaatttctcttttcgtctaaccctccctctctttcgaacgcagcattgcctttgcgaatctaatgccaattaaacaaaaacagttaataacacagtcacaaagtgtaccaatgaccgcttcaatatttcccgacacaaattgaaagaatgccgctaaaaggcggttcaacaatccttctattattgtaaaaaaaattaattattgtttttttaaattaaattaaaaatggaccttgagcttctcttgcaacacccaaaaggtaaatgcccaaccatttctcgttattgtcagtgcttccgttttttgtttttatttgtgccattattttccatgatagtccatttatggtcattttttcgctgtaccgactgctctcaacgtcctctcgtgcaaattcggacacattttcaatgtccattaaaattgtgcccgttttgcgattagaaatccttctattagtcggaaattgcattgggaaaagtccatcggatatccaacgataatttggaagggaatggaactgataaacggcgatcacttcatcttttgataatacatctgatggtactataaaaataaaataaaaaagttttttttaattaataaaataaaatgaagattctattcatcacaaataaaagtttaaaatcggcagcttatcgaatgagttaaaattatgatttattttaccaattttcttcgtaaattcttctgttgagatgagtggaaaacgaatttcgtaaagcgcaggaccgagcatggcacgacgattctctgctgaacattttttggcattttcgaagcatttggcgtcagcccaacggagtgccaaaaaaaaaaatttaatgaaaataaataaaaggattcattaatatttattaatttctgttttctaaaattactgctttccaaattgaaatttctccatcgatttgcaattcgtcatgtcccaaaatttcacacaacaatttttggtcaatttgtaaaaattcctccgatttgaacaaatcatccgcatttctgtcaatgtaagccaaacaatcattggcaaaattctaaattcgaaatgtgaaaataaaaaatagttatataactggcccagccggttaaacaccaaaaatttttgattctttcggcctttttcaatttgttcttcccacctccaattcgaaaagaccggcctgggcataagccaagaaaacattgcgtagtgatgaaactggaacttgcaaagatgcgtcgaccaagccagggatgttgtactttttggctaattaaaaaaataattaataaatcaaatttaaaaataaattcaccggcgtaaagcactgccattgcattgtatccgttcaatttggccaaatcgcctgtataaatgaagctcaacatcactttgaacactgccacttcaacatcagtgacctccacggggcaattagcagaggctaattgagaaataattatggcaatgagcaaggttaattgaaaactaattaatataattagtagaatctaattgaatttttttattattgatttatgtgaccattttctcgttgttcttaggcctggatccagaaacattccaattttaccaattaattatttaatcttattataattaatattttttttaccgaattccgctttttcatttttagcatcaaaacggaacattgccgcaaatacttcagaagtgtgcttcaaaatcagtctatgtgctgacaaaagctgaagaggattaaagtaaaaatcaaacaaaaaaagaacaattcactaaaattaattttaaaaataataaaaaatttcaaatttgaagaagactcgcctcttttccgtctccgtcccccaccaaaa

SEQ ID NO: 17373 - DNA, 2837 bp, Heterodera glycines
tttaaagatttcgtatcggtgcgctctgttatgcctgcgaactgttgctttggattgttttactttgaaattaccgttcttcagatgaaatcgtgaattaaaaaaaaatgttttaaaataagtttgattatattaagggatgttggagttggacttgccccagcgcacatgaggatgcatgaattggtcgggcttgaggcaagcattgcgttgtggagcgacgggtctatccacatcaaattgccatacgtgccggatgtgcttgacggattcgcacagtttggtcctggtgatgttgtcggatgcggaatggacgcaaacaaccggggcatttttttcacattgaatggccacaaaatttgtaagtaaatgaatagattcaaaagacaaaacaaattcgaattgtttcattcttaagcaagccaatttttgcaagccgaatcgtttcacatgtatgcgtgctgtactctcgtggacatgaacgactccgtccaggcaaatttcgggcccgactttctgttcaacattgtcgacatgttgcccttctgatgggctgtttctcaatttgccagtggattatcgggtgggaattgcgatgttgataataattttcaacactgttaacaaataaaccaaaataattgaattaaacccgttacacattaaataaagtaaattattttattttatgctttccattggtatcttattgcttttaaaattgatagttattacagttttcaacaaaaaaaagttacctacccctttgtcccttccgatccatcctccgttcgtcaatctttgaccccaaacattttcttaaattctgtaatgcattaaatttatatgataatgatgatgatgattggattttatttaatttctatcgctgttggctaagtttattatgttacaatgattagcgattttttttattgcaaaaggccaactatttttgcgtaataaaaggcagtaatgcctattgcataagtcactttatttgcacattaaaaaaagaatccattttagcttttgtattttatttttttttcacaacgcactcaatgtcgaatccgagggcaagttgtcacagcaatgtttcctgtttaaaaatatatttagaacctcactgaaattagagcaccgtttgcagttaatggacaaacaaattttgtaatcttttcgttttaagaataaatgtacatttcttacccggtttcagcctgcgtggtatgatggtttgacatttccgttgccggtacacccccaaccatacctgccttttccaccaccaccacgaccaccattgctgttaccgtcgcaagtgccacaaatgccatttcttcttaacccattcatcaatccaatgtcaatgccgtcccaattcttgcctcttccattgatgaatcaatttgcgcatccgcttacagggccatttccacatccggtttttgctcaaacatcgtttcctgctgcttttccccttccgcaagggatatcactcactcatcgacaacactttgagcgcattgctacagatgtccatagccagggcgtcccacaacagcaacaaccaattataccaatgatcaatgagggaacgggtcggaatgcgggtgttcgaccatttctggagcaattttatcaggatggcactacaacaaatgattttttggtcttcgattggcaaattggatcatacatcccgtaaaccctttcattaaagtctgagtacaaagctttttttttgcttagtggattaacccttaaagtgcttgagtttgattacgcggagagagttccttttcgcaatggcacaaccgcgcccggcataaatattttgttggaaaatgaacaacatttgcgtgtacatatttgtgcaagagaggaaagggctacccttctttcaaacactctcttggttggaggcacttaccggttcatgcatttgaatgtgagaccaaagcgcgattttggacaatctgtgaactacactttatctttcgcatttggaagttcagttcacttgattcgggttatcctgttttatttatttgtcattttgaatttgatgagtttaagggaccgacagtagcatttaatccattaactcttcgaagtccgagcgaccgggttcctcaatttgtttgtccaaaaactaaataaaattaaatagtcgatggtcaaaaaaattccataccccctcaacatcagcagcacagtggaacgatttcgcacaatgatcgtccatataatcagcaaccaatgcaaggtagagacacaatgccgacacttcaagctgagcaacatccgccaccactgtcgccacaaacaaacaatgtacagcagcaacaaccaactgtaccgagtccgctgaacgagcgccaacagagtgtacaaccaacgcagggtgaacatccacaaatccgggcaaacgccaccttgcaaccaaacgtggttcaagcgcagcagcagcagcagcaaagtcatcagtttttgggacttgaccacgacaatgacgatcagcttttgaaccaaatttttttggtagcaaaatttaaaaaaacaagcaattgacatgccaattacaggatctcaccacttccgctgaaatgcaacctatcgccttggataacaacaacaacaacaacaacaacaacaacaatatggttgttaacgatttttggttttgtctatttgtttaatattgcattttgtttagaacccacaaatttcttcatctcggcgccgaaacaatgccaatgccaatgccggacgtggccgaggaagaggaggaggaaccagacgcaaagcggtgagacgcatgaatgaatgaa

SEQ ID NO: 17374 - DNA, 2002 bp, Heterodera glycines
gataaaacgcaaaattttcgaacaaaaaatatgtttttcgtgcatttctcgtcgaattaaagccgtaaaaaaataagtaaaacttataaatcccatccctatttataattattactttatttttgtttaacacagggttcccattcgtccttgaatggcaaggacgtccttgaaattgggccctctttcttgaaaataaaaaatgtccttggatgccaaggacgtccttgaaaatgaacatttagaaaagtttttaaaaaattcaaagaaatttgagaaatctttgtaattttcaacgatattttgattatattatggcattatgtaaataaaatgcaaatttaattgcccaaaatctcaaaatttggtcattttttggacaaaatctactaacaaacagcattaaaaatacaaaattcttccggcgccgccggaccctcccctatccttaaaattaaaaaaaaaagcgcgccgtaaaaaaaccttttttgtcaacaaaaaaaaaagtcgtcgcatggcttaaaatcgcaaaaaattaggcagtttttggtgaaaatctattaacaaattgcattcaaattttcaaaatttttccccggcggcgcctgtcggcaccgccagacccccccccccccccttttcccggaaatttttggaaaaagcgcgccgcaaaaaagcgtttttaaagcagaaaaaagtcgtcgcaaatgaggaaaatgatcagtgaaaacaaaaaatgttggaaaaaatccattccagtgaaaaatacaagtcatttgaataatattaaccatttttcattgcatataataaaattttaaatgtcattggatttcatgaattttccccactatgtccttgcaaatcggcatacccgtccttggaagccgactttggacgataccaaccctggttttaacatttaaattattaatttttaaacattttcagaaaagcgtggctacgattacatccgattcgggcgccgttcttccgctgtcgctgctatccccaaattggccaaacagcagaggaaaaagtcggcggacaccagcggcgcccgcaccgcttacgattacatccgatttggctgatcggactgactgatcggtgataagaatcattgccaagtcgagaatcattatcattgtccatctgctgatcattttatttgtctgatcatttgtggggcggggaattcatataaaaaagtttaaaaaatgccaaaaaccaatgcttaattgggtgttattactgcaaatgactgttgtcactctgatgagtcgtccaattcgggaatctaatttgttttaccgtacccacagccgttcaattttggctaccgtactcacaccatcgccgccctcccccccaattgtttacataatccaaaaaaaaatttgaaaattgcgaaaaatatgaaacattcgaaaatttgggttcgcaccaaattgtttgttcttctccttccacgtccctgatcacatttcttccgcgatttgatcaaacgcaaaataaacaataaagcgaatttccgtgtcgaacgaaacatttggcgattgaaaaaaaatggataaattttttgaaattaatttttggctgatcggacggggggagagaattttgggcatccgttcgtccgatgggccgtcacttcggattaatttgacgacagaatttcggcgaaagaacgcaacacactcagataaatgcgaagctcatccattactcagataaaacgatggatgcgaatttcgccgcttttttggggcttttcctttatttatgtatttatttttgattaccctttaaaaaaaggaacggtcacggggaattgaacagagattttggggagaaaagtgtgtatttccaaattaggatgatcgatttcatcattttccataaaatttctcttaattctttgattttggcaccgccggacacaaattcccataaattttgaatattgttacaaaaatcgccatctcttaaccaaattttg

SEQ ID NO: 17375 - DNA, 1309 bp, Heterodera glycines
  unsure (1)..(1309): unsure at all n locations
tcataatgccaaaccaaaacgaattcgttttaagatattcttttactggactttgacttggtttctcaatatcgaagcttttttctccgcaatttctaaaacgcttataccaaaccctagatttttggttccgatcggtttcagaaaaaatcccttgtggtgcaaacatatttcacatttcacttcataattttttgagttctgcacggatcgagaccgggataagaccattggaaagagcagctcgagctctacaagaagctatagaaagaaaaaatcgacatttcagggactttcagaaatcatgtttaattccccaatggggccccattttgggtcctcagctacagccccatgcttctcccaattttaagtcttggatttgtccaataaattaaagatttcgaattaataataaaaaattctattataaattttttttttgtagagggaaaaattctgaaccaaactactattttgaaacccaatcaaaactgggaaaaaatttgaagtcaaaaaattattcgaattctccaattttgtttccataatttccgaatgttattcggtatcataatgccaaaccaaacgaattcgttttaagatattcttttctggacttgacttggtttctcaatatcgaagcttttttctccgcaatttctaaaacgcttataccaaaccctagatttttggttccgatgggtttcagaaaaaatcccttgtggtgaaaacatatttcacatttcacttcataactttttgagttctgcacggatcgagaccgggataagaccattggaaagagcagctcgagctctgcaagaagctatggaaagaaaaaatcgacatttcatggactttttcagaaatcatatttaattccccaatggggccccattttgggtccccagctacagccccatgcttctcccaattgtggcgaaaacaatatttcacatttcacttcataactttttgagttcggcagggatcgagaccgggataagaccattggaaagaacagctcgagctttacaagaagatatggaaagaaaaaatagacattccagggactttttcagaaatcatgtttaattccccaatggggccccattttgggtcctcagccacagccccatgcttctcccaattttaagtcttggatttgtcaaataaattaacgatttcgaattaataataaaaaattctattataaattttttttgtagaggggaaaattctgaaccaaactactatttgaaaacccaatcaaaactgggaaaaatttgnaagtctaaaaaattat

SEQ ID NO: 17376 - DNA, 1094 bp, Heterodera glycines
gcgccatttgcgccgcactgcaaaagtggacacttgcgccgctcagcaaagtcgacacttgcgccgcgccatttgcgccgcccagcaaaaatggacttttgcgccgcgctgtcaaaaatattatattcataaaaattccactattatcaataagttttactaaaactataagccatcgacaaaaataactaattgaaaattcgaaaaaattactagtcacaaagattggcattcaattttctaaccattaaaatcttaacattgaataggttcatcaaagatatgaaaaaatgattaagaatacaaactaacaaaaaactgaaaaaaagaattttctgtagaaaccccaattatttttttgcttcgaaaaagaatgaaattcaattcctttgtaattaattttctcaataagttattttcatcgattttaatttaatttcattgaaaaaacgcactgattttcaaattttcgctcctattttaccatttttcgcactatttcgcaatttttatgccctcatttatttaccttttttttcgcttaaaatccgccgcttaatgatcaggcaatacgaaggcttgttatcgcatatggtctcaatgaaaaccaaaataatcaagatttgatcaatcattacgtgcacttcaatatggaattgacatgaaaggcttcgaaaaaggaattaataatgaatatctatcaattcttattctataaagcacataaatttattttaatcagagcgcaaatatctttttttgctgtacggcgcaaatgtcgcggcgcaaatgtcgtttttgttaggcggcgcaagtgtcgcggcgcaaaagtcggctaaccgcatgagtgggttcgattcccacctgagagttaacattttgcccatttcttattatatttaaaaaactaattataagaaaatcaattggaatgccattgcatgaagccaaaattcctgctggttgggccagggcgactccaaatgagctcagcaatgccactgatcaaagcaaataaaaagggacctgttcaattatggcactggaaagcacttcgaaataaatgtaaaatttatttttgtaaaattaaaaaa

SEQ ID NO: 17377 - DNA, 946 bp, Heterodera glycines
actagggttaagccccggccccgaagcccccctgcccccgccccccggacattttgggacttatcccccgacccgaccccccgacatgtcccccccgaggttcccggcccccgactttttgcccccggacccccccgacataattcgggggattggggactccgagcgttttaaaaatttaaaagttatgcaaccaaaacatttaaattttacctatcactaagccaaaataaaagtttctcactcttttagaaaaattaataatatataatttgcaaaattaaactttgcacagatttacaattttccaggaaatttaatagattttcacccaattgattacttttaatggcttcaaaagcatctgatatttggaattttttcacgaaaatttcttcagaggttgctaagtgccggctttgtgaaaaccaattagcgtgtaagaaatcgtgcacaaaaggattatgggggcattttaaagcgaaacacgctaaagaatttgaaaactatttgcaaaaatccgacccgtcaacggtaatacaagcttcctttttattgaatataaaaaattcagaaaaaccaaggcattacaaaattttttggcaatgaagacccacaaaaaggcggatgaacaaattgcaaggctgatgataagaacgaattgcgcttttttatttgttgaggcaccggaattacagaatttgttctctttggcctacccgaaactccaagtaatatttttcacccatttttactattgtcatattttttaagcttctccgcaaagattattttcggaggaatgtaattcccaaaatggccaatgaaattcaacaaaaaattgttcagggaattggtcaggattttttttctgtgacctctgatggatggtcgcaaattacaaaatcaccagcgctcttaaggttctataatccatttcatggaa

SEQ ID NO: 17378 - DNA, 2117 bp, Heterodera glycines
ttgaaaaacgaattatattttgatctgatcaaatgtttcaataccataaaaactcattagaaaacatagttttttacagcaaaactaaacatttattgtaatgtgagggcaaattatttattaaatataaaaaattgagaaaactgcttagaataacaacaaaaacataacaaacttataaaaaaactacaaaagattgatcagagttcatttgaatcaaaaatggcgtttcgaatggcagattctctagcacagaacatcaaaatatcgtggagatctttgtgtttgctttgcgcgcgagatcgtcattgatgctcactgagaaggccccaaaatccatggttttcagcaaattcaggggcatggtggaccaaatgatgaaattttgaagtcgaacaatggcggcgaaagtgctccaacatttgaacacggaattgatcagcagtggcgcggaaatcagcgatttgatcagcagaaagcaaatcggcgacggcaaatgattggagttttgccaagagttcaagagccatcaaaatgttgtcgcggcgtggtgattgtggcaaaaactcggtgacatgcataggcccgcctaaaaatttcaaaaaattccgtttgtttttaaaaatttatgaccagaaaatttcaaaaagttggttttctaaacatttttggccattaattttttgaaacccaacggaattttttttaattttgcaggctaatagaggattcttagggctgtcgaatgatactaagaatatttaatttggatgcttcttgaaaaagttatggtgcactaatcttgcaaaaaagtttatggtcgtgtcttttttttatggtcgtgtcttttatctcattttagctttaatctcttccgatttcctacttcaaattgcctcatcatccttcattattaatgtcttctcccccatcgccaaatgctccccaaattttggaggcgcaggccgattttgcactgaatttgctgcgcgaggtgtccacggacgaccgttcgtgcattgtttcgccgttttctgtccccgtctctctgtccatggtttacgcgggcgccaaggaaagacgggcgaagaaattggcaaactgctcgcaaagggtgggcatttttgaaattttccacaaactgaaacattattgaaaccatttttagagaaaaatgagaaattcgaaaaatttgcaatttcggttttttgttcgaattcgggcccggaagcggacttggccgtaataaatgccaaattttttatcagcaaaagtctaaaaaacatgttcttagggggttttcattttcagacacgctgaacacaaatctgacacccaatccgatcgatttcaaacccctcgacccgaaaatcacaactcaccgtggatgcgaaatttcacgtggacgagaaaaccaccaaagaggtgattttgaaaaagacaaccacacattttaaatcgatagtttaaaatcaaaaatgccagttattagtttggccactgctactgacgaatcgggcacgcatttcgatcaaattaaagggagtgcaccccaaaatttagccgccgaaattttttgaaacgaattttcaaagcgaaatatttaaaaaaattatattttcgaaaaaacaaaacttactaattcaacataaaatttcgacaaaaaaatgctgaaatttttttataaccttttaaaattttttcataggattttcttggtttggaagtgtcattttgtccttcaacgtccaaattttttagctggaaatgatgcatttgaaggcctctttgatctattctgaagacactcaggtcgttcacacattttcatgcattttttccttttcatttgccaatttttcgattgcttatacagctccaacttctcggcatgccctacaaaggtgaaaaggagttcatgtttgtgctgttgcccaagcaacgctttggactggccaaattgttggctcaattggacggcaaaaagcttgtggaaccgtgactggacaatccgacagtggacaattcgacagtggacaatccgacagttggacaattcgacagtgaggacaattcgacagaaatggacaatccgacagttggacaatccgacagtg

SEQ ID NO: 17379 - DNA, 1089 bp, Heterodera glycines
tcatatttatgtccatattttggcatttttcaaaaaaacctctattagaacggcccccagcagctaaattagcctttttgagcccaaaacccgaaaaatttttcaaaaaatcattttttcgccaaaatttctcgagaatattgaataaatttaaattttcttaaaaattaataaatttatgtcaaaaataagcaaaaaagcgaacatttcgcttttgttgttgattttgcgctaaaaaaattaataaattttagcttttatgttttttttcttttaaaatgattgcacataattgccgaaaaaattcgagaccaatttccgaatgttgaccgactaattgccaaaacgaaagccgtctttgtcaaagcgccttaccgagtcaaaaaatttggaaatgtatctcatatgcaatttcaaccaataaatttgaagaaattttacattcaattttgaaaaatttatgtccatattttgacatttttgccatttatgtccatattttgcgatttttggtccatattttatggccatatttcgcgattttatatccatatttttggactccctattgataaccaatctctaatcagatttccattaggacatcgctatggcctgaatccctgcgtatctgagactctgaagccggctggggtgaggtcaggttcggatcacccgcggagtaaaaaattatttggttttttaggtatttttaaacttaatagactattagtaaattttctaagtattttttaaaagtatatttgcaattctagtgctaaaaaagcgcgggcgtgaaaacgaacctggcgcgaaaacggcggcgcgaaaacggcggcgcgaaaacgacctggcccgcatttttttgtttgtttttttgaaactaaaatgtaaaaaaattactaaaattatttttattttaaataatgcttctgtttcgaatcttttggcttaaagaaattaagctgtaaaaattgtgaacaaataattctctgaaatttttaacttcgctttaccattcttttaagtcccgccgtgaggcgggacagttccaaaattttgtaccacattttaatgtggaaagtccaa

SEQ ID NO: 17380 - DNA, 1640 bp, Heterodera glycines
catcacattcagcaaggcataaaatacgatgatatataatatgtatataaactaaaccctctgatactggccatttcgtttatattttaatgcatttaaaattcttggtgttgatggggggggggagtcgtacatgggtttagttttttgttgggtttaccattcaaaattttctcattttcccaatgctggatgctgcaattgttttccacaagtcatcgaggaggacgaaaggataaaggccaatttgatttctcgctttagtgttggacagatggcaaaatgaacaaaaggtggataggatatgttacaaatggcccaacattctccgcaacagattgactttcttaccacaacgatcttttgcctaaaaaattcggtgcaagtagtttcatcaaaagtgtcattttggcgttttttgcaatagtgccaatctcgtcatgacttttcttaaatacaaaaaaatcagataataatgttatctatacgataattattgggttgctacaaattgtgacgagttttctcaaataaaatttaaggtattttttcatgcatgctgaattattagggctgccaaaaatatgcacgaaaagtggccaaaatatgcgcataaatatgcaaataaagtcgtgaaatatgcaccaaatatgcacaaaaatcgcaaaatatgcaccaaatatgcacaaaaaaacttgaaaattaggggtgcaaatccaataaaaaatttttattcctcataaattttatcggttttttttttgcaattgaaaatcaataatttctcaagattttcggcactaaagctcatcctattgtctgccaaaatttacttaagggatattcaaaacggaaaatatttgaagaaaaatggcaaaatatgcaaaaaatcggaaaatatttgaagaaaaatggcaaaatatgcaaaaaatcggaaaatatttgaagaaaaatggcaacatatgcaaaaaatcggaaaatatgcacaaaaaatggcaaaatatgcatgaaaatgtaaaacaagccaaaatatgcaaataaaagtcccgatttttatacgcaaacacaaaaaagaaagtgtttttcgtactatttagagcatggagaagccaggaaaaaaatatgcatttgcatacttttggcagccctatgaattataccaagactaaaattggtatttggactgtagctcttccttggcaatacggcggatgtttagaatgagatgctagtttaatttaaaattagaaatgaaacaggaacatttatcataaatgctaaatttcaaatttttcataatactttctaaaaatttcagtatcgaatttacttaatgtcaaaaatatagtgacggaattacttagtgtcgaaaacacaaagcgcctccaaaaatgataacttttgcttcaaactttatcaggacatttctaataatcaggacaggttgccccctggattagaatgcaattcataagaattaatcatcttattgaagagtaattttaaataaaaccataaataataaattgattgtttttggacggagaatgttgaagaaatgagccaatttaatgatttttttcgttaaattcgttaataaattttcattttatcagggacatattggttttgaaagggtc

SEQ ID NO: 17381 - DNA, 1201 bp, Heterodera glycines
attttaaatgtacgatttataaaaaactggcatacttttttgaaagttgcaaaaccatattacaggggctagcaagcaagagtctaatagagaagtgccgcaataagtaccacaatatttctttgcaacttacaaaagggaaaaaaattatttagaaaggttatcacacaataatttaacaaaaaatttaatttatcttcattggctgtttaatcagttcaaaatgtccatcattaaaatacaaaaagattgatgctgttgattctttttgactcaggttcgaaagctaaagtttcaaaatgaatttacacaatcaaaacgttctaaccgatgtttccaaatctggtgaataaagttgccaacggaaaatcctttcctgtaaacgttcgcaaacaattatattaattcgaaacaatttgctggctgatgctatgtctaaattgttcatccatttctcagtttcatgtgctcctgttgctggcgcaacagcaatttcaatgtgttttctaatattttcaatactgttctaaatagtttaataatattaaaattaaaaaataattcatggtttatataaattttggattgttttagcaatttagggaaacatttttatataatgatagaaaatattttgatgagccttttatattcacttataatagcagacaaacagctcggatagagtacaggctgacacgattgtacagacaaataaaaaattctcgctaacatctatgtataagtctcggatgacacgtatttgcacagacaaaaaataaaaattgccattgataaattatatattttatatattcattttatatgttatcaaaatcgaataaaatagttagcacttttacgaaacgaccacagtgtcacctttacgaaacattcccaagttggcacttttacgaaacgacctggcacttttacgaaacgaccacagtggcacttttacgaaacattcccaagttggcacttttacgaaacgacctggcacttttacgaaacgaccacagtggcacctttacgaaacattcccaagttggcacttttacgaaacgacctggcacttttacgaaacgaccacagtggcacttttacgaaacattcccaaggtggcacttttacgaaacgcccatagtggcacttttacgaaacgcccatagtggcactttttacgaaacgacccagcacg

SEQ ID NO: 17382 - DNA, 936 bp, Heterodera glycines
gagcctcgcccacagcgccagcacaccttaatgccgctcgtcgaaatcgaccacgtgcttcaaagccttctcgtttttcggaacaaaattttcgctccgacagccaaaatttcgcttcgacggggctcggctcgttcgatgcatttagcttcagcaattgtggacaaatacatttgcaggtcctccgcgaccttatcgtattttgccctatcgccatctgccgccaatttgcccaaaattctctttcgaagttcgccatcctttggagattttaaagctgttaacagcattaagcaatagaattgctcttcgttgagtttcttgaactcaaaatcccttaggaggcgcttgtgccggttgacaaaagagaggaagttctcatcctcgctcttggaagcccgaaggcactcatacctgtcgatctacaccgactgtggtttggcgaacaatgccttgagttgctgctccgttttggcaaaattggagtcggtcacatctttcggcaagcacgacttcttgtactcgctgaatgccgctttgctcaatttcgtcatcagtagcttgactttttgctcatctttcagattgggcgccgaacaatccaacgcaaagcagaattgttgcagccaatcttcgatgttggtggtttcgtcgcacaattcaaatacgtcaatgcctgaaagcgacgggttttgattttgctgcgaaatttcctgcaaaagttgctcgatggtcaaagccatttgtcgaaattgaagaaaagttgttgattaaaatcacacaacaaaaaacaggagttgaatttgacgaaaatttgttgttgaataaatcaaacaacaaaaaaaattgagtggcgaatgttgttgaacaatcacacaacaaaaacagcggaaaagccgcacaatttgaaaacaaaacaatttaagtcgtcgacgg

SEQ ID NO: 17383 - DNA, 1334 bp, Heterodera glycines
gttatgccgatgagtccgaagagaataaataataaatatttattccaaattaaaaaggacaaggcacacaaatatattgattggggtcaagcgaagggaaatgacaaataaatgaatgaatggtggtgaacaacaagggggaggaaaatgggaggatatttaaggacaaaaggaatggggtcaaaatgatgacgtggcaaaaggggacagaatgccaaatacaatttaaatatgacccgtcctaacaatagacaacaaacaccacactaattcaaacacggacatatacaaacacaaaactttaatatgtgatgacaaaaataaaattcaattgttattttatcaattttatcagagtttgattcttttctataaaatttgacttatgcagcttatttttaattttaaatttgtgttttttctattttattattttaaactattcctttttatttttttaattcttatgctaaatattttatatagaatcacataattctttaaaacttgtttacccatgttttctagcttccataatcggtggatgtaattgtgtacgcagattattatttttaaatttgttaagttaatctttgaacttaattaacttcagataataaacaattaattgttttctatttcaccaaattccaaattctattaggatttatataagttctgagagaattttaatagatttttacaaagggtgtgtttctggcatttagcatatttccaattgtcttaatattttttataatttaacccaattaatttaccaaatttaatctgaacttttagaatttcttaaaatttttttgtaatttgcattttggtctcaattaaaatatttaaatgaaaatgttgcgttttattatttttgatcaaataaggcgaaattattgttcagcatatttcttcatttttatatctttatatcttatattatttttgacctaacattgaggattatttttattcattttaaaacaaaaatatatatgtgacgataaaaattgaattcgtaaatgttttttttatttaacattatgagacggtccaatcctcttttattaactaaaaaaaattttttttatgcatattgaaaaatttatattattcgcaaaattgtcaaaaaacttctagaggaattacaaggtttcatgaaagattactgatcctcaaaataaataaagctaaggaaacaataaagaaaataatgcaagtggctgggatgcaatatccaataaaggccgacttgggagaaggtaagtgacccttgtggacgacacaagttgcctcttaggtaggctatgagacttgtgtgggggggg

SEQ ID NO: 17384 - DNA, 1553 bp, Heterodera glycines
gatcattttgtccaaattgtttattctgatctctccttggttcataaattattggaccaattcgataaatattttcttcagttctttcgtcccatctttggccaaatatttaatcaaaacttttttcttcctttattttgccagcgtcccgcataataataaaatttttcttataacagttccatggttttttgtaaagataaaatgaaaagatttaatttattgaaatattttcgcaaataaatttggtaattattcattttttaacatggataaattgtacaatcaattattaaccacatttattcattatatcataatatcatgcatcaattagaataaaaattatattatatctaatagctatcaataatttgtttaggaaaaagtgaacggattaactggttaaattttttaaatggtattttctggtatttatttgtaaattatagttaatatagttaagccgtgccgggtttcgggattcggcctgcttagttccaacccctgagatcgatctcctccgtccaccgacggattgttggactgggccgtagcccccgcggaaaggctccgtcccatcggtcggcttagggggagggccagtagtgggagtgatgactggggaattgactgactgacctcgatggctgggagagccatcgcttaaaaggggaatcccggtgggcgttccaatggggaggagcctctccccttcaatcccaatcggtagccgagacccgagtcccggcttacacctccaccccagggcaggaaccgtccctggttcctcaacttactcgaaattttgcgcgataattctgctgcgccgccaaacctctcacccaaagaccattttcacgcattctcacaaattaattgcccttcagtcattctcttctctcgctctcttctttgctactgcccttcagtctccattcaccctcgcctcttccccgtcaattcccttctcttcctctcctcatcttcctcttcttctccccattcgccctctttccatcaccaccgccccttctttcctcctcaaagctccaaccacaggggaaagacttcccctccgttcgactgccattccatcccagtgccaagaagcgcattcggagggaggatgtaatttcgagcacaccaccagcctgccggcacctccatcacatgcagttgcacattttggccctcttccaaaagttcaattacgccttcgttcatgtttcgcttcgttagagtatggatgcgaccgtgtaccaggacattcaccgagcaaacaatgcgatggccctgatgtctgccgttgttgatggccctgatcactcctggcatgacgaaagatggcaccaagacgacattctgcaccgactgcgcctccgcttgacgcacaatttggccttgatggagccagcctggcaacgtatctgcgctacttgttcgaaagctgctctccagtagtagccaaccagaaccagcgtgtctccaacggcgagattgcgctgcaaacacgggtcctgcagcatatcgtttccaacgcgaacaaagaa

SEQ ID NO: 17385 - DNA, 1822 bp, Heterodera glycines
tttttttgctgacttaaaatgaccttaaaatgacttaaaaaagtgttctacactttgtttgaagcttctaactttcattttttgtgatttttttatactttttgggatttttatgacttttttgcgtttttatgacattttcgtgacattttggcgatttttcatgactttttaagtcgactttttgtagatttttcgttacttaaattcccatccttagccataattaaatttttttttacatcaatatgggattttgaccaatgattttttatttttaaggttttcatcggcggctctaggaaaatccgacactggaaaatccgacaccggaaaatccgacactggaaaatccgacacaagcggaaaatccgacaccgctggaaaatccgacactagcggaaaatccgacactggaaaatccgacaccgactttaaattttaaaaataattttcgattatttgagttaatatctgtataagttagccaagttttcgaatttaatttaagaaaattaaattggttccgccattctatgggatattgcccgcaaatattgaaggggttgtcgattgttgcgagtcgcataaatctctgtgagattcatgtcttgctccacgtacacttgcttacgcttcatgccctttcctctgattccatgtgccggattatttacaaattcctccaattgttgctgccaatgattttcttcctgtgcaactttacgaaggaaaatgcttaggcgaggcgagtgtgaacgaaacaaagcattcagatttcgatgccacgactcgacgctattgtttgtgaggcaaagatcagcctccaatcttcaatacaaactgatcattttctttgtttgtttgtaattaccgctcgcacatgttccacaatggcatcggaaataaagcaggccggttaaattatttttaaaaattaaagtcggtgtcggattttcgagtgtcggattttccagcggtgtcggattttccgctagtgtcggattttccgctagtgtcggattttccagcggtgtcggattttccgcttgtgtcggattttccagtgtcggattttccggtgtcggattttccagtgtcggattttccggctcccttcatcggatttactgctgaaaatgaaaagctgcccaaaaataaatgtgttatcatcaaattttaccaaaaaggatttggaaatatataccgtgaaagcgtagaggtatcggataaattaagagaagattcgaagaacgaagaattctttgtcacctttatggaccagtaaattaaaataaaaacacattaatttatttattgttttaattaatttacaaaaaataaaaaataaattaattgattttttgatgcttttagtggtacgatggatgaatcagaacactttgcaaaaatatttgaaccggtggtggccataatggaacttggcgaaagagatttagaagaggagttagcacttgtgaaaggcaattttcccacagacaaattcaacaaaatggtgatggatgtgattggcacattggtccaactgcataaaggtaactatctctccattaagtttatgctaaatcaaggattagggagtatgtgtaccgtattatctctaattacccccccccccccccccagattgattaaccttgcgatatcctcagaaagagggggatcataccgaaagcaaaactttggattttctaggtagtttgaagactaatgcagccagaaaatccaaaatttttggttctggtatgatctccctccctctttctgaggagatcgcaatgtagtcatcttgggggggggg

SEQ ID NO: 17386 - DNA, 709 bp, Heterodera glycines
ttgcgcaagtcgccacccctccccgcagcacaggtccaacaccgtggcaccgccgtcacagagtccctcggtgcctatgcgttccaaaaactcggctaaaaaatgacgaaaatgcttttgaatgaatctgtgtgttatgagaggtaaggaagggaatgtttgaccatgttgaactgaaaacttggtgtacctttcactcccataaatttttaaaaatggcgcgggaaaaaattatattaagtgcttaatataagaatttcaaacaaaatccctcctttgtgcgatttctttgtctttttaaatgaagttgcgtgcacacagtagagtccagactagagcctggttttgtgagaattctggtacggcattttttgggggaaaaagtccggtaaaactggtttttttttctcgttgatttcctgtccattctccatttttcaaatgcaattcctgtccctgcattttgcatataacaataactcaccaaaaactattccaattaatttacaaagaaattcaagaggacacaactcaaatgaaagaattagattcaacacaaacacgacccgcactttgctataatttgagtctgaaaatcattttaaagttttttgccatctgcacaccgcaaaataactctcattgtgtgccaccaacaccgaccgatgagcatgctcttcatccaattgttgaagttgcgcaggtgcaa

SEQ ID NO: 17387 - DNA, 915 bp, Heterodera glycines
ccataaaaaatactcaaaggcggggaccattttggttttaaaatagttttaagggtttttgggatcggggattatgaatatggccattagttttgaccaatccgtaatccaaactggaaaagagtaagaaagataggtaaatttcatgatttattatggactaaaattaatgtagtttttttattcgaatacgcataaattctgcgtctctatcgctcataacaagggacagtgaaagtagagaagtgaattaagaaaatagtgtgtaaaagactttttctctaaagttttttcgcggtttccaagtgtaaaagtgccaatcttttatttgtatctcacaatcagcatttggcatttacgtaatatattctgccagtggtagcccccttttttttataaaaaatcaaaactttttaaacgagaaaaagatgtttttgtggttttcagggtcggagaacccgattctgatatccatttctaaccccgaactcaaatttgaacaaaatttttgtcaggcattttcttttcatggttttttgccttttgtaataaaatagtgataaatgattggcattatgtttctttattttgcacttttaatttcttctccataatcataattagggctaggatttttatgttttaacatattttttttgcggcttagttatggcgagagaagcccaaaaatagcattttctccgaacaatttttggtttagagcgacttataaaaacataaaaacacatattttggcgttttggcacataaaatatgttagcacatattttggggtttggcacatattttgcacatattttggcatttttgagaaaaattgcaataaaaatacaagaaaattgaaaaatacacccctaaaaatcgaagaggttcctaattattaacataattttc

SEQ ID NO: 17388 - DNA, 2357 bp, Heterodera glycines
agattcttgattagcgcctaaaacttccccagaaaagcgctttccttcgttgggattatgatattttaaggatgcaaaactaaaagtgccttctatggctttgttctgcccttgttgttttgccttcttcagcttgtccgtgatgatgccctgctctgtccgaatctgatcagtctcgactccctcgagtatttggtcggttatttggtcatccgttcctcgtttcacttctctacccttttttttggtgctaacactttcggtcgcttttccggtgccggagggctttctctccgatcccgactcaattgttgcggaggatttggagctgttcaccggcttttcgcaagtgctttcattcattttttgtcctgggccatcatttggttgcccaaattgtcctcttttacgactgatcgttaagtctgagactttcttttaggccagcgttctctttctccgcaaggtctcatttctgtcaaattatttggcactaattgccacaactcgcttaaatgcttccctccccccccccaattaaagggctgttcctctgaccatcgttcgtacattttccaatttgccattctccgccactccgttaatccgccgtttaatgacactgatttgcgcctaatttatccacgaatgttcaaaagcaaaaggttctttatgcgccaagaggggctcataatagcgcgtgttaaacaggtgaacgaacgaagttaggagaaaacgggggaaaaaaccgccaattacgaagaatccgataccgtgagaaaagtttaaaaaatgaaaaaatgagacaccggaaaaataggacactaatatgctttttataaatagggttgggaatttaagtcactaaaaatcttcaaaaagtttctaaaaaagtcataaaaacgcaaaaatcacgaaatggaaaaaagtcctgaaaaaatagtcataaaaatccaaaaaagcaagaaaaaatgcaaaaaaaatctgaaaaaattaggcaaaagttaaaaaaatcccattttaaacaatttttatagaataacatttaataaatagagtaggatttttaagcacttaattttataaaaggtacctaaaataggaatgaataagtgattctttcaacaattacgaaaatttcatccaggtttcattaaattatttttaattaaaaatttatagatttaaattaaaagttttaatattatttaaaaattccgccagtgtcggattactggggagccattacggtggagtcagattatcagtgctttttctttaatggctcgatcaattcttttcagttttatcatcgttactgtaacttccacagtaaactcagtttcggtttcagtcaaaattccttctcccactgatcggcttctcatcgcccgaaaagagaaatccgaaaagtgttggcttttgtccactcccaaatgtcaaccaatgctacgggggcgaaatggcacttctgttctttgtcagtctctacgccagtgccgagatttgttgtgcgatttgttgccacatttttgaaagacggcgacagacaaatttagcataagcggaaaaagcaaaatttgttgaaattgaattgttggactttatttgaatttgttttatttggatttatctttaatagaaattttagattaaaaatataatgcgagaataatatacaccagggcctatttcaattcgggtcatatctgcgatatgactctatgacacggtgtcatatcatacgcaaaatttctgtttcaattaaacaccccaaaaatcatatgcggcgtatgattgacgtgtcatagtgtcataggcgcgtttcaattgtgtcatggtatcatatctccgatatgatatcgtatctgcgacgccgtcatacgcggcgtacgacttttcctatgattaatcatatgcgcgttcaattaactcccttttctacttatgatgccgtcatatatgacaccccttcccttgggcaaatcatatgcgggtgtatccgctccgaagcggagacatgcccaatcgtatgtaggataaaaattcataaacaattttaaacttaatcgaaaattttcaataaaagcattttatagaatgaaacctctattattgaatgataaataaattaaattatttttcccagtttataaatttgaagcgtaaatcgaaaatgcttaaataattttatttatttttgggcacttcaaaattaaaattttttttataaatgagatttagctatgttaattttttttacaaagttgtgatgttttctaaatataagtaaatttttgcattttattttccaaaaaaaatttgttcagacattttgaatatatccataaattttc

SEQ ID NO: 17389 - DNA, 2675 bp, Heterodera glycines
  unsure (1)..(2675): unsure at all n locations
tttcaggatttttttcacttttanataatatttctgtaaaattaatttcaatattcatttatgtttatntaataatacaaaaacatttttatcttncatttattntaattatcgattatttgtntaggaacaaaaatctgttntaatgaacatattacaaattatttctaattattcctgttgcgcatttttcaatcatttttattataaaaatattttgcaaactattttttctttataatagaattcttttatatatttcaaattgttaattgattttcaatctttatcaaattaaattttaatattttgtttaataagaaatatttcatgtgcagaaactacgactacgcaataagttgatcaagtttctcgaaagctaaatgagccattttgttaaattaattttatatttattttttaatatgtaagattaatatatttctttttaacatcaatgttatgttaatttattcgtctttttatgggaaataggattataatttttaagaatatttatttatttttcgaatggtttatattctacttttcataataactgttattttgactgaaacagtataaaaaacatatttttattttatgattattacatttatataagatagaaaggtgcaaattataacgaatgaagaaattttcatattattaatgttatttaggcattaaaaagttcggaaaacgcatttttttttctttgcatgaaaatcattctaatttacttatgatttaactaagttttattggataatttcataaacttagtccttttcattatttttattggatttcacttcaatgtagaataaataatgcctttactaaaaatttattgttttgaaaatcttattgtatttggatgaatgtattgttctgagtttataatttgctgattatttttaaagaaaacttgttgttcgctttcatgtatgatatagttttttcgtaataataattattatttaatttgatgtacatatgaaataataaaaaattaatttagaattttattgactgttcatttatttgtgcattttttccggtcttcaattttcttttataagaaatttgcatttcccttcatagtgaaataattaattttttattttgaatttttaatacttttttaaaatatatttatttcgtgttaaatctcgatgcatatgtagcttcaatctcatttcattatttttgaaaaatttaaattttttcgggctaaagctgaattttttaattttaatacataaaatttttttgaatttattaaagctttttcgtaagaataatgtttttgataaaattctgggtaactccgccaattttgcattataaatggctccaacatgattttttaattattgtttttaatattaattaaaattaataatattttattttcttattatatattaaatttatcaatctttttaatgattaattatttattatcattttctgcagatcatcttcaggatatttattgtgttttttagataagctaaaatacttaaccattatcggctatctttaaaattttgaaaattcaccaaagatttaatgttaaggtttatcatttatgtctttattttattttaaaacacggaaaatcttaaagtttataaaattattgtttccaatataactctttatcatttaatattttagtaattttttacgtgtgaatacgcttagttcgttgaagttttatagtgcaaaaggttcatctttatcgttataataatttaatactactttattgttgcctttattttatatatatgttatataggttttgagtttcgttgctaaaaccattttctcccggccgaaggccgggagcgccctgaaagtagtggaagggtcttacaactttttgaggcgcatccgggaaaactatagagaaaaattcagcgcggccaactgagtcccagcggctgatttctcattttttcgtgcatttgagggcccctaactttttttctaaaaccctgaccaaaaaattcccgctgtgagggcaatccgcagaagtgtcctctataatccggtattttttattttttgatcagaccaaatcccggacctgtacagacacggagactcagttaatttttttttcccacttcagtaccaggcgaataactcattaggctttgacctgagcgcagggtggccagcagacttattgtagagctttaaaagcccgatttttccaaattttaaaatttcgaaaattttcaaaatttttcgagctaggcctaaaaaacggttttcgggtttttgaattttaagaatttttaacgaattttcccagaaaaacgaagaccacttccaaaacatagtttttcgagctctatcgactggtatttttttcggattattaatatatacgttatattgacaaggagtttcgtttcaaaaactaatttgagcttaacggctaatgggacgggtctgaaagtggtggaagggtcttacaactttttgaggagaatccgggaaaactatagaaaaaaattcagcgcggacgactgagtcccagcggctgatttctcattttttcgtgcatttgagggcccctaactttttttctgaaactcggatcaaaaaattcccgctgtgagggcactccgcagaagtgtcctctataatccagt

SEQ ID NO: 17390 - DNA, 948 bp, Heterodera glycines
  unsure (1)..(948): unsure at all n locations
taaaatggaaatgatcagcagtatgggatatggttcctgattgaccaaagcaaagtttgaaggattagtcaaagaaaagataaataatattcatcgaaatgatcaagccaggaagaatccccaaaattggaccatttggcatactcaaaatattggacgattggcctacacagacaaaataggacaattgggccattcaggcaaaatttgatacatagatgaaattggacgactggcctactcataaaattgctggattgtcccaccctgaaaaaattggacaattggcctaacagacaaaataggaggacaattgggccactcaggccaaatttgatataatattatataatttatgaaattggacgattggcttacttagaaaaattggacaattagtctactcagacaaaatgggagggttgacctattcatacaatttgagattggtctactcataaaaactgagacgataagcctttttgaaaaattggacgattggctttctcagtaaaaatcccatcgtccggtagcggaaaaatcgcaaatgatgctaatggaacgaacatttctttcatttccattgctttcccagtcagtcgtttctcactttttcataaaatgcggccaaatccgtcctgtcctcctcccccttggccattccttccccgcccaacgttcgttttccaatccaacaacagtttccacttttcccttttagccaatcggccacttttctttttttacacaaaaatatttatgcaacagtttaagcaaaagcaaatggaaaaggggagaataaatattttttcatagattttatctgtgcacatatttcgcaatatccttgacattgaagaaaaaaacgcaaaaattgcctcgactttgactacaaaaaggatgtgtacagtctgcaaaaaaggaanagcattngaaatgagtcattat

SEQ ID NO: 17391 - DNA, 1419 bp, Heterodera glycines
taaggtacaaaaaaaatatacttagggctatcgaatgatgcacgtactcagtcggatttggttagcaatgaaaaaaagcggtataattcaaaaactcggctggcccaaaaacgatctggccctgtcattgtcaattttttaagtgcgcaaaaatgttaggcatttcttttttgctgagctctcaggaaaaaatgggcgaatgaaagagaatgggagaggaaagaaagagcttttaaaagcaatgcgtcaataaacgaccgtttaataaaatcgcacaaattaaaaaaaaattagtataaaagtggggctcttccatcgccacattcattaatattatctatatttatttgcttcgtctctctctccgactttttctccctgaaaataccttcaaaatattaatgaacggccatgagtttttctattcatttctgtctatttgaaccgttttttggcaataaagatggattttggttaaaattgaatcttgggctttgttcgaattagggtccgggtttgaaattggtagaaatggatgtcatattcgtgattagcgatccctaataccccttgaaaaacttttaagacaaaatacatttattttgaaatattaaaaaaaaaaaattttttttgctcggattcatttgctgagatattccaaacttatttttgttcccaactgctgaggatttgttaatccaaaaatgccgttgtgtgagaaaagaaaatgccgactccattcacttgcatgagggtatttaacatttaacaggctaaattaatccaaatgaattcaaatggatcaataatcatcggcatttttaatctgcgagaagggcacaaaatggatcaaaaagttttcaaagaatttaagcttaaatagttggcaattggtaaaaaccccaaagaactgcctacacacaaaaattagtttaaaaattaaattgcgttcactgctaataatcattaattaattaggtaattcattaatgatgaaatgaaaatgcgctggtatgaactggtggaatggcaaattgtgtaattaacatgttcgttagcttggcaaaagtccaattagtggatggacatttaattgcagattgaattttgaattttttggttgtttttttaatttccatcaaattcgtttggcaattaattagttttacttttttcgctcggtttaatgagcgtgtttcttactgtgaaagttaaaatgatcaaattaattcacacgattgtaatgagctaataatttgaccgattaaatgtttcaccctttggatataatagaaatcaacagaattttttcgttgtaaagaacgcaaaactaggagattttgtactgatgattggaaaggcaaacaattttaatggaaaaatagaaatattaattaatcattattatcattttattag

SEQ ID NO: 17392 - DNA, 1439 bp, Heterodera glycines
  unsure (1)..(1439): unsure at all n locations
ttaagcanttgagatataaaaaaatcgtctagaataattatctcaacaatttgtcgggaaagctgaataaatttctgttgcaataggcatattggcacaagacataaatgtagagcaggcacaaaatagaggaaataccaaagattaaaaaattcttgtttatgccccactctgctttggctggccataccttgccagagagtggagatagaccctttgttgatacatttggaaatgtcgagcccgcctagcgcattcgaataacacaaaatttgtttgcatttgccaccaaacaatccgcttatgacgcgccgaatgaaaattcacaaaaatttggcaccggaaaaactgcattttttcatgggccagcataataaagtaaacccaaaatgtaaggaaatttaaattggtcatgagagatttttagttttttatttgtcccatcctttttctgggaaaaaacttttcgagaaaagctgaaaaattttccacttgcatcagaagcagactcaaattcttcaacacacaatataaaaatattacgcaagaacttatttttacatcctttttagaaatgctacataaatttttattgtaaatagttacaaacaaactttttttcactgccaatttctaccagttgccaaacaaaaaggcgatagttaagcattgagatataaaaaaatcgtctagaataattatctcaacaatttgtcgggaaagctgaataaatttctgttgcaataggcatattggcacaagacataaatgtagagcaggcacaaaatagaggaaataccaaagattaaaaaattcttgtttatgccccactctgctttggctggccataccttgccagagagtggagatagaccctttgttgatacatttggaaatgtcgagcccgcctagcgcattcgaataacacaaaatttgtttgcatttgccaccaaacaatccgcttatgacgcgccgaatgaaaattcacaaaaatttggcaccggaaaaactgcattttttcatgggccagcataataaagtaaacccaaaatgtaaggaaatttaaattggtcatgagagatgtttagttttttatttgtcccatcctttttctgggaaaaaacttttcgagaaaagctgaaaaattttccacttgcatcagaagcagactcaaattcttcaacacacaatataaaaatattacgcaagaacttatttttacatcctttttagaaatgctacataaatttttattgtaaatagttacaaacaaactttttttcactgccaatttctaccagttgccaaacaaaaaggcgatagttaagcattgagatataaaaaaatcgtctagaataattatctcaacaatttgtcgggaaagctgaataaatttctgttgcaataggaatattggcacaagacataaatgtagagca

SEQ ID NO: 17393 - DNA, 2672 bp, Heterodera glycines
aaaattgataagtttggaatttgaaaaaaaattgggtgaaattttgcccggcgaaattttggggtacaccccgaataagctacctaatttcttcccttttcacagcttggctccctggtgttcacattaccgcatttttttgccgaaccgtacacaacttcgtaccaaattgaaaatgctggactttcccgttgcatgaaaggtttgttttgggttttttttcttaccaaacttattttttattttaaggtgcgcaatcactgcggtgcgcggggccacggcaaatcacggccattggttttgacttgggcgcggtcggctgcaatttggccatcatcatttttgtgccgaatttcatgtgcggaaaatgtttgcacactgttgtgtttgggttgagcggctttgacgccaacgggtaccaagtaagttgttttattctcttttttaagaattcaaagtttgaaattttttaaagttttggcagcaaaattttgggtacatccgttttccgtctgtccaaatcagtaattgtttttttaaattcttacttttccaggtccatctctttcatatgcccaaattttgcggcttcctcaaaagtgcgctgcccgaacggaccaacgaaattgtgtggctgcagcacatgaaattcatcgtattcgacgacactgttctcataaggttctttttcccccattttttccccgattttaatgggtccgtatgtcataaatattgtccgaccgaccaaacccttttaaatttaaatagttaaaggttaaaaaaatttaagggtaagaaaaagaagaaagatttgacataatcattgattttgaaatttctggcaaaattctgactggaaattcgggaatagttcctccggtttcctaatattttgtttttggtttaaaaaaacgaatatagtaaatcttcctgatccattagactttcgaatatttgtttttttttatttcatttttttaaaatgttgccaccggttttttttctaaaatctctcacaattttccagtgccaatttgtccgaccaaaactttgtcaaccatcaagaatcgctatttgctgatcgagactgtccactgttgaccgacttcttcgtcgacctgttccgcctcgttgataatccttccggcggatgaacgcgtcgcgtcggaacagttttttggaaaaaactcagactcttggtaatttttttttaattttctattcaaaattggataacttttaaaggaattattccgccaaaaaaccaccgggctgtcgtccatttgtccctccccaccaaaaaactgggaatgtgttggcaccgaattttttttataaagctgtaaattatgcttaattggtataccatgggagcaaaaaaaaattttcaaaacgtttattaaattttgattttttgagtgaaagaattggtgttcccggtgataatttttttgccgtcgtaatttttccctatcacattttttaaaaaatattgaaaaatctatgtctaatgaaattggtatcatgcgcaggcccatagccgaaaaaaagaaattcaggaggcgaaaagccgacgttgtttttttttggtccctaagaattttttctctggtataatttttcagaattaggccttatggcattttttaaagttttgtccaaaaaagcgctgaaaatttttaaaattttttttacttgtgataggtatcttataaaaacttttctcagattctttttcttgaaagaattcaaagtttgaaaattttttaaagttttcggcggcgaaattttgggtgcatccgttttccatctgtccaaattagtaaattgtattttttttcaggtccgtctctttcgtatgcccaaattctgcggcctcctcaaaagtgcgctgcgctgaccgaaccaacgaattgtgtgactgcaccacatgaaattcttcgtcttcgatgaacactgtcgtcatcacaaggtttttttctcgcatttttgccctattaatgggtccgtatgccataaatattgtctttggccaaaatactcttttaaattaatttaaaaataattattgattttgaatttttgacatcgggaatcgtacctctgatttcctactattttgtttttaatttaaaaaaaactaatttagtgaatcttttgtcaaccatcaagaatcgctatttgctgatcgaagacggtccactgttgaccgactttttcgtcgacctgttccgcactgttggcgacaatccttcccggagacaggtaaaaaaattttttcatattgtttgatacaaaacattttttttttggaaaaaaactcagattttcgatacacttttttcaaaaaaatttcttttactccttgattgttgtccgaattgaatgagtataatatcattcaatggtcctaattgtgattacctgttggcttcaaaattggataaattaaaggaattattccaccaaaaaaccaccgggctgtcgtccatttgtccctccccaccaaaaaactgggaatgtgttggcaccgaattttttttttaaataataaagctgtaaattatgcttacttggtctagcatgggagcaaaaaattttttttcaaaaaaaagttaaattttgaatttttgagtgaaagaattggtgttcccggtgataattttttt

SEQ ID NO: 17394 - DNA, 2168 bp, Heterodera glycines
tctttgattttttgttgaagattttcagccattcttggaatcacaatttttcgaaaatgccattcactgcgagtctgaataatatctcattctaaatagtggctgactgtcaaacctcaaaattagggtatgcacgttgcgttaattttagaattgaattttcaaaaactgaaaaggcgcagttttgctggaccataaaattagtcaacatttcctcaacttccttttgctcgtcatgttttttaagtaaaaaggaatcaattgtctgaatttgttaaataaataaaatagccttaaattattaccttattttttgaccttttcggctcctgtaattgcaattctttgtattcctttaaatgcatcgacttcaaatggctccacattcctttggtcgatgtatcgcttcggttcaaaaccttttgacataaattgcattgtacattcgttgattgtgaaattttttcgaaacaattccaaactttagaagcacaaaagtccatttttgcctgatttcaagaaaaatatataaaaaaagttgtgatttgaaatatttgttaaataaaaaattggaaagtaaatttatttattttgtatcatcagctaattaacaatgcatcacacatttttattttcacccccgttcccccgcgggggtgaaggtcgcgggggcgggggttgcgggggtcagagtcacgggggcgggggtgagcccaaaaaacctgtcccgcccccgggggcgggggcggggctcgaaccctaatttagaccggtaccttttaaattataaaccggttgaagcacctgcaaaacaaacacaatccgtcggtacactgaggaatatacaattaattgtaaaataaaattacaaaaacacaaccgtttagcgacttaaacggtttaaacggtgaataaccgaatttaaatgggttgtaaaaactgcgtaagaaaatacattggtaaaatatgaaattacaaaattgcaaaaacacaaccatttaacggcttaaacggtgaacaaccagtttaaacgtgttgtaaaaactgcgtaagaaaatccagtggtaaaacatgaatttacaaaattacaaaaacacaaccgtttaacagtttagaccggtaccatttaaattataaaccggttgaagcacctgcaaaacataaacacaatccgtcggtacactgaggaatatacaattaattgtaaaataaaattactaaaactcaaccgtttaaccttaaaaaaaacagtttaatccggaaccttttaaattataatccggctgaaacacctgcaaaacacaaactcaatccgtcggaccacaaaagaatagacaattgtaaaaactgcgtaagaaatacaatggtaaaattatgaaattacaaaattacaaaaacacaaccgtttaatgacttaaacggtttaaacggtgaacaaccggtttaaaacgggttgtaaaaactgcataagaaatataatagtcaattttcataaaaattggattaaaattcccgaaaaaattttcctggcggcgcctaacgacactggacttccagaaaattgactgaaaattggattaatgaggacaaaaaaatactaacaaagaccagcaaatttaaacaaattaaattatttacggactgaaatagattattaatcgactatttctatttgtatttatttttcataatttatatttcttatatttctaaaataaaaaaaatttcgacaaattcttcttttttcttcccttcgacgaaaattttatacactggcaaaaaatttgtggcgcgctctaagtttctcatttttgatcaacatttaattttttagcattttttattaaatatttttaaaaaatttcatgctttttttttgtaaatataaatcccagtcccagtaatgaatattttaatggtgagagctataataaaacatttttattgaattggaaaatcaataaataagcaagcatttgtaaagtacaaattttctcattttttattcttttttttaattatatatttattattaatatcttttttttcatttccaacgaaagaaaaatgtatttattatacttaatcctattttgtatacaattatttgacctatttgacgcaatgaataatggacacaaaagattgccgtcaagcagtgaaaaaat

SEQ ID NO: 17395 - DNA, 3270 bp, Heterodera glycines
  unsure (1)..(3270): unsure at all n locations
cttgtgtgcttcaagggtgggaaaggaaaaaaagaaaggttgagcgaactcccttcggacgaactcttcttagcccacggacgggctcgcgcatcgatcggtcacacgggactccctcacttggagtgcccagctcgccttagccctcgcacgggctcagcacgttaaaacgggactcctgcctccggagtgcccagccgtcccatttttctctcccttcccctccccaacgtcctctctccccctccgagagtcggaccatcggacatcttcagcgcaagacgggagaagcacgctcccggcagttcaacttgtgggattagcctaggagtcccggcttctccaaattctaagtcggtggtgccgttattcacatcactcggcgccctcgcctgcgccttttgctgacagtactcaagcccaagggagccacctctccctttgccggccactgccagcttcactcgttcggcgcctctgcctgtgccgacgatcgcagcactcaagcccaagggagtcacccctccctctgccggccgctgcctttccttagggagtccaatttctcccgcgcaaatctttgtttgcctccccgacccctccgcctcactccccttgggaaagggacccggacggcatcgcgaatcggaacggcaatttgaggagtgaggcggtgccagtggaacgggagaaactcccgaccgaacagaggaaaggagttttcgccacactttgtatgtaatggaattttgaatggacattttcccattatagatacangttgatgagggntccgcttgtaatcgaatggatttgtgctgangtcgccaacaaaaataaaattataaaacattatntctatgctttatcctattctatcatttttgttttatcatcacaaatacgtacaattattaattatgcaataaataattaattatgtattcattcaccttttacgccaaattgtccgatgaaaaagtggtggaaatttgtcgacgaattaatttgtgatgattttgtcaaaatgtaaaaaagtaaataaattaataaattacttttgtcatttatcggtgtccacaatctctgctatggtcgtttgtccgctttttcttctgttggtggcttttcccccatttttttacacgtcgacacaaaaaattcagtgattggtccaacggattcaccccacatcaacaaattccatcccaccactttcattcatttcattttatttaatcatttgggaaataatatttattcataaaataaatcaaataattttttaattttcattaattaaatagtattaatattcattaattaattaatcaattagacaatgaactccttttctctattgaccgtctttctgagcttggtcattaattgctcaccgatacggtaatttcttaattgaaaataaattattatctttgtaaatttttcaaattttcaatttttcagccctttgtcatccgacgttggcatttggaaaacgtgcaatggcaaaaatgggataattatggtggaaaatggatgtacaaagtaaaataattgaaaaaatatattttatttatttttaatcattttaggctccttctctgctaccaaagcgaaatggccaaaaacaaaaaaattggaaaacgttttggggtgggcaaaggaaacattggcaaactgaaatttgtggaatgtgccgaagagattgccgaagaccaatggcacggtctgatcattgccaagcaccaagacggagtgatcagctacgaatcgaggcaaatttcaaatgaaaaatattttaaaatttggatttaattaattaagccatggattcgacgacattttcggcaccgaacaaataaaacaaacggaaaaatatttggaaattaatttgaccaaaagtaaagccaaattaataataatattttaatagtaattaccattttacagatgctgaaccacttggaaacgaacttcaagaagcgctttcttctgctgcatttttggacgattttatgccatttgttttggcatttgaatttggcgcaacattttgcgcagaaaacggcggcaccaacaaattgtgcaaagagaaagtcatcttttcatatttaaaattcatattttaaaataattttattttttagtgccttacattggcaccgtttgttggcacaaccaaatcccatggcaaaacaacagtaacaacaacttcaatcccaacgaccaccgaacggcaaacatttgcatttgccgaatttgtgccccattttggcacgaattgttcgaaaatcgttttccccgtggaagtggccaaattcattttgaacatcaccgcagtgccctaccgaattgcatgcaatgtgtatgaacaacattacgagatcggacaatcggtggaggattatttggtaaattcaaacaaaagttttttcatgcttgcatggaagtgccgacaaccaaatgcgcaaagtgattgaaattccggcaaaaaattaggtgcaaaattctcacaaattgtttttaggcatgtggaactgagcgcatgctataaaagcatgaaaacagtggggccaaacgacaatgtcgtcgccaaattatgccaagaccatcttaatgaatcgaatgttgccggattttctgtacaaatttgcatccatcgggatgaaaaggaacagaagcttgtctttgaaacattcttgaacctttccaccaccaacgaattgtatggccaaataatgagagattagatgatgtaattacttaattgggttaattaagcatcaaaatgacgcgcaatttcccaatttccgttgaacaaattatggagataaaagaaactgttcccattttctttctcgaatttggcaccgatgagcagcaaagcgcaatccgagaaaaagccaatgggaaagtgatcagcggaccattgaatgaaaatgtgaaaacaaatggatttttataattaatttaaaataaagccaatggcatttgccaattattttttaatgaattaatattaaattgagccaatggcatttgccaatattttaattggaatttagtccaatggaattggcaccgttctcaatgacatcaaagcagaaaaattaaatgaaaatttggccaaaatgattcatttggtgccgccttatgctgatcaaatgctggcattcttccagattccaatgcctcggttcaacaaacggatcagttatcggacggatttgaagccgtacngaaatgatccgaaaaaagaagtaagaa

SEQ ID NO: 17396 - DNA, 1478 bp, Heterodera glycines
  unsure (1)..(1478): unsure at all n locations
tttaagtctgcttttgacnttccaaatgggtcgatgttccgccncctgcgataccgtacntaagtccaacggtaacattggtgtgctacggtgatttgttttgtaacaaggaaatgctgcaggaagactatgaccgagcacgcaaaagtgggtttgggaaagaagcataggcttactgtagttgattgtttacggtacaaaagtgggtttgataagtgtagtataaacctactgtcgttggcctttacattacaaaaggttattttgttcttttgattggaatgaatggaggggattacttactgtaatctttacagtcagtagaaaatgggtccgtttttcactgggggaggggcggttttggataaaattcgggattagtcccgacgcgatatccctcccgtccaacataatcttcaaaaaacggggtgttagcaaatggcgggacctaaataattatgtgatcaatcaatcaatcatcatcaatcacaaaggatgcgggctcgagcctgaaaatctgatcagccgtcggcggaaaaggcaatttcgtccgtttcatggcacacaaaagggcaaatggacttcgtttccgatcgtgatcagttttttggaagataaacgtaagtcgcctttaaaattgaaagccaaaatttatacattttaaaatggtttcagtgccaaaagattaccgagcatgggaagcggcgataaaagtcggtgccgacatgataatgtaggtgatcaaaatggaaaaatatttaatttggtgaataattttttaaattttaagaaagtttaaattttacaagaaatttcataaaaatttttatatgaaaaaatattttttgaaatttacaaaatcaaactatatcggaaaaatattcaatcttttcttaaaatctttgcttgaagacccagagtaagattctcgagagttttttctttcaaaattttaattttctctaaaaagatttttcgtcaaaaaagtctcataaaaatttataatattttgaaagcttcaatcaatgggttgcttttataaaacattttttgccgtgattaaggagcattttgtgctaaaaataataatttttggcgtcaaatttgttgtgtaaaaattttcagggcattttgtttcgcttaataatttgtgccgttttttgaatttctaatttaaaatttgtttatcctttttaattttcaaaacaggcaacacacatgcgttcaattcaaaattgttaatgttgaagcaaaggacaattacagtgaaggcattttaattagagaaattgagtttgccgaagctcacaaacttttaaagatttgccgtaagttttaagaaatgatttttaaataaatcagaataaaaaaattgaaaattttggaaaaaattcttaaactcttgaaaaatagcgattttttttttcgaaaatccgcgcgaattacagagtttttttaattcaaatatcttttgagat

SEQ ID NO: 17397 - DNA, 3244 bp, Heterodera glycines
  unsure (1)..(3244): unsure at all n locations
cgcctatcggcaacgatggaacncaaaancactttttctgcccaaaattttattcctattaacttgatttagaattttttaaatttagccattaaaacatttaaaaatttttaattgattttatacagtttcagaaattccgatcttccgaaatttttgaggctaggaattccgatttccaatttccgaaaatctttgggcctcggaatgccatccctggtatatgacataggcattatataattgcgaacattttgggcacaagattgttattgatagcgttataacgggtggatgagatgaagaatcccagcgtcggcattgcgatattccttttcctttggtgaccatcagcagtttcgtagcccataatttttttcttacttgatcaatgcttcattttggtatcaatcgaaagattaaagtctacagtatttttatataactaattatcggctatttaattagatagttgtttataaaatacgcgaaaaagttaaatttaggatctttggttgtaatttttttttcctcgtgatgtttcattttgtagttattatagttggttcttaagttagcaagatttcatccaaaaatttgttatttgctatgacacttttttcaaaaaaaagaagaatactcgtagaaaattgagtcaatcaacctttaaaaaagttcgttttgatccaaatctgttaactcattgaaattttaaaaaattttcggggatgtttgacaccgtatagccataaaatgttctgattttataaaagtaaaatatttatttattttatttagcatttttcaaatttgtctaatcggttctgtcgtccgttggtcacattccgtgccgtggcattttcctcctcttccctccctctcatcattctttttggttcttcgaaatggtgcacactttgagcagtttgatgtggaagcacggctgttcctgttggttctgctgcagttgttgctgtccctgcttgttctgcccctgttgcagcccaattcctcctcctcctccctggccaacattgccaatgtttccgcccccaatttcttctgacggtgtgcactgttctttgaagggacatcgcgtgatcgaattgatcaccatcagcacgggttcacattccgtctacaaatatattaagtggataaatttaattggttaacaattaaaataaatgatttactcggatttcttcgggcaattcttgaacaagttcgacggacttcttcactttgtcaatgaatgggagggagccgtccaaaaagaggtcttcgagctaaattcgatttaggacaatatttcactgtaaattatggtaattacttcgttaattttgtttttaattttgcccacctgatcagcggtctccttagccttagacgaactcagcttctgcttcgcctcctcaatgttctgcttgaactggtcgtccgacacattcactttcatcagcacgttgtcaatgtttgcctaaaagttcttcattatttaaaataaataggatggccttgttcatgaaaattgtgatcggaaatgatcgaaatggtgtgattaaatttctttaaaccaatagggaaaagttggtttgggcgagcctcaattgaaaaactaagttttctgtaagagcaatcagttttaaaaaacttagtcataggccacttgcttattatttggcaaatttagccccgaaatgattaaaatttgatcaatccgtgccttcaaatcgccaccctgctcctctgccaacacttggaaggcggccacttgctggtcgtccgacagattcttgcaattttgtgccgtgtccatcagcagttcaatctctttggggttcaagctcagcgtaacgctgggcgtgaaaagacggcatttgcaaaaggcgcaacgaacgcggcgagaacaattggcaaaatggagagcagagaaagcattttttgaaagggaattcggaatttctaataacaaaaatagaaaaaaaatgtaaaatggcaaattttttgggtgtgctgcttaaatagtaacacaaattgttttgccccgattgatcagtgatcggaatgaatcaacgaatgaatgaatgattggtgcgcgcagttgtaacaatcatcaatcagtggcaacggaagggcaaagagtcaacaaaaacaatttgaagcgcttaattaacttttacagagttaaagcaataagatttaattttttacttctattagcatttaaattcgattttttttttatctaaaatgaatatttttatgataaaacttaaatcaatttgggtaataattataattatcgtattaaaaaagaattttgcttttcctaattagtgcaaaacatcaacatattgcaatgttgtttcggtcaacaattccacaaccaatcttctcgagaatgcaacaggtttttgtcttttccttttatttattttcacttcacacggcaatttttgaaaaacaaattttgttgttgactttaaaatgacagaggtgagggcaatggaaaataataattaatttgcaaatgttcaatttaattaccattagcctttttggaatttctgttgagacattttagcaaaaatgccgtaccgttagcttccatattgctcattttacagagttctgatgaaatttcaactcattcaaaaacaattcaacaaatttgtttgaagtgataaagtttaatggtttatattttttatcaaataaagcttataaatcaaatgtttttagcaatgtttttatttttgacatcaaatctatttcgttcgctgtttcttcagatattttgatttttcgatcggaactctgatccaataaaaattattcaactattttttatgcttctctctccattgtacttttgtatcataaaaatctggaagcacctagttttgaaatttcagacttaaatacaaagcgatattaattaaacgccaaattcattaaacgcaattgagcttgtccttaaattattcaaagtacaaaattttttatttttggtaactctctccaaaattgtaacgcaaagcggtggttcgttcatcctgcggcgaagataaagcgcgaatttgtcaatttggtcagcaaaataggatgccgccgcctctctcgagagtattaggacaaggtcaaacgagctcaatttgataataatttttataaatttttgaaaaatcaaagcaaactggcaaatttcaagctggcaaaacctgncgctgctgactga

SEQ ID NO: 17398 - DNA, 3478 bp, Heterodera glycines
  unsure (1)..(3478): unsure at all n locations
acaaaattttnttgcgtcatctatacaaacactacattactatattgaatgcttacgctcacatgaaattaaaattttcttttgttgataaccctccccctcaacggaaaacggaaattgacctctgtctgcatagccatggccttgatctgcatttatcacgatcatcacccaacgccaatgatttgaaaatttccaagtttttgtttgggagggactcagcaaaaagttgagagaccgaccgaccgattgatagactatttttgttttccgatcggtcgcaatttctgtccgtttcaattttatctttgccgggcgatctttgtttgaatgccaattttgtcatactgccgccccccccccccccaaaaaaaaaaccaaggccgatgaatttgaaccatttcgaggccataggttgactgtgtggtgcttggtgggtgtttttaatgcagtaatttttacccattctaaacgattttttgtgtgtgatttacacaatttttgatcattatcacccccggggggatcttcgcctttttcatggggtggagaaggaaggaatttgtccatccctcgcgccgagtgcgccccggcgcggattgactcggtcggctgagcgtcggacaatttggaacattcatttttttgcttcatgttttgttatagagcctagcttattaaaagcattcatatgatatcaatatgtaaaatttacgtcttaaatgggtctggcgcgttggcgctcaaccggcgccctgtccacgcctcgggcgaatttttcgtggaaagtttcactttacgtgttacgctttcccaccccaccggctcgcggggtgtgacagttttgggctaacataaacaaacacaatggataattaattatctctaattatcactaattaataaaataatttttcattatttgaagaaataaataagtgaggaaataattttgagttgttttctggccccagaaaattataaatttcgcaataataagcctttattttgtgcgtttaactcagggttacccttgaaaatttcccgaaataaagagcatcgctggtcaaaaataaggacatttttttaaaacacgcttccaaaactttgaatcgcttttttattcaacaaaatcaagcattactttggtaaatttcagtgcatttagaatcaaaaaaacagatttttaacaattttttcggcgcatttttccgaaaaatttttgggtatgggtgagggaagagagttcggcggtgccgataggcgccgccgagggaaattttttaaaaatttaatgcaatttgttaacaagttctgtccaaaaaatgaccaaaatttgcgatcttgggctaatttttaagaaaaaataggagttttggggggccggcggtgccgataggcgcccctgggggaaaattttaagaatttttaatgaattttgttaggaattagccaaatttttcagaaatttcctcttttaaatgaaaataagacactaccccaaatcagaacatttcttagaaataagaacagatatgcccctgctctaataggcgccgccggaaaattttgtaattttcaatgcgatttcttaatgattttgttcaaaaaatgacaaaattagattttgagctaattttttttaagagaataagaaaccgccgagagaaaaatttgaatatttaactgaatcttgttaagattttgcatattaattcgcttcaaaaaacatttctttcaaaaattatcatttaaaaatctaaatttctccctgaatccaaaaaataagatgaaaataaggacaaagagcttaaataaggacaaatcttacaaataaggacaaagggtaaccctggtttaactagagaattcttgcttttatcatttgcccgcttatttttatcgtctgagttagattttcaagttttttagcctttgactaagattttgttttgttttctcgagtttctgagtttgaatttgcggtctcgaaagccccaattttagaaaaatagttttcagtgctgaacataaaaagcgcatcgataaataagcaaatgtacaaatgtttattttgttaatgttttgttttgggaaataataatagagagaggcataaattgtgacaaaaatagatgaatgataaattcaattagagtccattgatttcttactgtatcctacagaatcaaaaattagaaaaatgttggtttttttatactgtaacttattttatgaattctttttgcaggaatcatagttgcttgccttttaatgcgcttttattcgccaataggaaccatagagaaattttttaatttatataaaatattgttaaaattttttagaaggctttatccatcaccgaaatttcgtcaattaaatggaataggatatgcgggaaatataatctatatgaattggagttgctaccgaccgtcgggaagagaatgtcggggatcatttgtcgggggatacatagctagagaaatgcttctcagtgacagtagaatcggtgattacctacaattaaccctggtttttggggtttttagaattttgccatgccaatgccgtgcaatcttgaaaaatccccgaagcttatttctcaaaaggcgatactttttggtagggtatatttttaaatccaaatttttaataattgtaaaataagactaaaaatgaattttttggtccgctttttgttcacnaatttttgcacttttttggccgtccccacccgccggccatggtttgcttttttgataatttcattgctggtgtaaatttaatgccccccatggcattatccggagagaaagggatattcttcaatttcgttccatccccttgcttgctgtangccggcctaattaactccattatattcaaataccgggggggaataaattgttggcattttctatgaaaaaggggaccaaaaaaaatgaaaagtaaccttgaaattaacaaaaaaaaaggcaatttttttcttttgttaaaaaaaaataaggtttgtggaaatgaaaaaggggggaccttaaaaaaaaggggaaaagaaaaagggggaaaaaaaagaaaaaaaaaaaaaaaaaaaaaaaaaaaaaaggggggggggggggggggggaaaaaaaaaaaaaaaaaaacaccccccccccccccccgcgcggggggggggggggtgtgttaaaaaaagaaaaaaaaagaaaaggccccccccccccctctttaaaaaaaaaaaaaaaaaaaaaaaaaaaaaaaaatatttttttttttttttttttatttttataagaggggggggggggggggggggggggaggttttttttttttttttcttttttttcttctctccccactacaatatatttaaatatttataataaaatataaataaaaaaaaaaaaaaaggagggggggggggggggggggggggggggggcggggggcgcccccccccccccacccccccccc

SEQ ID NO: 17399 - DNA, 4294 bp, Heterodera glycines
cgctgatccgctgaaaataaagggcggccaaacggaatggacattgtgcaaaccttgaaaaattttttaatttcaaaaaaaaatttaaaatattttgaaattttacaaaactggccaccgtgcaaatgcaaacgccaaaaattgcaacatttctgatggattcggcctccgccttcaaatcgtgcatttctttgcccatttttagctttttaactgaaattataatataaatataatttatattttaaagttataaaaatagacaaactatggcaatttgaaaaacaatgaatttttaaaataaaaaataatatttttattgcaaatttatttacatatagtgtcaaattctttcattttaattaaggaaacaaacactagcaatggcaatgaaaaaataaatacaaaacttaagactaattttagattggcaaatcttaaacaaaatgagcttttcaactttatatgttggaaataaaaatttttcttgtaaaatttgtaaaaaaaattttttttgttattatttgaaaaagaaaaaaagaaaaattcaatggttcatagcatagataagtgaaacttcttttttggacatgtgtatttatacggggttacacataagaacataagtgggcagagcaacacggggtcaattaccgaaatgattaattgctggcgctgagaaaaggcatcaaattaatttttggacagaatgctttgtcaagaggtaaatagcagcagcactaattgaggcacttcttaatgatggaacaatgaacaattagtgcacctaattaactaatgaagtgacaaaatgggcggaaaattaagaaaatgaacacacaatgaaatgtacagagaacagcacataaaattaaaataaaatcagaaaaaccacatttttgagtggaactacttattttatttttctattttttattgttttatttctcaatcacaaaacattcgccgcggggggtaattaggcggtgcggcggacacggaagacaagcaaaagacaataattaatgataatttatttggttgcatttaattattactcaatcatgtttttttggtcgatgttttgtcaaatcgaaatttatatggtggcgggtcaattaagaaacaaacatataaaagagcgaaaaaattttaaaaaacaacaattagaataaaaagcatcatttgaaaccaatacaaataagaaaaacgaaaaattacgaattattttcctttttccatctctttagggtggcagttccaattttcaaaatgtcagcaatttctttgtcacttaaagaaggatttgcttttttcatttcataataatcattcattttgctcattttttgttcttcggtgaatcgaattggacctaagaatataataaaatttaatattaataattaaattgaaaattaatttcaaatttacttttgctcatttcaatgccaaattcctttttccattttcttaatgtttctttgctaatgcccaactctttcgcaaattgcttctgtcttccattttttggcattcttttaatttcatcaatttggtcaataaattcctgttttttctttttataataataaattccaatttcttttttccatttgtaaatttttggtcgattaattcccaatttttccgctattttttgctcagttttattcctaacttttgccgaatattttccccgtttcttaattccttcttttattgcatgaaatttgtgaataatttcgtttttttgttgaaaatccaactgatcgttctgatcagttgattcattttgatcattttgatgaaaatttgcattttgatcagtctcattttcattttctccaattattatttcattttgccattcttcgccaaatatttcagcaaaagttggtcgacattttttacacagattaactgacaatgttttgtcagttgaattgtttatgattaagaacacaaatataaaaaggagaaaaagcatcactaaaaaaatataataaataattaataagtttttaatatttttaatatatatatttgtattaaaattaagctaatttcttcggaaaataattttttatttcattttaatgaatgtggagaagcattgccaaaaaggcgatcaataagtgaaactgatcatcaatagattttcttaataataaaatattaataaataatattaaaataattaaaagccatgaatttcatcataatttcaaatgccatttcgtaattacgtcccattggatgttttcacacttcatcactagggcttcaatttttatttgctgagctccctatggtctgaaatacacgaaaaacaagttgttgttgttttttggtggttgttaaggtacttttcgagttattagggcctattttctaggtttttctttttagagcctaaagcctaaaaaatttaaatttatataaatcataaaatttttacaattatttgtcggtcacaaaacaatcgccggggggggagggtaattagggtaattaggcgcgacagacacgaagacaaaaaaacgcatcactaaaaaatttacaaaattaattaataattaattaataattttattaaatatatttgtattaaaataaatttaatttcatcagaaaataattttttaatttcaaacgaaaaattaaaaaaccgatatagaagtcgaccctcctctatccaatggtatatcatttatatgcattttccgactgacagctcggaatgttcccttgttaataaaattaattaattgtgccatgaatttcataaaagaatcataattttaataattgaaaatttatttaaattagaaaatttattgactattaattatcttttcaaattcatttaatttattggtaagactttaagaaatgggtttttcgagttgaaatccaaaaaattaaggactttaaaatacttactcttaaaaacaattaaaaaaccacaaaaacaaatttaaagtcgtttttattaaaattattccatccttcaaaacaaatttttaaatcgtggcggaaaataaacgatgtgctttatttgaatgcttagttaaaaataatagtgatggaatgaattcaatgatgagtcgggggcgtttgggccccagtttttgggcccccgcgtttgggcccccgtttttgggcccccgcgtttgggcccccgtttttgggcccccgcgtttgggcccccgtttttgggcccccgtttttgggcccccgcgtttgggcccccgtttttgggcccccgtttttgggcccttgtttttgggcccccgtttttgggcccccgtttttgggcccttgtttttgggcccccgtttttgggccctcgtttttgggccccagtgtcgtttgggccccaagtacagaaaaatgaaaaatcacagtaaaaacaactttttaaatttcagcataaaaatgtaaaataaacattttaaaaataaattcaacaataattttaacaataaaaaatgtaaaaattaacagaaattcacgggttcataaggtaatttggacaataaaacaaaaaatcacggttcattcgatagttgcgagaaattcccaggagaaactccaaaataatgtgaaattgattttttgaactcgcatctccaaaattttgtcatcccatcagaactcattttagcgaaggtgtgaaggtggccttcgtaagacaattttactttttgttttttggttgcaattgggttagccatttctgaaaaatgtccaaatcagaatgtacatcaaattggttaactattaaaaaataataggatttggaataagtaaaatggtaaaaaatgagcgaatgttaattaaacctaacttatgccaagtggcgagggatccctcaggcttagtttatagaatcttaatttttttaaaaagcacatttttctatttttgggctggggcccaaacgactccggggcccaaaaacgggggcccaaacgaccccggggcccaaaaacgggggcccaaacgcgggggcccaaaaacgggggcccaaacgctctggtcccgatcatttcgtcactgatcgtttcgtcactgttcagttcgtcattgagaaataatttttaaaaatgttgcaaaatgtcataatgtaaattattttcgctaataaaatatttttatttcggaaatggttattaacagggctgccaaaaatatgcacgaaaagtgaccaaaatatgcatataaatatgcaaataaaattgccaaatatgcattaaatatgcacaaaaatcgcaaaatatacacgaaa

SEQ ID NO: 17400 - DNA, 2000 bp, Heterodera glycines
aacggaaaagtaaaaaaatcacccaggccgataaaatcatttgcatttttgccatgtcccctaacgacgttccatcggcaacgggtgcagtcaaatccacttgctcctcctcaaattcgggttttggaatggtgttaaagaattcgagcagttcaacgaggcgatcgtccgaaattgtcagcacaaggtcaggcagttcaccaatgagacggaacctgattatgagaaaaggaaataaaatgcataataacatatggaatttcttcagaaatttaaaataaatttcgttgtattggaaaaataattgtcaaaaataagtaaaaaataatcacatcggaatttggacgtcatcgatggtggctctgagcatgtcgatgcacatccccgtgggtttcagcaaatggtcatccgacgatttgtccccccgggccttcatgcaattggcaaaagagtcggaaaagatcagtcggagattggagaggcgcagttggaaattgtcgtatgccttggccaccaatgaacgcaatcgctgatcggttatctgcaaatattattattttcttaaatttaatgatgcccttagcaattccctcacatgttcgtatgcctttgtggacggctcgtccaaagtgttcagtttcaattgaccaagttcggcgattaatgtcgtttttgttgggtcaaaagcaccgccggaacaaacgacaaaaatggcagggtcaattttgaccttcaacttcagcttcttgcgcacgtcaaccatgtgctgaagggctgtcgcagaacgggcctaaaaataacattagttaatgagttatgattaggtaaatttgctaattgtaagccaattgccttgacgtcctcgtaacgcgcaatggccagcgtagtcagttggtgaagacggacagattttggcggtctaaagacgtcgagtgctttgttcaccgccggggcatggtatttgaacatcacctaaaaattagctaggttatattttttaaattaaaaaaacgaatgttccaaccggagcaatgtttagggaaacgcgttgatcaaagtcgccctctagcggatttgtttcaaattccaaggtcaaccaagcccgatcagtctctgtcatgtgcagcatggactcggtgccagcatgcatttcaagtgacttgacggcggaagtgaagctaaataggcgaataaccagaaaacttagaaggattaacaataagaagtatttaaaaggtaattaattagctttggaacctaaaaaactcataaaagtggcaaaatgttgttttaccgcattgcgctcgcagccgatctctgctccaatttagcggacagttgagaaaaacgcagttccatcacatcatccaacttcagcatgagtgtttttaggttcaatttgaacagattttccacaaaatgcttcggatagtccgtcggtggcatattttcctgacataattttgccaaatttaacatttaaattgccattttcactctcacttggtagtcaatggcatcaaagaggcgctccttctcctgaggggtcaattccttctccaatttttcgaaaatttgtgcgtcttccggagcagccgcctctttgccctttggcgaaccgccgaaccaccaatttttggcccaaccaacccatccctcctgcggttggtcctcgacacggacgaggtcagtctgtttgtcgatttcgaactcggcttgttgtcgcgcgatgttcaagttgaacacgtccagcgcatcctcagcctcctgtgaacagagtaagtgcttttcagagtaaaaaggcaataataatatgcgattaaattttaattgaacaatttgaaggggaatcagctgcactgtctacctcaattgtgtccatcaccgcttttctgggcgttttgtgagttctgaagtgaatccacgcctctcggtagtccctcaccatttgccgatgctttatgattctgtcccacgaccaattgtttcggcgccgcaag

SEQ ID NO: 17401 - DNA, 1113 bp, Heterodera glycines
  unsure (1)..(1113): unsure at all n locations
agaatgcaattgtatgcaaaatgccanccngaaantngcanaaataataaatntagtntaaaatntaaatacacatgacagaagtgcttaccattctttgtagtgctggcgatagtgtgtcagattgggtcgatatttgaggaatttctcggccaaagtgaagcgctcttgggcctccagaaacagaagccatgtcctggtactggtacttgccgatggacagtcccaatttgtccaattgcatgacaaatcaattttgggagtggtccaatttgagccgtcactctccggcttctgattcagcttaagctgtgcagcaatggtcaacggttccaaccactgtggaaaaaagggcaacaatttcttgtttttggaaatgccaattcagtacccaccgtatctgtacccctcgggcttctcctcattaactgcgattgtccgttgcaaagagttgattatcttctctttgcctttgttgtcggagatgaaattggagttggcgtttgaataaatgcttaaactgctcatggacaccaatctaaaacaaaactgatgatacaaatgaacacataactaacaaataatgataatagtaaaacgatgtactcacttgtaaaagattttgacagtttctttctgcactatcagtttgaaattctcatccgtagtctaaaaagttgctgtagtaaattatttatccatcgtttcgcaacacctgaaaattcaacgagtccaaagtaattcctgtggcaaatgggcgctcgcgattcgagaatttgtcctcgtaacgaatatggacccgtttaatatgcacttggagatttttgataatttgtgctattaatttctcggtaaaagtgtcgtccgatggcatatttggctctgaaattttaaattggttaacaattgaccctttttgtcgactttggcggcttcgtctgttctcctccaatcgtaacaattttttctgcttggcttcacgctcatttttgtgcgctttttctgcgctgtaaacaatgccctgattcggcataatgataagatgaatgccacttaaattttaaaaatttaatggttcattggtttatttacgtactgcaacgcacctaatct

SEQ ID NO: 17402 - DNA, 2952 bp, Heterodera glycines
  unsure (1)..(2952): unsure at all n locations
tgctaacaacctatcttcattatcaaccaaattaaatatttttgttatcattcgatagcttttgagatactttattagcctgcaaaatttcaaaaaatttagtcagtttataaaaagagcgcacccagagctttcgaatgatgccagattagctaaagttaatgacaaataaaaaagttatagcgtttcaaaatttgcggcgccgaaatggtctgcgccgaagtgaccccgaccccataagcctcgccctaaactaaccttcaaaaattgtcgcaccccaagaagccaaatgataacgctatggccgacctcatgggaggcggtgccggctttgtttgagcggcgcgtcttccgggaagtttcggcaaggcgcgcgaatttgttttcccattgcctgcgcatgtggcgctggatttttctatttttttaaaaataaacaactttttttgccattttctgttgtgctaaatgctttaaaatgtaattaattattaacaaaatgaaattgttgcttcaaatgccataaacaattaatccctgcttaaatgaattaagcattttagtaataatataaacttttttggcgttttgtttattgtttttcaaattcaggtgctgctacgatgggtgcaaatccgcgagttgtcaactgcgtgccgccgacagcgtgccagccaattcaagaagccgtgacggaatgattggatcggcgtggtgggcgtaagtttgcatttgagtaaatcccattgatcacttgtaaattactttctaattaagtgccaaatttcacttattttttccccatttttaggtttgatcacatttggatcacatttatttatttttgtttttatttgattgtgtctacagaaagggccgaaacacattttctttagcattctgacagggtctgtactgatgaggcccgccctgtcacaatgcaattgcttttcattcttggtattattcgaaagcattcgaaaaatgctattagcctgcaaatttttaaaaatttttatttatgcacaaaaaaatcagagcaaaaaaaagttcgaattaatgggtttttgagttccttctggccataacttttttgaaacttaaccaaaatttttgagattttgcaaattaataataaacacatagagctatcgaacaacaccaacaattcttaatttgattgacagtgaacaaagttatggttcaaaaagtcttccgacaaattggcaataaggtgaaaattggagttgcaaatgttcggcaacgattcaaattgtctcacaaaagggcggggcggagaatttaattgggcaattcaatggccgtattttcaacaataaattgaacaatttgggattccccactttcatcacttttgcggtgagctttttccattcgtaaaccctcatttaataaatgagcataattaagcaattaatggacccaagcagaggattttatgacaaagacggggacaaagtgacattggccgttgacatcactgtggaagaggagaaaaaagggacgaagcgcaaattgtcggatcagtaaaattcattcatatttttaattcccgacccctttctttttcccactaattcatgtcaactgtatgatgtcatgtgtagcaattctttttattttggcattctctcattcatacatgaacaaggngtgcgtcggcgcacccccccctgcgccaaacgtccgacgtatgggggtctgactggcgcaccccttgtacatgtatgctctcatttttaaaattaattcctcaacactttactctctcaggttcccttactgcctctgaaggtaacagattatccaacattttttttttttgcttttaaatataaaaagataaaatttcattttttcaatacatatttccgttgaagaaaaataatccgcagatttatgaccaataaatccaatagatttgcccttaccgatgccgaaacgtatggtcttggcaaaaacttttttgataaggtcatttgcctgaaaaattttcaaaaactactttgctttgggtacagtatatgtatgatatactgaaaaaaaaaaagttaattttaaactttcgatcccgtcgccgaaatgttcaggggaaaaatgcgtaaatttttcttgcacattaaataatgttgatgtgcaataaaattgtcaaaaatcaaatttaaatcgcaaaaaatgccaaaaaaagttcgatctttcattgttgttaatttcaaaagtcaaaacttaaagcgacaaaagaaagaaaagatataaatttaatgaattttttggttaaaaatcagaacaatttgcaaaatagctttatcgactaatcaatttttcgttgaaaaaagcgctgagcagagtgcgatggtgggtgggaaattggttggggtacaactcggagttggcacgacggtccgcgtgggcgtgggtcagaaaaatgccgaccaactcgtcactggtcaacacgccggaaggcactaacaaaaataggaattttaaaataaatattatttaaaatattgtattgacggacgacctaccaacatggtcagagaaatccgaaagagagatgagcggaaaacgaattttggacagtgccaggccgaggacaacacgacgattctctgccgaacattcggtgccattttgaaggcattgcgcgtcagcccaacggagtgcctgaaaaaaattaacaaaattagtatttttaatagaatttaaatgttaattagtacagcattccaaatggtgagttcgccgctgatgattttcaactggtcacgttcgagaatttcatacagcaaattttgttccacttccaaaaaggcatccgattggatcagcgattccgcattttggtcaatgtaatccaagcagcgacgagagaaatcctcaaaaaaagaaaaaataagagatcgatttgatctgattttttgtaccaaa

SEQ ID NO: 17403 - DNA, 1838 bp, Heterodera glycines
  unsure (1)..(1838): unsure at all n locations
agaaaagaggaggaagagagagagagagaaaaacccccccctgagaaagaaagataggtgagagagagatagaaagcccctaggagggagagaagaggagagagatagaaaagaggagggagagaaagaaagagaggagagaagggagagaaaagaggagggagtgaagaggagagagagagaaaaagaggagaggaagaaagaaagagaggtgagagagagagagaaaaaaaagaggagggagagaagaggagagagatagaaaagaggagggagagaaagaaagagaggagagaagggagagaaaagaggagggagagaagaggagagagatagaaaagaggagagagagagagagaaagaaagaggagggagagaagaggagagagatagaaaagaggagagagagagagagaaagaaagaggagggagagaagaggagagagatagaaaagaggaggaagagagagagagagaaaaagaggagagggagaaagaaagagagatgagagagagagagaagataataaatttttcaaagctcggctagcgcgaggtgcgcgagcgaagcgagcgcgcctgcgctagttaatattatttttcctaaaaattgaatttgcggaaaataaattgagcatcaagcgttgatatcccgacgaaaaaaatgttaaaaatttggcaggattttttctaggcttaaaaaatgcgctaaccacgaatatgaactcgtttttgaaaattattttgtctataaaattttatcatgtacttggttttttcaaaattttttattttctgtaaagcttttattttcaatgaatttgggataaaaaatgctcaggtcatgaataggatgaggattcttaggtttttatttattttttctgcggctttaactcgacgagaaattcacgaaaaaaaaacttttttttcgaaaattttgcgttcgcccttaaaataagtttttgcccttattttggcgttttgaccaaaatttattaacaaacatgcaataaaaacgaaaaatatatataccactgagaatcgaccctaaaattttcataatttgtaactgcaatcattgaataaaattgtttgccttaatctgaaattattttcatataaaaaagagcaatttagaattatacacctaaatttggaactttttcgtccttatttacggccttattttggctttttcgcccttaaaacctcgccctaatcatgaataggatgaggattcttaggtttttacttattttttctgcggctttaactcgacgagaaatgcatgaaaaacattttttgttcggaaattcttcgttttaacgcccctatccgaccctaggaatccctatttcagatgtacggccctaaaaatcctcaccctagtcatgaatctgtgttctcattttgcaagaaatttcaatatttttaagttttcccagaggtcgaataaccttagttaaaatattgccaaatttgctcaaaaataatttatttcgatggtaaaatatggcgctagtaagttttgacttattcccgaaaagagctgacattcaattggcaatcatggaaatggaacaagatggatatgcgaattttggaagaaaaggaaaatcatgggtgatcaatagggatgccaaaaaatatgaacataaaatcgtaaaatatgtgcataaaatatgcaccaaaaatcgtgaaatatgcgcataaaaagtgaaaaatatgcacataaaattttccaattgagggtgtaatttctcaaaatttcttttcaattgtanacataaagtaaaatcttcaaaatggctaaatgtggtattaaaatcatttta

SEQ ID NO: 17404 - DNA, 1568 bp, Heterodera glycines
gatttgatcacagattcgatacgacggggcatggagttaatcaaattgataattaggtcaagaggaattgaattccatgcctccaaaattgcattccaaagtaggggttttgactgaaagtgccttccggcgattttcctcttaacacagtgccataaattttcaataggggacaaatcgggactcaatggaggggtacgaagcaggggaactccattcagtcgaaaccagcccggcaaacgcagacgccgaccgccaggaagtcgccgaacgggacccatcaaaagttggctggtatggatggccgccccatcctgctgaaaagtccatccgggcgcgagatgatcacgcgcaaatggcagcatttggtcctcgagaatgttgcggtagccctccgatgtcaaattgccttctatccgcaccaatggacccaatgtgtcgccggtaaagcaccctgaacattctctccaaaaatggccaaatttgtccgacctaccccacaccattacaccgtctccccctccgaatttcatggtccctctggtgtatttagggtcgaatcgctttccgggtggtcgccgaacgtgaattgccccgtccgaattgaacaaatttaattttgactcatctgaccagatcaccttccgccagtcttcaactgtccaatgtgcatgtgcccttgcaaacgccagacgtgccattcggtggcactctttcagcagtggtttgcgcgccggacgtctggcattcagattgtggcggcggagaatgcgttgggccgtgctgtgcgaaatttggacgccgagaacatcagctgagtgccgtcgaacatcaccagccgtcttcttcgggtcggttttgacgagtcggacgagctgacgctgctgccgttcggttgttttcggactgcggccgacctttgggcgcctatgcatgtcctggttttcatgatgaagcttaaacaaaaaaaaaacaaaatgatttttgcattttttttttacctttagtatgcgagacactgtccgcctactaattttgaagtcttttgccactttacagacgccatttccatttaaacatgcttgcaaaactgcctcctttattggagtaggaataatattattttttcccatgctaaatattgatatttgtgccaaaaaatgaaatgggacaacacttttgacccggagtaggacaaaacgtcgtcagccgaaacgtcgtcgaacgaatttttcgaccataacttttttctttctcaaccaaattaaacattcttggtattattcgaaagcattcgaaaaatgctattagcctgcaaattttcaaaaatttttatttatgcacaaaaaaatcagagcaaaaaaaagttcgaattactgggtttttgagttccttctggccataattttttgaaacttaaccaaaatttttgagattttgcaaattaataataaacacatagagctatcgaacaacaccaacaattcttaatttgattgacagtgaacaaagttatggttcaaaaagtcttccgacgacgtttcggacgacgacgtcgtggggggcac

SEQ ID NO: 17405 - DNA, 2276 bp, Heterodera glycines
ttatccttttttcgccatttttaaattatacattttaatcagggagattttgtaggtgtctcacttcgttttcattattcgccgcactttcgctcgccgttctcatgacaaaatggcaatcattcgccccccccccccccctccagcgcccctcactttgtgccgatcatatttttgaagttggctttcttaatggaattttccactttttccctttcggaattcgtttcccctcttccatcagttcgtccgttattttctcaatgaattcatctctcatgacctccccgtgtccctgccatggccatggctatttttcatcatccgctcatgactacccctccccccccccccccctcaattagtccgatcggtcccccttttttgtcccatttcccctcctccttattctgtatttgccttccctcattatgcaccgaatgcctttgtcccttttattgcccttaaaaggatttcgctttccacacatttatcccccacccatccatcgtcatctgtcatcattcattcattttgctgctggtgctgatcattccctgcttcttctccactccccccaactcattttccctaaaatgtctttttttctctgccccctctcgttgtcgcgctctctttttgtgctgctgtctctccttctttcgctaccctctccactctcttcacaaacttattacgtgaaagcgccgttcgaaggcagatttaaacaggggcatgaaacgtggatttgccaattggacggctacgacctgagcacggagcacatggatcggacttgcgatgaaaatgacattggacagattttttgttacggaaaaattcttgaggtatgcctgcgcgagacgtaatagggagggcgcgagagggttcggccctaccttaggtggatggggggggggggtgttcggcccagatctccgagcagtggcatccctccccgcacattggcccctctcgccacatcttttgccaatttaatttattcccattgtcttacgcataataggccatcaactactttggagaacacacaatgttcaacaaagattacaaacacattgtcgaccgtcctctgaagaaaagtgccgcagatacagtcgcagactttaagacaatttttaacgtaacaaaatggagggatttcaaagtgagctcaatggactccaaaaatgtcgacaaactaaaaacatttgtgcgagaacactttggtagcgcggacaaatttcttgataggtaaaatgagtgaaattgtttaaaaaagaactgaatgtacatatttattcaatattattttaagcccacaaccggtcgattggaaggaaaatccaccgaaattgcaaaacattgctgacccagaattgaagacctttgcaaatcaactgcatgagctttggaagaaattggggaaaaaaatgccagaatcggtaaaacggaaagaaacgaaaagcattgtttggcaatttcaggcgaaagaaaataagtcgacgctgatttacgttccgaacccttttgtggttccggggggccgtttccgcgagttttattattgggacgcttattggatcgtccggggactgctcgcttcaggtcaaaataatgggctattggggtgggtgaattagggagtgattaggagtgaatgccaaagctaaagtgatcggagaaaggcaggaaagtgatcggaaaactgatagtgccttttgagctgccgtattcatttgtcagctggtcaaatgtccgtccttaaatggtaaagcattggaattcaattcacaggaatgaccgaatcggtgaagcacatgtgtaacaattatgccgagatggtcaataagtttggctttgtgcccaacggcggtcgcatttactacaacaaacgttcgcagccgccctttctcactttgtccgttcgtttcgcatagttttaagagtgcactttagttttattagtaagacaatgcttttggccaattttcagaataccgtatttactgaattagtacccccccccccccgggggttctatttttcaaccccgctcgaaagtggggtactaatgcagtaagtacggtatttgttaattttgaataataatgttttatttgctctctcatcagcatggtcaacgattattttgcggagaccggtgacacggaatacctcaagaccattttgccagttcttgaaaaggtccatttggaggggtgtcatggcagttcgtacaatggcgtttcgtgtacagacccatttggaggggg

SEQ ID NO: 17406 - DNA, 1299 bp, Heterodera glycines
  unsure (1)..(1299): unsure at all n locations
tagcccccccctgcctacgcccttgcttcaaagtgcattctgacaaagttttttcttttaagagacaattaattttttataaaaataacaacaaaaaaaaactaaaaacaataatcaattttgcttatttttgaaccaatttgaacatattacagaaatttttggtacgggcggcccaggggttgctcctcccctccctccaccgccccatttggccccctctctttttagatcggttttgggtggtccaatggcggcattttggatctgttggtgacgtacggaaaggagatgaaaattaaggaattaccagaagtgaagtgcacagtcaaagaagtggtagaggaaccaaacgaatttccttgaccttgagtgaaatttgtattctattcgaatgtcaaagagaaaaaaaaatgataaatgctttaatttccatttcttaaacttttataccaacttgggttatattagaaaatgcaaaaaagtaccaaaatatattaattggagtgtaaaaaagtagagtgccacgggaccgggaccgggttttgaaaagctcaggtcccggtagggcaaccgggaaccgggaaaaacaagcactggtaagaatggggtctgagtgaaaaattagtgaagaaaattggagtcaaagggaaaaataaaaaataataattaatatattctttaaaagtaacactgccccaagtgtgcaaatggcctaacggctagtctcctcgactcttcccttcttctttcccccggttcaatccctctacagaaattaaattattttcgaatttttttttcgtatactcgtgggtttcctataaagaaaatatcgattcctcatagttttttctaaattcgatacatattttatcattttttaaatcgaaaatcctaccaattcgagcttaataatcgcaaaaccaacctttttttcgttgaaaatctgttaacaaattcgcacccaaatttttaatttnccccccgggcggcgcctatcggcaccgccggaccccttctttcccaaaagttttttgaaaaagcgctccgaaaaaaagtgatgtgaaaatcaaatctgaatttctattaatattcgatgatttagtccaaaaatgattaattgtttgaaataattgaagaaaatttgtttgaaaattttcattaatttaatttattataaaaaaccaaataattttgtattattttcacttgatataaattagaatttgaatttttttttaaatttttaaaatttttttgaatttttaagatttcccggttgatcccggttcccgg

SEQ ID NO: 17407 - DNA, 1317 bp, Heterodera glycines
  unsure (1)..(1317): unsure at all n locations
ttaaactcgctgtggggccggttcgcacttcggtaaaattttggttaagaattatgaaaaaatacaaatcatacagaaaccggcttaccaaaaccgatcgtcgagtgccatgccgagctggccaaactgctcaacgactcgaagattgaggtcagcagcattgatcagctgacggaaaagttctggatggtctactacaaggccaaagatgagcatgtggtggagcacagcacaagcaatgtaagaaaagttttaaaatatttaaaaaagacaattggtgtatggccctgcaccaggtgtagagcgctacgacacccgcattctctacatggtaaaattcagaaaataaaatgaaaatgtgaagtaattttttaaaatcaggacacggacagcatcttttacgactacctgacgcggctgggggacccacttccgggtggtgagcagctcggggaactcgcggacgagtacccgaatcatacgatcatggagtttatttgtggtaagattagttaaaatttgaccaaaataaatggaaactttttgtttagctgggcccaaggcgtacggcctgtggttgcgcaacaacgcgacgggggaggacgagtacaagctgaaggtgcgcggcatcacgctggattcggatgcctgcgaaagaatgaccttcgagaagatgaaagatatggttttgaacaagctgggccaagcagacaacaacgtccgcttcaactacccttcgaagaacttcaagataacgaagaaaggagaaatttttaccgtgccgctggtaaaacagttcaacccgaccgtcaataagggagtggtcagggacaaagggttgagggtggtgccctttgggttcagcaaccaagagtggtgtaagtggaattgcccaggcgcttgtacctgtctgttcaacccagacctcaatgtgaacatgttcacagaagaggagttaaatgaccccgatattatgccataactgtttttattgtttcaattgattttcttcatttagtaatatttttattcatttatttcttcatttgtcacccctatatttttccggaaagccaatanatttcaccaatatttcactttttccatctctcactcgttctttgtatttcttttcaatccgatacattgtgttttccttcacttgtactttttgtaattctggtaaataaaatttttctcttcacttttgtgccattatagtctttgaagcaatagtgctggcggggttggttgagcgggccccttccactgggtaaaccgggtcaaaagaattgggtatttaaccaaaaataaaaa

SEQ ID NO: 17408 - DNA, 1385 bp, Heterodera glycines
tgtgtaaacgtgatcagagtaattggggtatataacctcattttaaaataaattgatcggaaaatgtgtgaattacagtacccttctcgaaaatgtgcttaggctcgggaattctgaccgtttccccggctctgatctttggtgacttgtccaattgtgcgagcccttcgccgtacaccctcttccacacctccctcgcattggtgtcgctgatttcgttcggtctaagaccggtcgcgcggcacaccgagttgttgatggcactcaaaaactttggcagcacatccacccacaccgacgtattgttggcggaaaaatatttgtacagccgagtctttacggtgcggatggcacgctccgccacggcggcctttttctttgaactggtctcaaacttttgaatgcccttctccgcgtaaaactccttcaacggttttgccacaaactccagccctcgatcggtgtacattgtgtctggcacccttggcatttgctcaaatagctcttcaaaagctcttttcatgtccactgggcgcttactctttacgggcgcgccgaacattcgcctcgatagaacatccaccgccaacagcaggtaccggtagccgctgttcttgcgcgaaagtgcctggaaatctgccaagtccgcctgaacatctgaaccctgaattgtgcgcaataagccccagtacaacttaccggtcatgaaacccgtaggcacagtgcgtaggcgtcggaacttctccctctttggcttgaacagcgtgtaggtggtgttcctctgcaaaagtcttcaaactcgatacgcttcaactttgggtgcttcttcttcaccgccgcgtacagggcactcgcacccgcatacccgcccggattggccgggtcggtgtatattttgtttattttcttgtccattttgagagaacaaatcctctcgtttgtttgacttgtccgacgaacccagacccaacaaacagtcgattgagtaggctactggcaagcggattctgtgcgagtttcctcttcaactctttggttccgcgtggcgaaggggcattctccgggcgagggtccaccaggcgttcaattgaccaggccaggtccgagtcgataaactctcggcccgtctttgggttaatgattttcccacggtcagttgcgccgaatctctgcggatcagacataatgatggccaacaggtggtccttcttctcgatcaatttttgctgttttgctgctttcttattggtcctgggtgatcgattgcttccctgcgtctggcttgttggggttaaaaactttgacacttcaatttcttcatcttcatcttcgtcggtaaccatcaacggacttgtccttcggttcgtccggaccaggccgtacct

SEQ ID NO: 17409 - DNA, 3197 bp, Heterodera glycines
  unsure (1)..(3197): unsure at all n locations
aaccttatattttcttgataaaatagtgacattctgccataaaatttcaaaattttgaatatatttaagaaataagaacaaaataagaacaatagcccgaaataaggacaaatcttacaaataaggacatttttattttgtaagatttggaccctccaaataaggacaaatcttataaataaggacagatccgagccctggtttaaatagtaaaattagattaaataattaacagggttgtcaaaaatatgcacgaaaaattgctaaaatatgcaaataaagtcgtgaaatatgcaccaaatatgcacaaaaaagttgaagattaggggtgcaaattaattaaaaatttcatttctcgtaaattctatcggttgtttttttcaaattgttggcacagttgacaaaacactgtgtttccatcagtggtgtacgtatttgacgaaaaaatggcaaaatatgcaaaaaatcttaaaatatgtacaaaaaatggcaaaatatgcaaaaaatcttaaaatatgtacaaaaaatggcaaaatatgcaaaaaatcttaaaatatgtacaaaaaatggcaaaatatgcatgaaaacccaaaataagcaaataaaaatcccgacttttaaactcaaatacataaaagaagattttttccctactaattagactacgtagaatccaggaaaaaaatgcatttgcatatttttgacagccctgataattaattgtggtacagattagctagctcatcaatgaaatttaggtaaaattttctacatatctatattaacattttcatttcgctaaattctctaaaatattttagtgacaccaaaaggcccaacggcgggtgtcttacttttatgcaaatttcataatactttcatcatttaattaaaatataatttaaattaattaccgattcatagctaaggatggcattaaaattgaatttggacactcaaattttgacacgccttctgtcattatgtgactgaagctgactacatccgtcaattggtcaaaatgcaacaattgcagtcgaattcgtctgtcaacaaagtcacaaaattgttccaaatgaatggaattggcgacaatgcaacacacagcgaagaagtggtcgtacttaattaattagtgagttaattaattattactaagaattaattaattaaaaagtttctttattatttaattcattcccaaattaccttctctgtaaagttagcagtcggaaataattggccccaattttcggagggatttgaattttgaatctttcggactttaattaggcctaaaaaggggaagtgttgttttctaaggcataaaatcattaacgaaatgactttctctcattgatttttgcactattttaaatgttgagctgttcatgttgaacatcgcattctgttccaaacatccttaaaatatttttactttaacaaactaacaattttaatttttatttgctaaaattcacaaattaatttattaattatccaaatttatttgtcccctttgcctggcgttatgattggcatcaacagcggtgaattccttttttgctcctcatcttttggagtccatgaaaaggtttggagttcgtccggcacatactcttccaaacgtaaaggaattggccaatcccttggggggcaggtaattagtacatttaagcgattattgagataccataatgcgaaagtaagaaagaatttgtccaacaaaaagggaatcgaagcattcggataaagcaacatcactttggtggccattgttgccaacgaaattccgttaaaaaatccgagttttggttcataaataaaattagctaaatgtgttatttaaaatcggtttaatcttcaaaaaatatacctaccttttgaccaaaactttaaaattgtaagaaattttctgaatttttgcatgttttttcttcccaataacgccattattttctcatttgaaatgaatgcttaaagccgaataattaaaacagaatgaacaaattttttgatatgtcttatcatcaattaattaatggattatttccatgttatttttattgaagatttattcaccaatgcttattcttaaaaaaattctcagggaaatgaaaaacaaagacaaaatggtaaagtataaaaacactttacctgccaatgatttgatcattttttcgtccgcttccttttgccctgccaattttctgatcaatgccatcacttcttttcggctcaacggcccattcttcggaagagaatcactggtcggaatggaaacgaataaaacatcgaattgaatgccatcgaattccaagccaaccaacggcagataggcaaatggcattttcttcaaagaccccactttttcattctgaaagacaaaaaaatttaagggattcatgtgaaaaacataatcataatccacctgacacaaatgacaataaaatgacccatcggcgcacattcgcggctgtgccaaatcgcattttgtcgtgccaaaaaatttgccaatttcctctttttttgtcgccttttcgggcactaagaaaatgacgtcgacgtccgaattggcagtatttgcgccgagcataaacgagccgatctccaaaagtacggcctcaccccgagactaaaagtgccatgcgattaatataattaataaattaatattataatgacccatttggaaacaattgattttagcgcagccaatgcttcgtttggcttctcagtgggcttatattcattttcgagcagaattttatccaactgaaatatgtttaaacattattaaattataaaccacctaattgcctcttttaagtgatttttctcatcaatttcatcaaaaaatatttgctgattaatttctgacaaaattaatgaatttgtctcatcgttttgttctgtcgcattttctttgctaatgaattgactttttaatatatattttctgtgttgaattgttgaaatcttatctaaataataacaattaatcaggctcgtgtttttagttttattctttttattttttgactttctcatataccacattaatgcttttataataattaaataccccattaatcaattaattaattaatttaccaattcgcttttgctccaacattntgcgccacttttccaaattctccgccaattgactctccaatgaatgttttgtctttttc

SEQ ID NO: 17410 - DNA, 1610 bp, Heterodera glycines
ttttttggtgcatgacttccgccagaagggaaaacgaagcgcatagagtcccggaaagattgaaatttgattgacaggtgagagggaaaacggtgcgctagagtcaaattttgaatttggtcggcgacgaaatggaaaaggaagccgtcacattatatcactgctgcgtattttcttggctggcaccaatttttttggttggcacaaatttttttgagtgggactgagtttatgatatgattatactcttaaatctaattcgaagaaataattcatcatctcccgaaatccccattcaaaagacccctttcccccccccccccccggcaaccttacactgtatataaaattcaaaagtgaccaaatacctgtggccaaaaatgtgaataggtataaaaaaccataatggaataagaacacaaaaaagcgttttggaattcgacgcatttctgctggttgttttaaaaaaccgctgttgaaagtaaatcgaagactgttggcgaaatgtcttaatgaaaggcaaaagcaaagtcaaaggtcgactagcaacaaataaaaacatcccaaattcaccccaccctcagttgtcgccacgcaataaaatttttttttttacctaccaatttcccattgtttatgaatggctttaaaattctatagcttaaatttttatttgcttaaaattaatccattcgtcgggtattatttttttaacttacatacctacctaacaaataagttagaaaattatgctaaatgaaagaaagttgaaaagaaacgtatgttttacatacgctgtcatttctcatttgtataattttctcgcgttccgctgaatagacccatagtgaatctctcacaagtcactgtttatagtttattccgtcaattgtataattcttttttcttccgtcgttattggagcggatttctcgtttccattcacagtagtgaaaattaattgatctgttctctcgtaatgagtcattttcaaaataatacattgaatacaattgttttcattttactttgaaccaactttaattgaacttcacgtccaattaattgaccaactctcggtttttagacctttttttcttgattgaaaaatttatttggacccgtaaagctatagagacaatttcatgaaatagctgatttttatcttaatcttttttaaatttagcttttgacagacgacaatgacctctctcgttccaattcgccttcaagagcttttttctgtaatttttaaatggctaaatatcaaatgcattcttaaattcagcttcaaaaagtgggcatcaacccgagcagtatcagtttcggaaatgttacaatggagtctgacaagtacattgttgttcgtgaaactgttggggacacggctcaggtggtgatagtggatgtggcgaaccccaccgatgtgacccggcgcccagtcagtgcagaaacggcattgatgaaccccgtttcgaaaattctcgcactgaaatgtatgtatagcattactggacttgtatatgatagaatcacgtttttaagccgggaagaccttacaaatattcgatctcgaactgaaggccaaagtcaagactcatgttgcaaat

SEQ ID NO: 17411 - DNA, 1960 bp, Heterodera glycines
tcaaatgttcgaaagacatacgacgttggcaaatgtcaccatccttaattatcggtcgatcatgagggcaaattcctcctcctgctcggaatttctgcaaaggttaattttcttcattttaatggcatttacgctaaacaaaatcctgtgttaattctgtttttgtgcatttactgcttctgaatcacttgtttcctagggctcaaagacggattttttatgagtcgcgagtgattggctcaatgcaactgtacaggaccgaacgcaaagtgtcccagccaatcgaaggacatgctgcttgctttacacaattcaaaatggaagcaaatccgcacccaagcaatcttttctgcttttcactccgaaatcaaacgggcggaaaggttcatttttatcagtgttataagcattgagaggttgactgttaccttttcagttgcacattgtcgaggtttcggctactcccagcggcaatcagccctatcagaagaaagcaattgacattcactacccagccgatgcagtttccgactttccagtctccattttggtttgcaccatgtctggaacttgtttttaaaatattttctaggcatcttccgagttcggtcttttatacatgatcaccaaatatggatacgttcatttgttcgacctcgaaactggcatttccatctatactgtgcgtgtgtcgactgaaactgtttttgcgtcgactgaatacaaagtgaacaacggagtgctcggcatcaaccgttctgggcaggtatcaattggttttacatttggtgaaggctaaattcccagattatcgctctatgtttcatttgatttgtaggtcatcagtgttggtcttgatgagaccacaatcattccatacgtcacacaacagcttcaaaatccggatttggcactcaaattggcctctcgttgcaaccttcctggtgccgaggaattgtttgtgcgcaaatttaacttgctcatgggaaatggaaattacgccgatgctgccaaagttgctgcgactgcaccacagaaaattctgagaacaccgcaaacactgcaaaagtttcaaagtgctgtccaaccgcaggggaaaggcgctgcaccgattctgatttacttcaccacccttcttgagcaaggctcattgaacaaatacgagtcgttggaattgtgtcggccagtgcttgcgcaggtttgcgtttttatcgctgcgtttcaaagattatgttttgaaccgttgtaaaaatttgcagggaaagaagcaggtcgtggagaagtggatttcggaaggcagtttggactgcagtgaagaattgggagatttggtcaagcaatacgacatcaacttggcgttaagcatttacttgcgtggcaatgttcctcacaaagtcgtccaatgctttgctgagttgggacagttcgaaaaaattatcctctacgcaaagaaagtgaatttcgagccggattatcttttccaaatgcgccaagttcttcgcacacatcccgaaaattcctcaaaattcgctctgatgttgctgaatgaaggtccaagtggcgaaccattggcggacattaatcaggtgatagggttttccatttaaattccggtcgatttgcatacaaaaattgttgtttagattgttgattgttttgccgaggctggaaacatccaacaatgcaccgcttttttgcttgaagcgctcaaaagtgacgacgagtcccaagggcattttcagactcgtctgctggaaatgaatctgatgtcaaatcctcaagtgtccgatgctattctgggcaaccgaatgtttaatcactacgacagagcctcgattggtcaattgtgtgaaaaagctggtcttccgcaaagggcgttggaacatttctccgatttgtatgacatcaagcggtcacgttgtgcacacacaacatttcaattcagaggttattaacctat

SEQ ID NO: 17412 - DNA, 1613 bp, Heterodera glycines
aaggatgccgaggctaacttcaagaaagacgcaaaatacaaggctctcaatgatgccgaggctaaagcccataaagacgcagaagacaacgttataatggatgctgaggctaacgccaataaagacgccgaatagaatgttaaaaaggatgccgaggctaatgccaagaaagacgcagaatagaaggctaagaaaggatgcccaggctaaagccaccaaagacccagaagagaacgctataaaggatgcccaggctacagccccgaaagacgcaaaagcaaagaacaaggaggaagaaattaggaaggaaaaggctaagcctcgaagaaaaacctgaggcacctgccgaaggcgtatccgtaatgcctgaatctattaatgcggaagagacactggataagctgaagcaggaatagagaccagtggaagtgcctccatctacttctttaatcacaggataaagaaagctgcacaggagaaggctcaaaaggatgccgaggctaaagccaagaaagacgcagaagagaaggctaaaaaggatgccgaggctaaagccaagaaagacgcagaagagaaggctaaaaaggatgccgaggctaaagccaagaaagacgcagaagagaaggctaaaaaggatgccgaggctaaagccaagaaagacgcagaagagaaggctaaaaaggatgccgaggctaaagccaagaaagacgcagaagagaaggctaaaacggatgccgagactaaagccaagaaagacgcagaagagaaggctaaaaaggatgccgaggctaaagccaagaaagacgcagaagagaaggctaaaaaggatgccgaggctaaagccaagaaagacgcagaagagaaggctaaaaaggatgccgaggctaaagccaagaaagacgcagaagcaaagaaaaaggaggaagaaggaagaagcaaagaaagacccgaagagaaggctgaggcacctgccgaaggctaaagccaagaatgccggaagaaaagaaggcggaagagacaaaggaaaggctgaagcaggaagagacgcagaagagaaggctaaaaaggatctccagcagaaaagaagagaaaagaggctgaggagaagaaggctcagaaggatgccgaggctaaagccaagaaagacgcagaagagaaggctaaaaaggatgccgaggctaaagccaagaaagacgcagaagagaaggctaaaaaggatgccgaggctaaagccaagaaagacgcagaagagaaggctaaaacggatgccgaggctaaagccaagaaagacgcagaagagaaggctaaaaaggatgccgaggctaaagccaagaaagacgcagaagagaaggctaaaaaggatgccgaggctaaagccaagaaagacgcagaagagaaggctaaaaaggatgccgaggctaaagccaagaaagacgcggaagagaaggctaaaaaggatgccgagactaaagccaagaaagacgcagaagagaaggctaagacggatgccgaggctaaagccaagaaagacgcagaagagtaggataaaaaagatgccgaggaatctgccaagaccgactcataccagaaggctccaacggatgccgagacta

SEQ ID NO: 17413 - DNA, 2901 bp, Heterodera glycines
aaaaattcctcgtaaagagtgaaataggcacaaaatgccataaaaatgatctaaatatgcttagaaatcaccttttagtagtttaaaaattaatttttggtatctcacttttggaaaaaaccgattttttggggtacattttcaaaaaaaatattaaatttttcacaaaaaatttctaaaattctcaaaaacactctaaatatttttttctattattcgcagcatgggtaatccaggaaaaaacatttatttactagagatcggaccggtcggttttttcggtatttttcgattttcggtttttgactgaaaaaaaccgaccgagaaatttttgagtttttcggtttttttcggtttcggtttttttcggtttttaaccgaaaccgaccgaacgagaaattttgaagttttttgatttttttcggtttcggtttttttcggtttttaaccgaaaccgaccgaccaaccctcttgtccggtcaatagtatttacataaaaaagaagccctgattttttccaaaaatgcaagaaaccatttttataaacagaaaaagcgaaagatcacctctgagtaaattgtagaactattgaagctctattgagtggtgtattaaaggttgggaaaataattgaaaaaagcagccgaaaaacgtttgtttgcgccctgattctaaaaaccccccaaaataggtgctcaaaatggaaatgagataaataattttaaaaatcaaaattcttgtcaagaaaataaataaataaattttggagatgaatttttgataaaattgtccatttcttagggtaatagccttttttgcagaatgttctacttaatgatttgaaaaaatcctactcattgacgtaatgcttagctgttaatcattgcttggcaaatataattttatatatttatttccataaaaatatgaattaggtattactatttttctatgaattattactatttctattgctagaaataaaagcagaaaaatcttgtgaatttcgaaatttttctattaaaagggcattttcatggcaatgatgtaggctcccggtaaattggacactatcgtataaaaaaaaataaataaaaaataaataaaacaaaattttggtttggctaaatgattttattttattctgcacatacttatgtttttataagcgtaataaaacggaaataaataatgtttttattacataaaacttcagcaaaagtaaacaaccatatcatccataaagaaaaaagttttcttttggataggattccccatcttttatgcaattttagcacattgaccaatcattgccctttttcttgcattttttttggcacattgatcaatcatcttgcatgttgaatgcttgattctaagtgccttaattattaatccatttaccctacccaaatttatttttcaactcaattcctgggtttattttaggatggtgtccagttttccggtgtccagttttccgcttggtgtccaaaattccgacggtgtccagttttccgcttggtgtccaatttaccggtcctcatgatgtaaaggtaatgttaaagtcagcagaatgcgaccaccacgctcgaataagagggttatatgaaaaatcatcaaatgaaaattttgaacaaaaacttcccatgacttttgtcagagtcaaccaaattaaacattcttgacattgaaagaaatgataaatgtttaaaaaatagtacaacaaaaatcttagcgaacaaatcacaaaattttgaagacgaatcatttttctgaaaatcaataaattcagtaaaattaagcttgggttaaattttgtccaaaaattgtgtgcccaaaaagatcattttcgctcattcgaaaccaccacaatttggcgtggacgaaaaagcggtccaaccgtagaagaattgccttttcttcgcataatcgcctttttgtacgcagtccgataatcgctgctaaattaaatataaataaaattattaataatatttttttaattgaatttttgtcctttttacacctgttcagcaaaaggatgggcgccccactggcggatgccaaaattggcacgcaagtgataatgccgatcagtacacttttgatgttggtacacataaccgaatgagccacaggttcagcgatgaacaaatttacaataagcggtgtgataaaactgataaaatcggtgatttggttgcgtgcagccgatgcgatcagccagccgatcagaaggaccaaaagcagcagaaacacagagcgcaacatcctgcgcactgactgatcagcagctaaatgaccaaaatgagagtaaaattgaaatttaaaaaattgccaaactttgtgaattcgtttgattctttcttttcgtttgaaaattgcgccacaaaattaggccaaaaattgccgcgtaatttaaggagcacagtgaaaggacgacaaaagcggggacggagttcagaacatccgaataaagcccactgttacagtaaacccatctgaatatcgtaataaaattgaaaaatttcaaaactaattttaatttatttcaaatgttaatcgcctatcgtaagagatgttgataattgtccaaacattgaacacttccaaattcatgaccaagcaaaaaagagtacatagaatggcagaagcaaacgaacattggcaaactgtcgtttttttgatcgaattcattctacaataatacgataaaatttatatattccaactatacgatatataaagagtcacctgatcgggtacgagaatgatcgagcaatcgctccacggaaatcagaaacattgccgattattgaggcgtacgaggctatggtagcgcccgtgagagtggccagacagatacggtagtcaatggtactgtactggaaaatgacg

SEQ ID NO: 17414 - DNA, 2169 bp, Heterodera glycines
aatctaaaaatggttggatagagctcgtcaagctgtacaaaaaagccgcttacaccgacctcctatcatcaatatctggcgagttattcggccggcgctgaaatggcccaaaaaagtgacccatttttgcgcagttttccagaaaaactggtaaggcctaggggttcggtcaagaaacaaaaaatgtgccaaacatccatacgaagctcctttacggagccgatttttcatttaggcctttaaaaaatttttgaatttcaaaaagtgcaaaaaaaattttgaaaaagccgtttcagcgccgttggcgctcagttggccctcggagcgaaaaacctatagttttaccagatgcgcctcaaaaagttgtccccaaggtcgaaatttcaaacccctcccggcaaaccgtaaggagattttgtttttggaaatgagttgccttgtttctttagtagtatataactagcgggtgcgtgaaccgtcggctctgggctgggaaaaagcgcttcgcgctttgggagcttcgctacctaggctgtaaagcgattcaaatttatcgaattggttggagaggtttttttgaatttttaaaaaattattaggggtttttagtccacatcgaggctcaagacgggcgcttcgcgcccgttttttagcttattaggccgcttcgcggcctcagtcgggcgcttcgcgaggtacaaaagtgattagaagaggtacaaatttgatgaagaggtacaaaagtgattagaagagtgattagaagtagtacaacagtgattagaagaggtacaaactgtgattagaagaggtacaacggtgattagaagaggtacaaaagtgattaaaagaggtacaaaaatgattagaagaggtacaactgtgattagaagaggtacaacagcgattagaagattgattagaagaggttcaacagtgattagaagtagtacaacagtgattagaagtagtacaacaatgattagaagaggtacaaatgtgattagaagaggtagaaaagtgataaaagaggtacaaatctgattaaaagaggtacaaaagtgattagaagagtgattagaagaggttcaacagtgattagaagtagtacaacagtgattagatttgaaattaaattattttttttacaaattcaaaaaataaataatgaaattctttaattaaaaaaaataaataaatttaaatattttataaaaaatatttgaaattaataaaacatgtaaaagtaatcaaaaatgcacagaaaaataatgtacaccgatcggatccgaacttcgccccccccccctcaaaatgatgcctcagaatccccaatcacacagggattctgagggcttaacgatgtcaaaagtaaaaactgattatgtattcatgatcagcggcccaaattacccataatgacatgtttttagaagatttttgttgaaaaaaatttttcactcaaaaatcctgtccaccccctttggtcccgaatgccaaaatcacttttatttttgtatctttattttaaaagatgataaaaatgtcaaataaaatttatattatagagaaaaaaattgcggatttttgtagtattttacttttccctaatgacttttcagaaccgagatataaatttttttctgaaaaatcgaaaatttccagaatttctggaataactttttttgtttttgaggtataaatttcaaataaatctcataaaattctcccgattttttgctattttttatgctttaaatgagctgaattggaccattttgaggcgagttatgaatttttataatttaggttgaattttcaagggccaaaaattattgatttttcaaaatttttttacctccctccaaaaaatccaaaacgcaatataaagtgcatattcgtgttcagcacctcaaactaccccataaaagtattttttggcaattttaggagcaaaaaaatttctcacgaaatgcaaatccatggggtcccccctatggttttgagtttcaaaatcacaattaattttataactttttttaaactcatggtaaaaacataagataaagcacattagatagagcttaaaattctctacaaaaatgctctaagacaaattttcgctaaaatcaacgcctgacgagttataagccttgaacggaaatgggg

SEQ ID NO: 17415 - DNA, 802 bp, Heterodera glycines
attcgtaatcaggctcctaaaataccccttaggacatgtttttgaaagatttttggtgaaaaaatttttccactcaaaaaccatgtactccccccctttggtcgcaaattccgaaatcacttttaattttataacttttttcgaaaaagtgataaaaatatgaaataatatttataaaatagagaaaaaaatcgcggattttttcattattttaatttgtgaaaataggttttcagaaccgagttatgaatttttttctgaaaattcgaatttttccagaaattctggaataactttttttcttttagagatttaaattcaaaataattcccataaaattttcctgatttttctctatttttaaagctttaaaacaattaaattgagcaactcagtcataagttatgatttttcaaaaattacctcaaattctcgaggcccaaaaaaatgaaaaatatttttgaatttttaaaaaattccaaaaattccgaaacaaaaaacaaaggtcatattcgtgctcagcacctcaaaataccccagaaaaatatttttcactccattcttcaacccaaaaaaaattttcaaaaatttctagggggcctagctcgaaaatttttgaaaatttttcgacgtatagtacaccgttcgatagcgttttgaaagctctacgattttgctctaaggcgatttttcgctaaaaccaacccccgacgagttatgggcccgggactcaaatgtcccgctcggcacgaaaattttttcttttccggaaaaaaatcgaaaattttctgcctgccaggcc

SEQ ID NO: 17416 - DNA, 1488 bp, Heterodera glycines
cttgaattcagatacatgccgattgaacagtaaaaaatattgttgtgtaaaagaaattggagcttttcttttctaatacattattattaaaataattttcaaatttctacataattataagaaattggtgcctaaggcatccttttattatccgtccgtccgttctttctactcatcatttttctttgggcgcttaggcggcatctgagaacattcagcatcatcaattgtgtagatgtcgtcatcgtcatcctcagccccatcttcactttcaacgacttttttgtttgccagattaccgccagcctcttcttcctgctcaggcacgtggattgaagcaataacccagtcaagtgtctcgccctttgccttaacaacatagcatggatttgtgaaatggaaagagtgctaaaatcaaccttaatgaccaatttagcagcaactgtctgttcaatttttgattggagaattgaggcaagttttttgggacggtgctgcgctaagcgtgaaaattcatctatttttacattcaaaaatttaacagcagttgccgaaaaggcagttatttgcttgctcgtctcaatgtcatgacagtcgcgcaagtcgatgcgtaagtagaggttgctcagtggtttggtagcgtggtgatcacatgattcacagtacagctcgtcgttgagttttttttacaaacgaggccaccggtcttaattggacacgcctaggttttggttgaaatgagagagagagaaagagagagagggagagataatcacttggtaaagacagtattgaatgttgtcaacgaccgcgcgtacaaagaaggtaccgggagaattgaactttagaatttcacttaattccttaagctgtgcgggaaatcatccgctttttgatttgatgaaggcacaaattgaaaacgcctaagtttgtcgctcattttgtcagtgttttggcgggaaaacggctccaaaagcaaaatagaattaaaaaaggctaaaaaagtttaaagtactgagtcgggattaaaacatatattgaattatcaaaatttaggcccacttgatctattttcctgcctaaaattgtctcctgatattttggacaaattctaaaaatgttcgacttttagaccttttgttcgaactcgctattttggtctgagaatggctcgaaatcattttgaatttgttgcgaagaatttttttggtcttctggctactctagggccccgaaatgatggccgaaaatttttcgaactgtgaaaagtgggctgagcgtcatttttggacaaagatacaagcattttacccctctggggtaaactcctgtctgaaatggtctcctgaacattatgggagcagttcgaacaaagttcgacttttagaccttttgttcgaactcgctatttcggtctgagaatagctctaaatcattttgcagattgttgcgaagaatttttttggtcttctgactgctctaaagccc

SEQ ID NO: 17417 - DNA, 841 bp, Heterodera glycines
taatggagtccggtctggctaatggacagacagaccggtatgtccattagtctggtctaattaattgacctgtccattagtctccggtctggctaatggggaggcccgttaaacgtcggcactttgtgccagttaataaccctctcaattagcagctcaatttttaatttcttccataattttcccttaattgaactgatggtatttcataaaagcaccccccctccccctgacccagacagagtcaattagctggcttttttaggtgatggatgaggggctttataagcgtcagtttttatgaccataagtaatgatgatgaagcatcgctcgaaatcctttcccccacactctcgtaaggcacgctcgaaacggagcttgtcggaaagcggtaggccgggtaccactaccagcatttgtatgtggcaggacccggcctaccgcttttttgccagattacacgatttgaaaggcggacggcgtttagttagcacgccaaacccggccatctttcaaagagcgcctcccctaagtatgtttgtttgtttttttgaaagtgtactgtcgaatttttttgttatttaaacttttttgacttttcccaaactttttccattttgccatttttttagcgataaacatgtccgcaaaccaacagcagctgactgaaaatttaaaaaaaatcatcgcactccacaaactccagcaagacatgaagctcatccgcgactccatcctctcggggaactttgccgtgaacgaaatgggaaacaacaatatgatagtgtggacggtgccggtgccacgaaacgcggttaaattttgcgaaacaaaaaaata

SEQ ID NO: 17418 - DNA, 3252 bp, Heterodera glycines
ctgaaggatgagccggccttaaataacgacgggtccgagtggacgatgggcgttacagcaaaaatgcaatttatttgttttaaatgttacaacagcggcgagctaatgggaaaaaaaggcaaaaaacgtttttctcccgagcgacaggggagattcatcgccgcaaaaagctaatgtcgcgacggggaagagcaaaaaacgggagaggggacgggagatgaattgctttccgtcggctgccatgtttggcacgaagcaaaaaaatgggggggcactgcaaaactttggtcatatggaattaattaaaaacgcagtcaaaagcggggaaattgcaaattttgaaaagaaatttcaaacattaatttcaattgaatcgggttcaattgaccacaaatatgcgcgaattacacaaaaggaaatgccggcaatagtaaaaatgatgccgccaattgtccaagcatttttcgagaaaaatgaggaccaactttgagggacagtttttggctttaggtgtacacaagtccaacccaaagttgcatttctctcttcggttggaaaaattaaattagtcggctggcatggatgggcacaaaaatggtcacaaatttctttatccactgaaattcctttaatttgcttttcttgaggggactctacaatttgggcgttcgaactcaatatcagcaaaattataagcaatcttttgcaagaaattcttttgtccggcccgcaggcatggggaatgagtaaagaaagatttttggtttttggcattttaatctgaattttgcggttggtctaaaaaaagaaatatttcaggaattattcggaatgaattttggtctctggagacgatgattgccaaaactaaggggcggtgcaaaatgtgacattagcaaacaccggcacattgataatttgtgcaaagggagaaaaagtcagggaaaatggtgcaagagaaaaaaaaggaattctttggccttgaaggggggaaaaaaggaattggatgtgcaaaaagaacggcgccttccaccaaaatcccatgggagatgaatggcaacaaaaagaaaattgccttaaaaaccgaaaaaggaaacaaatgggccaaagaatgccaattcgaaccgaaaagggaagtaatggagtttttttttgtgttaaatcaattcatctgcgttttggtgattgttgcaagtccatggcggcacataggtaacggtatgatagtcgaaattgttcattttggagccattgatgaatgtcttcatgttcatcagcgccaaatatttttaagttcgttcctacataaatctgctcaatccaccaatcgcgaactccatcactcgaagttggccattccatagcagaagttttggcccaaaatcccgtagtttgaacccgtgtgccttcttctaactccgtcaggttaacgcttgaatcgagttggtgggggaaaaaacgctgattagtttcttccccatacaaaaagacatcaatggccataatttctgaggtgattttattttggatcacttccctaattattccgcagcagctcgaagggacaatttgacttactgatggtcccagttttggaggagaagtcatttgcttcagatcaattgttttgagccgagttcctaacagagattgtttgttccaattcaacgaaatttgtgtgaaatgtggccagttattgttagggtcaagtgtaattgtcgtcacataacttggtgtactttggaagactaattgatccgattctaagcttagatttttttggtccaatagctcattttgttcgcccaaaatgtccggttgtaccagtgcccacaatatggggtgtgagatgaacacaaacccaagaactgagctttcaattggtggcagatcagctggcggtggtgtggtgtcagaaaatattttctcaatttccatatgactaggcaatttttcagaatccgtcagttccaaattcgcaaacaagttcatgaaattaacagaattttcgtcatcttctgtttccactaattcatttccatttccgaccatattttctgtttcttgcccgcgggcgaaggagttaaaagaattgttggaattaatttttgttaaatcttaagagagaaggaagacaagaatattcgtaaaatgagcaaggtgaaaaacagaaaatgaatggctatggagagaaggatttattgaccgatgggtgcgagaaggcggggcaatgtacaagcgcctactttaaactaaggggctgatgttagcataaataagtatgagaagccatgttaggagacaagcagtgagagtgagaaaggaaaaaaaaatttaattattcaatgtttgacaagatttattgttcgattaaatgtatttcctgacaaaatatatatatatatatataaagaaggcaaattgaaatgccaaaaaaactattaaaaaaagagggtattcggaaaatgagagattttgtaagttttccctaaattagaaaaattttgtatgaaatgtaaaaattagtcaaatattaaagtaatttgttaaaataacaatgatcgtttggcttaaaatagtctgaaatacgaaacttaaaaaatgaggtttttagaagggcaattatagttagacacttgctttaaattttggcagaaaaaatagaatgttttggcgtaatgttatatatttcttttcaagaaaaataataaataaataaactcaaaaaaaaaaataaataaataaaattagttttgccaaatccgctattgtttgagcttttcacttattatttatattattattttttattctcatttcagataattaaaattggcaataaaccacaaatgctgtttgcgggtgtaattgttctaccaatattcgttttgcaacattgtgtgtggaagtgtcgccctgtgtgcataatgatgcagggaacgaaggaagtcctctagttatgaaggttttttttttttttaattagtcgggaggcaaagaaataacaagaagaaaaaaaatctcgagagaaaaaaacaataaaaaaaagaatggcaacaactatttcagcctttagtagtgtaaagcaaaaaaaaaaaaaatagaacaaaacaacaaaattgacccaaaccagtgttagatgtataagaaaaaaacaatattaaagaaaatgaattttgaataaagcattttttgaaatagattcttacttttagagatgtattttaaatcgtttttagttttttttatgat

SEQ ID NO: 17419 - DNA, 1532 bp, Heterodera glycines
aaagtaaagaaattcattggagccccgacatttcttggcaccgacgacatcgcctttactctcataccgatattttcacccacaaaattccttggatgaatcgcggattttttttttttgttaaaatttttggaatttttttattgctgaaatgccacttttcattttccatggtgctgctcgcaaaccttgcaaatgcactgcaatgtttggatgacgagacggaagaagccgacatggaacaccgggtactcgaggtcgatgaagccgaaatggccgacgcacgtgtccaacttctcaccgcacgtgttgcacagcaccgcttgttggaaggtgccctggagggaatcgaaatgagcaaaacaaattgaaatattgctggtaatcagtgccaaaccttgttggcaccccttacaagaccttcctcaacagcgaaatttttccgaaaatccacaaaattaccactttttgatgaaacagattacaaatcgaaagaaaatttagaaaatttcgccgccccctcctccaagttggaatcctggaacggtccctggttgaaccctcggaaaacacaatttttcggtttcattacgatttttgggaagaaaattttgcaataataggagagaaaacatggggctgtccaataagtcggaaaacaaatgctttaaaacaggatttaccagtcgcgtgtccagcggaccgtacggggcgggcagccagcgattgccctgcacatcctggtacagtcggttgctgaaaatttgcaggtgcgccgcctgacggatcagctccgagctgccggccgtgaatttgacgcccacactaaaaaaaagttttatgtcgccatttttaaggacagccatgaggaggagtgactgggggggttgtgcccggaatgtttatgcttggaaaacccggcatttgccgacttttggggagtccctgccggtttttttttgtatttccggaattttaggcatatgtgccgcgcttcagagtttacaccataacaattgggtcccataaaaaggcacacaaccaggctctagttcagtttatgcgtccattcaattttatacatctaattaattgaattgcattgacagtatttctaaatatacgggataattcagccgtatctactccaatatatggtaaatatttctgttttccatggtatctctgaacatgcatatatttactgaaacaaatatatatgcagcatttcctcaaattgtactctgacgtggttttaccaaaaaattgtaacaattctattcctgtacgggttttttactttctttttgccaacaaacggaaaaaaaatcggttttcacttagctgataatattgattggacgcataaaaattgatgggacgcacaaaagtcgattggacgcataaactggacttgagcccaaaaccaagcaactactcacactttgcgcgtcgtgtccgcctcgcgaaactgttctttgcccatcctagaatattcaattgttattgtaaattgtacgtacttaaatgaa

SEQ ID NO: 17420 - DNA, 1866 bp, Heterodera glycines
ttttgagtagattagagtacaaataatagaaaattttcgattcatgtttcccactcccttctaccaggggtattattttgttaaagtttttttccccaataaactttttataccccatttttcgcaccgtgaatgttatttttattgaattctgaaccgttttgagtagattagagtacaaataatagaaaattttgaacatgtttcccactcccttctaccaggggtattattttgaaaaagtttttttttccccaataaactttttataccccatttttcgcaccgtgcgtgttatttttattgaattctgaaccgttttgagtagattagagtacaaataattgaaattttgaaatcatgtttcccactcccttctcccaggggtattattttgaaaaagtcttttttcccccaataaacttttcataccccattttcgcaccgtgaatgttatttttattgaattctgaaccgttttgagtagattagagtacaaataattgaaaattttgaaatcatgtttcccactcccttctcccaggggtattattttgaaaaagtctttttttccccaataaacttttcataccccatttttcgcaccgtgcgtgttatttttattgaattctgaaccgttttgagtagattagagtacaaataattgaaattttgaaatcatgttgttggctcggacggcaaaggggggcaaaatggaaaggcgcgagggagagagggcggggtggaataagggggaaaatattccaaaggcagaaaagaagtttatttaatttaaaatataaataagataagatgaataagatgtctggataagatgtgaggagtgagaaatgtgcgtgtttaaatagaaagaaaaagcgtaggtggagcaattttggacagagcgatcaacaacaaaaagagtgactaatgctaaaaatgtacaaaatgttcaatggagggacaaaatcacaatttcaaagatcaccaattaaataataaaattaatcacaatatttaaaattatccaatttaaatcaattaaatttctcttcctcaattttcttcatttcttctttttctccactttcttagtcgctttggtgacataacatgctttattagccttacaaaagcaacaaaattttcaagcctggaaaaaatttattaagaaaaaacttcaaaatttttgttaagctttcgaatgatatcaactagagcccggcgggatcgggactcccgcgggattttacgggattcccgctcccgactcccgcttttttcggtgaacgggattttttacgggatcgggatttttacgggattcccgttcgggactcccgtcccggaaaattttgaactcccgatcccgctcccggaaatttttacccaaaaacgggagtaaaaatgcactggtaagaattggaattttttgaatttttggcaaaacattttgccaaaattaaatagtcagattaatatttgcttgtcaactttctcatgaggaataatatttttgatattctttcttccaatttagttaagattttaataattcataattaatggcgccatttcaccctatttggaaaattgggttgtttgagaagagcaaggaaaacgacaaactggcagaatgcgttgaatgcaaagccaaaaaacagccaaaataccaattcaagctttccgacgggagcatatcatcattaatttgtcatctgaaaagtgaaaagcataaagattcggagtacaaaaccaaatttgatgaaaagatgaagactctaacgaaaacagacaaaaggactgaagtgaaagccgaaaagattgacaattttattctgcgtagtagtggtaaacgaataaaat

SEQ ID NO: 17421 - DNA, 2681 bp, Heterodera glycines
aataacagaaaataaaatatcccagtataaatattagccatataagaaaactaaaattctccctattgtaacagttacaaaaatggattgatcttaccatttccaagccgtcgtacggtatccctaatggcgccgctaccgtccgaaatgtttgcacactaaataaaacgaacaaaaaaaagaacaccaacagatcaacaaattctgctgttggtagtgcttcacgcaaaaaagcaatgttcaaaatttcgctggttacggtagaggacgatgacgacagaatgggctactgtaacagtagcaaaggtcggcctaaacgttcttggcttccgctaccagagcaacagcatgaaaatcacaaaaaatttggctcatcggttggtgaaaatttcaaacaaaaaatgtggtgacaaaaactcaaacaaaaaaaaacgacaaaatttttcaaaaatctggcaaaaagccggcaactttttaaaaaaaaacaaaaaatcattaaaacagtaaaattttcgaaatttttcaaattttatgctaaattttaaggagatcaagtgcaaaatagtaaacttggcaaaacccggcatggcctcaaatgacggtttttccaggcaaaatcgcatcccctgagaaaaatatttaataaacaaattacttagaagaaataagaaaaaaaaattcaaaattatttttgaaaaaaaagaaaatagggtaacttctcattttttaacaaaatgaaatgagttagaaaagaaaattcaaaaaattgaaaaatttgtgttttttgaccgacagaggcataaaaaagcatcagtgatgagtcagcgacatcattttttggcattggcacagcccaaaaaaacgacgacaaaaatggtcaaacattggtcatgcccatacgaaatttggtgtgacaaatttttacgggagcacaactgtcggcgggaagagctgtgcaaagaggtgggatgcccagaggggatgacgacaaaatcgaaaatttgtatttttaaaaatttcttgaattttaaaccctaagtcccgggctgagtatttttagtcacaaaatgaaaatcttgcttataagaaacaattttcatcagtaaaaattagaagcctccataaaaccaaatttcatggtttctcaccaaaaataaataaaatattgccaaaatgaaaaatctaaaatttttgttactttaaaagcatttactctcctatagctgggtctaacccagaaaatagacaaattttcaataaatttaaattttcttgtccgggaattattggttcgcctcactccgaggctgggacctgtctgagaaaattgacaaattttcaataaatttaaattttcaggtgtttctgtccgccctgccccattttggcgtgttttttgttgtttccgcttacatttttcttggctctttggcgttccgtcaacttgacactcaaatggccaagcttccattccacgatgtgctgctgttcgcattcaccacaatcacaacaattggtgggtgaaaaataatgaaattaaataaaaagaaaaaatatatttttcaagcatattttcgaatttcaccacaaaaccccctttattagaacagcccttgtagttttcaaaaagtttcttaagtaattgaaaattcatataaaaaggataattaattagaaaataattctaaattttactattttttggttttttaaaattggtactgaattccattaaatcttcaatccttaaagttgttctaaaattatgcctccacaaatttaataaaacaataaaccggtttttggagtacaaaaactgactacgaccccccccccccccccaaggttacggtaacattgtgccacgaacaccgttcgcacgagtcgcctgtgtggtgtactgtcttgccggcattccgctggtgttcctgccgttgtccaaccttggcgaactgttagccgaattctattgggttggaatcgcctcattgaaaggtcagaaggtcagaaaaaataaatttaatacatattatcagctgttttaagaaattttaaatttctaaaattttgagattttatttttaggcagaatttttgcgaatgaaaactttaaaaaatgcgtgtcaaacaaacactttcataagaaaatccatttctcggctctcaaaaagtcctatctgttaatcatttgtccccaaatccctcttctccactgcccgagttgatcatttgtccctacccatttgaacattgtccaatttttggcattttgtcatattttcccaatattaacgagttattcacatgacagaatttaccaatactgttcaggagaatgctggtgccgatgaccagctccatccggacggtccatgtcgtttgccgttgaaagtggttgtgttgctgatactgttccattccctgttgggtggactaattttccatttttggatacaaaaaatgccaatctttcctgcaatatatttcaggtgccaaataatgctttatgaacattttaaaattttaccagggcttttttctggatttgaattttttaatagctaacgcgatcatatcgatgtttaaaattcttgagagctaacctaatcaaaatgacagcatttttataatcgacccaattaaggaattgcgatgtctgagtttttaagatttttttgttt

SEQ ID NO: 17422 - DNA, 815 bp, Heterodera glycines
ccccccccccccccccaaggttacggtaacattgtgccacgaacaccgttcgcacgagtcgcctgtgtggtgtactgtcttgccggcattccgctggtgttcctgccgttgtccaaccttggcgaactgttagccgaattctattgggttggaatcgcctcattgaaaggtcagaaggtcagaaaaaataaatttaatacatattatcagctgttttaagaaattttaaatttctaaaattttgagattttatttttaggcagaatttttgcgaatgaaaactttaaaaaatgcgtgtcaaacactttcataagaaaatccatttctcggctctcaaaaagtcctatctgttaatcatttgtccccaaatccctcttctccactgcccgagttgatcatttgtccctacccatttgaacattgttcaatttttggtattttgtcatattttcccaatattaacgagttattcacatgacagaatttaccactactgttcaggagaatgctggtgccgatgaccagctccatccggacggtccatgtcgtttgccgttgaaagtggttgtgttgctgatactgttccattccctgttgggtggactaattttccatttttggatacaaaaaatgccaatctttcctgcaatatatttcaggtgccaaataatgttttatcaaacattttataattttaccagggcttttttctggatttgaattttttaatagctaacgcgatcatatcgatgtttaaaattcatgagagctaacctaatcaaaatgacagcatttttataatcgaccccaattaa

SEQ ID NO: 17423 - DNA, 943 bp, Heterodera glycines
tttttctgtcattgtcacgtttaccgtgagtttcttggtttttcggtcacggtcacggttaccattgagttccacgattttttctgtcatggtcacgtttaccgtgagtttcttggttttttcggtcacggtcacgcttattcttcatttttttcggtcatggtcacggttaccgtgagttccacggtctttttcggtcacggtcatatttacgggtttttctgtcacggtccgtttgccgtgagtttcttggtttttcggtcacggtcacggttaccattgagttccacgattttttctgtcacggtcacgtttaccgtgagtttcttggttttttcggtcacggtcacggttaccattgagttccacgattttttctgtcattgtcacgtttgccgtgagtttcttggtttttttggtcacgagtacgtttattcttcatttttttcggttattgtcacgagaaccgcgtgttccattgttattttttgtaagggttcaaattaacggcctatactgtcaggagccataactcgagaagtttcttaacatcaccccaaaaacacctgtttttcgtgccttccaggacacgtcgagctcagtaaaaaatagccttttgccaaaaaatcccatccctaattatgacacctaaaatcggtgttctaaaaaataacctaaaagtcaggggggggcgtacacgtctgtggaggttgcgacaggctcgtaagcaagggggccgcttcaaccaaataaaaattatgaaaaaatctatacattttcttgaccaattttttacatttgctaacaataaccccaatacagtgcttattgaaacgggcagaatgaatgactgtccggtgaagcattccgaaaagctttacatttttttgtacatcaataaattacttatacataaaacaggccgtccggagtcaaacaattt

SEQ ID NO: 17424 - DNA, 1349 bp, Heterodera glycines
gatggggaggaggagaaatcgaagctagcgcatggggaggaggagaaatcgcagttaacggatgcggaggacgagaacttgcagttagcggatggggaggaggagaaaccgaagttagcggatggggaggcggagaacttgaagttacaggatggggaggaggagacattgaccctaaaggatggggaggagcagaaactgaagtcaacggatgcggaggagcagaaactgaacttagaggctggggaggaggagaaaacgaagttagaggatggggaggaggagcaattgacagttagaggatggggaggaggagaaattgaagttagaggatggggaggaggagaaattgaagttaaaggatggggaggaggagaaattgaagttagaggatggggaggaggagaaattgaagttagaggatggggaggaggagaaattgaagttagaggatggggaggaggagaaattgaagttagaggatggggaggaggagaaattgaagttagaggatggggaggaggagaaattgaagttaaaggatggggaggaggagaaattgaagttagaggatggggaggaggagaaattgaagttaaaggatggggaggaggagaaattgaagttagaggatggggaggaggagaaattgaagttagaggatggggaggatgaggaggaaaaatgaaaatgagaatggtcacattcaattaaattccaaaatttattcattaactcattcatttgtcttatcatagtttcaattttggagaacaacacttcgtttgcttctccactccctgcaaacaaaaacattcaatcacttactccatactccaattaacatttaatcattagagtgctcatttttaagcacaaaaaatcaccgattaagcactgttaaaagcagcaccaaatttcccaaaataagcatgaaaaaagcacaaaaaagccaaaatcagcacaaaaaaagggaaaaaagcacaaaaactaagagattaaaggcacaaaaaattgaaaaaggtattaaaaaaacatttaggtatttgctcccttattataaaaaaccctaaaaataggtgctaaaaacgatgatgataacataattttaaaaatcaaaaaattcttgtcaagaaaataaataaaataaattttggagattaatttttgataaaattttccatttcttaggggtgtatttttctgaaatttttcgggtcgattctcaagggtgtatttttcatttttttattgcatttttgtttaataatttttttttaaatgctgaaaatattttagaaaattcctcaaaatgacaaaacagcacaaaaaagcaccaaatgccaaat

SEQ ID NO: 17425 - DNA, 2840 bp, Heterodera glycines
atataatttaaattattaaaaagaaacattattaatttattgaaattataaaaaaaaatatttcgaggaataatttcaatattaaattataaatttaaaattgaaagtaattaattgttttattaaataaaaaacaataaaatttaaaatattaaaaaattgcttgaataaccgaaatttatatgagaacaaaaacaaatccaatgtttttccttagtaaaatgagtaataatcttgtggctttgctttacgcatttaattgaagtgagaataccggccaagaaaataaatgaatgttaagtaaaaggaacatcgtaaataataataaataacaaaataaagaccaatgaatgtggagacaaacatatcaattgtcagaaaacaagaaaaaaaaagggaaactaacagcaagattaaataaaaatataagtaaagcttgaattatttatagcggaataattaatgaaaatagaacagaaaagaacaaactaaatgtaaaaaaatgaaaaaaggatttgcaaatcattgaattttgctttataaacaaaaaaaaactgaatgacattataaaaagtaaaaccaaattacaattttacattacgggataaatgaaaaaatagaatataataataaataagagtaaatatcctttttggaaatatcctttttggaaacggaatttaataagttagtaaaaatgaaatattattattattttaaataagtaattcaaataaaaaattaaaaaaaaaacataaattatttatataataatccatagaaaagcttctaaacagataatgaaagtcccaattttgtcccaacgttaaagcaacaactgaaatggctttcactcggttttctgcaggctgaacgatattcataaaaaaatatctatgaaaagaaacattagacttacattatattataaaaaacaatttattaaataattttaaaaaacatttgtacaaacttagtcgagaagaaataattaatgtcaatagattatttcattaaaacaagcaaaagaattaaaattcaaaaaattgaaaggcaataaaatcaaaaaataatataattaaaattaaatttaaagacaaaaaaagacttgtttttttagtatttaagagcacttagaatccaggaaataaaagtatgtatttgccaataatttctagtcctaattataagttatcaataatttaaagatgccaattagtattatgcatacaataaaattataatataggaaaattttttcgtgtttcacacctactagaaatagccaatgaattaatctgatttatcaaagagactataaaattattaagctgaatgcataagtaattttgatcactccttgatgatgaaatcaaaacgaaaatttcaatttttttgaaaaaaagtaaacaatatttcccgaaatgacaaacattaattatattaacaatataaattatgaattcatttaaatataaaaaatagattaagaaaaaataaatcgactaattaataatatatgaaatttatttaaaatattataaagaatattaaaaattccatttaattaataagaaatattaaatttaattaatagaaataaggaaaatgattgttggaaagacacgaaagaaaaattctaattggcatggtaaaaacgaataaaataaatattaaagctaaacttgtttaagctaattagcaaaaaaaaaatattagaaacttataaaaaaataaagtttaatgaattttttttctattaataaatataatcatgcaatagcttctttatatttaaataaaataaaaattggatcgatcgagaatcaaattataaaataatagtcaaaagtttaaaatggtataatgttgagggatatacaaactaaatatatttagatttaaaaaataacaattttaaagataaaacggaagtctttcaagaattttttaagcggataattaattgttttagtataataatagaatacatttttgatcgaataaatgtaaaaatatttgtagcaattttgcaaaatgttcttatttttgaccctaaaatcttattttttggcctttattcttattttgaaaattttgaaatagaaaccctggatttagataaaaacacccataaaaattgactattctgacataatttataatccttaaatttggtcatttttagacaatatctatgaaattataccaaaaaagaattgaatcgaggcgatacatcgaataaaggaatgtggagccaaacacatcattcaaaaaaaaaaattttttgtgagattttttggagctaattaaaaacaaacccccgcccccgtccccgggggcgagaaacttttcatataccgtatattggctaattatcgccccgtctccattaatccccccgtcaccaattatccccccgtatctaattatcgctccctttctggggaggttgaaaaataataccagtgggtgataattgggcatcaagggcgtagccagaaccttggcttcggggggtggaagtcaaaaattcgatttttaggggtgtatttttcttttcccagtcgatttttaagggtgtatttttgcttttttgaaatcccgaattaggggtgtattttacaaaaatttttgccgtttttcgccaaaaaattgctattttttgccattttagcctccatttttcaaaaatatggtaaaaagggggggtccggcggtgccgataggcgccgccggaaaaattttagagtattttaatgcaaatttatgaagaaaattgcttaaaattttcaaaaaatgtactgtaaatttttatttttttgggtttcggggggggg

SEQ ID NO: 17426 - DNA, 3517 bp, Heterodera glycines
  unsure (1)..(3517): unsure at all n locations
ggatttggattcttgtcgtccgactgcgttgtatcaaacactgaagccagccattcaagcaaagtgttcgcctatnttgtacaaactcgcagatggaccaaattntttggggttattcatactcttttattatattgagatggtcgtattgaagagaacctattgttattttagactttcccatcgtctcattttcgctgtgttatgtcgcgactccgtcctcctgtacagctcccaaaatgagtttccactcgcttacattgaaaatctccagtacgacaagttgacttcaatggcttggacacccgacggccgtgtgttggccgtttcctcgatggaagggttcaactcgttcatcacagtcgattcgtccaaatttggcaccacaattgaactacagaatgcggtaacacctttcggagacgaagtagcaatgtcccctctaaacaaagcaaagaaaaacattcgtaagcgatgccctgaaaaatagtgataaaaaagcttaatttctttcctttatttattattatattgtccagataaaatgttttatcttgcaaagaaaccggacacattctgagtttttaacacagtatttatttatgattttaaaattatatttactaataaaattctaaaaatatactgtatagacaataagaaaagtcaaaatatctccaatccatctgttttggtttttgtcatctatgaatttgaatgaattatgtccgaaggcggaccaattttcgccaagttttggagtgccttgtccaaccactaaacaaatttaggtttaaagtacttttgtttcaattattacgataagtggggcgtgtaaatgcacttctatccaacatggcgttgaagttatgctttttataaaattaaaatattaaagaatgatttccccttccaatactcttgtcgttggtagtccttcccccaacccttcacaaaagccattcgtatggttgtcattttggtcagctcaaaactgctgttgtaacccaaatttacgcaatgattgagcaactaacaaatgaaaaatataataaaatatagggaaaatgtaaaatcactttccaacctctccaaattttgctgtgtcgaatattttcaacgaatatccatgagagagtttgcctacactttttgtttttaaatggaatgaatttgcactctcacaaacggtggtcggatggaagtcgttggtcctgtggtgggattgattatgagtcggaactcgattaatgatgagaaagtcaaaccaattgctgttcctcgactgaatgaaaatggggcagtcactcaaacattcggcatagagtgttcctttgggattcaaaatcaacaatttctgttctccccccccccgtccaattttattgccttggtaaggaacataagtgagtttcacgcctctgccaatttgcctccgcgtgttttccaccgtcgaatttctattaacctaaaatttaatgtccaaatgaatttaccctaaaagagtaaattcacatttgaaaataaaccgagtgaaattttgtgctggtcgttggcttctccgctgctcggatctgtgaacccatcgaccgaaagtcaaaagaattttggaaaaagcattataaaccaaccacacattcaattgcactgactcttgcctttcaatgataaaattttaaggaacataattttgagtggaaagaaatgcggtgacaccaaaacagtcccaagggaattaagtgatattatccatttgcttatggactatatttaatttgaatatgtccatgaagtaagtggatttttccctttcgtggattatttttctttttgacaaaaaaatagaatatacctgttcaccaacccgggtgctcaattcgtaatagctaatggtggcccagtgctggcatggcacaaacggaatagggtcgtggccgagaagaacgcgatgttcgccgcccggctgacgtttcggtggcgaatcgctgaagcggggcacaagaacaggcggcaacaagttggagctgtccacgcgttcgtaatgataaggattgatgcacacatcctcaagaaaaataaatgaaaattgacagaaagtgaggaaacgcgcactttttgaccggattcgaaacaaaaacggcagcattgggacgctttaagctaaagcaaaagtttgtgccttctgatcgggcattatttgtctgatcacttcgtgatgcgattgcaaatcgggccatcggtagacgcggcagtaaatgacgtgcggaagtgcttttcgatgtgaaatttgcagacgcccgtccaatgagcgcggaatggtgacgcattcgctcggctctttgccctccgtacgcaaagcattttccaacagagttaaaccctctttgttgtgctgcttttgcaactttttcagcaaactgtcaaccgcctttttggaccatccctcgtcctcatcccctgagaaagcattctttgattatcataggcattactataataacctaattaaccttgcttccatcccaaccgtcgcatgaaaccattgccaaaattctccaaactcattttaaagctaacgaaataaacaaatgataatgagactaccttttaaactgattccaatacgggagcaaagttctttatctatttacccgatcaatgtttgaatttacgtttaaaaaaacatattttttgtttttgcagcaatttatcgcaaaattcattgacaaacaataaaatatttttaattggatcgcaattcacacaaaggcatagaatcaacgcaaaaatcaggcaattggcaggtcactgtacaagaacaaaagagctactgcggcacaacttcggcacgcctgccactttttgcagtcatcgcattcggattttcatgccgcgcaatcagacgttcaaccatcacctgaatttgcaaaaaatatggacctaaattgtgattattcaatagttttcatcaagcgaattaattaccttagtgtatttgagtctctgacacaaatctttagggcatccgtatttctccaaatattggaatttgcaggtgaagacattcttctgctggtctatgtatgtggcggcactcatcagcggacacacaatcaatttggagtgatcctgaaaagacaaaatcccataataaatgtgcagaaatcaccaatattaggccattcatgtgtttattcaatgcggacctggaagaagttgatctgcagagtgccgttgctcagatgcaagacaatcgccgactttgtccggaaccacgtgttcaggcagggcagccgcgccaactcgtcgccgtcccgcatcttaatgttggcgcccgccttcatcagatgctcgttcatgtacgaccggaagaacttgagcagagtgatcttcttctccagcgcctgcgggtatttgttggccccgtaaaagtgagcggtgttgttccgctcggtgtattgcaactgactcaagtggggggggaattggcatttctaattcaacggagccaaactca

SEQ ID NO: 17427 - DNA, 2537 bp, Heterodera glycines
aaaatttaacctattaaaatatttagaaaattttattatattttatgttttttgaaaaatttccgagttccgacgtttttggggtcggaattccgatttccgaaaatttttggggcctcggaatgccatcccattatctgtggtcgattttttgaaaacttttttgagataaacttgttttagggatttttagggtcggaaaagccgattctgacatacattccgaccaaattcgaatcccgaacccggattcgagcaaaactcgaaaaatcgttttacaacaaaattcacatttattgcacaaaaaggttttttaggggaattttagggtcggaaaaacggttctttcatctattttgtcccaatacgaactccgaactcagactcgaacaaaattcaaaaataggaaattcatttttcaacaaaagtacagccggaatttgaacaaaaattttaaatctgaaatttgtatttcccacttttgcttcgaattcgggtccgggattcgaaattggtcgaaatggatgccagattcgtgctcagcgactctgaaaacccctaaaaacatcgtttttgggacttacagatttttttaaattttttttctaaaaaggggggctaccatcggcactattaccgtcactaaaagtcgcggccctaataattacacgccctattcattatcattgatcttccatttattttctaaatactgtaaggcgaaaatttatcgcatccatttaatctctttctcaatctgtgatctgaaaatttaagaaaaatttgtcaaaaaatggcacgaatgcacaaaattccgctggaccctgactcggcaaatgtgccaatgtttgttgctaaatgcgagcaatggttggccaatttgccaacacactttgaacaggtcgaaatgcagcaaaacttcgatcaaaattttaatggtaaagaatttaaaaaataaaaaattctttttttaaattaaatttttaaggctcttctttgtctgagcagttaactgagctaattaaagcattggaaacttctgaatcaccgttggtggtgtttgcgcacaacgatttgctgctctttaacagtaagacaaaaacaaattctcatttatgttaatttaataatataattttggcacttaattttgctagaactatgattgatcaatttttgggctaatcaagacataaaaaatgtgtgattggctttttgggaacagttgatcacaagctcaattaggtgattacggtctgatcaaagggacaattcaaattttgaaatattatttttctattattttttggtgatcaattgggcaatccttggattatcaatttgattagattactcctaataaataacaaatggacagtttattatggcgatcaaggacaattttgatcagtagacttcttgagctgtcaaagattcgaatttttcatgcttcgagaacgggactgaaatttgatcacaaatgagttatataaatctcgacccattaattaatctactaattgccaaaaaagctaacaataaggatcgatttcccgagttttagagataaaaacaaattaattaattgcctaatttagtcctttttgacgaggaaggcactggcgatgtccatttcattgactacgaatatgcgggccaaaactaccaactgttcgacattgcaaatcacttttgcgagtacgcaggttgtgcacacagaatcggttgcacttcatttatgactacgtattggttttcaggtgttgatgagtgtcccgattatggaatgaattcggccagtgaagacgaacgtcggcactttctgcgccgttatttcgtctattttggccaaccaattgaggaagagtgtgaaatggacaaaatgttgtgcaaaattcggcactttgaagcggtacattcataatcacaataaaatagtgttaacttttcatttacaggcagcccatttttctggactctgtgggccatccatcaggcagcaaaatccgcgattcaatttgattacatgcgttacgcgatcacccgccatcgttactgcactcggcttatgacctcatcaggcattgctaaaaataattagccacaaaagcacaacattattgatttttggttttcgttatctgtactttatcaactctcttaataaaaggtgacgatcaacgcgatactattcggtttatcttcagcgacgaataaatcttaaaatggtcggcaatcgtgaagattattggtcccacaaaaaaaaaaagaaataaaaattaaaaaaacacttttttagttttatttaaattccttaaattgatttccaaatgttttgcgatttacaggagatcactaaaaatggcttgaaatggagtactagtaaattgggaaattcattacatacctaattaacttttcgcagaaaagagaaaattaattttcatcatatcatgaaatggccagcaattgggtcgagaaataaaattatataatggcttaggtgggatgtcaattcaaaatcgcatgacgccgct

SEQ ID NO: 17428 - DNA, 857 bp, Heterodera glycines
  unsure (1)..(857): unsure at all n locations
acgtgcttcgctttgctgccccagcancggagtggcggaaagatgagctggggaattggttggagcgcttaaatgatggaagagcagcagcagaagaagaagagtgaaagacgagcacagtcatcaggcaaaagcagcaccactcgcactatttaatgcatttcaacaacaaacgaacatttggcagaaggaaattatgtccaaaaaaaagtcaattagaaatataaaaatatatagacaagtaattgatgaagatgtttgagaaattgactcgagaaaaggcagtcaaaaaagagtggaaaaagtaggcattctgacaaacacaaaaaccatatgaatgcagcaaaaattcttgttcaaatacagataaattgaatatgtaggtatcagaaatttaatgtgttatgtttatggtctaattggccaaatcttcgtaacgtattcgctcgctgaatttttttgacgcacttatggagatccgttcgttatctttgaactcaattagaatttttcattttgttttttccacatcaaatttctttatttttaaggttttacattttttgtcttgtttttatcaacaacacatgcaggaaaaggctttttctgttcgagtaattcacctattctttttttgttttgtttattttagtcgcaggaaggcgtccttcagcagcagggaacagctcaaaatgggaataaagaggaggaagccaagagacaagcggaacggcaggaaatggcaaagaactccattttgacacaggcaaaggctgagaattaaactgtctgagtgccgcggtttctgtgattattcatttactttttaatatttttgcattcagattatcgacaag

SEQ ID NO: 17429 - DNA, 849 bp, Heterodera glycines
catttttttcactaattgttaaatgcatcaaattcattgcttttatgaaataatacattccaaatggaaaatatctatttcttacttgatggcatgataaaaaaagaaaaaatggtggaaaatgttaaaaagaaaaatcaaaaggagcagacattttttgacttttgtgaaaaacagtcgaagagaagcagcggaaagacaaacggtgaaagagcggagagaaaggggagaaaggacgatgagtaagcgatagagaaaagtgatcaatggacgagaagataagagagattaattaagcaaaggcggacagtgatcagcgcgaagtcatttctgttgataagccgatgaatgcttctgctgatgaaaagcatttgatcagtaaaaactaaaaaaaaagaaattgttcaaaaatggtaatacaaaagcattgatcagttaacaaattgaattgatcaatgctttgatcagcaatgatttgaataagcgaatcaatcaatcattaaaaggccattcccacgttggatttagtagcaacattctcttcaccatctgctgccaattgacctcttcgagaccgaaccggtcggccgcggctgccctcgggcgacgcgaaagaaaaataataaaaaaatgttccatccgagaaattcttttcacgcttatcgcttctgagaatgagcgagttccgtggcacgggcaaagggaagaagaaaggagaagaagcccgtttttggggaggaaagggggggaagagcggatgtgatgaaaagaaaaggaatggaagacacaaattaagaggagggcaaggcttagggtgggagggagggggcgaggggggatgaagcggga

SEQ ID NO: 17430 - DNA, 1981 bp, Heterodera glycines
ttattccatcatttgtgggtttagtctgtacgcccaaaatcaaaaaacctaagaaaaataaagaaatattcccctatattattaatatgttgtcgaaccgaggaaaacgaggtagatacacagtcgagtgattgggggggttggggcgggaaagctaaaaaatataaaattaatcaaattatagttttaagaggatggccaacttcttcctaatcatccagcttgtatttggaacatgctaatgaaaaaaatcaacaaaaaaaaatcttaaaaattaaaatattttaatagaattttttttctgaggatttgctagccccgggatacgatatcggcgacttccccctgcgctttcccactgttcgctttattcctgaattcatttgtcactcagtcagtcgttgtttcattttttgccatccttcaatatttcccattttttcttctcacaatcccaatttctctttttaagccgccttagccgctaaataagattctctctcagcatgaattgcttctcccccctcccccattttcctctttaccaaaatcggtcgctggtcttttaatatttctgaaaatcatttctccgggcaatttgcaattttcagttttttttgtatgtatcaatcaaccttatccatgtcatactcatccaaatagcgggccaattgacatgggatcagattggttttgatcagttggggggggggcactccaaaattggccactttaattaaactaagcaaagcattgcacaaaataacaaagtttccagtcatttaaccatataattcggcgttgcatctgaaataaaatagtcaatgaaaagtgacgggcggggggagacggaaattgggcgggggcaagctgatcgacgaaggaagctaatcaagacgaagccaaaaatgccaatggacggaaaacggcaaaagaatgtcaattgaaattgcaaaaaaaagcgaaaaaaacatgaaaatgaaaatggtaacaccaattaagaaatgggggatgatccaatggcttgcgcatgtaattagcctcacttcgcttccctttcactttttccccccttttaccttacatttcgtcagacctttgcccaccccacaaattgttgcttcgcaatttgcactgtcattcgtcgcttcattcattcgtccccctaaactggataaagtctttccattcagcaggctttcattcccacaaattccccctttttttccctttttttcccttttttttccgctgcgttcggttgggcctttgttccccataatagcaaaatcaaattcacccatagaagaagcagcagtttttcgtgcatttggtcttccttaaactcgtccatttgaattaagcggaaaaacactcacaaatcagcgataaaatcgccctccccccccccacggattggtcactctctccccccccccctttaatagcgaagttttttacaaactttcacttatttgcatccctccaaaattctcagtttgataagcaaatggttccctcaaaaactttgaaatggcttttccttctttcgctaatttgccacttttccacttcggtcgccgtgggcgacgccgtggaacagcaaaaccaagcagtagcagcaccaccagacacagcatctgttgcggatcaaccatcaacagagaacagcaaacaattggcagaacagccgaacaatcagcaaaatgccaatggaaacgaaagcgccacggggggcggaggagcgggacgcgcactcgcggcaccgcttctccgagggccggagaacgcgatcgaattgaacggggagcaaaagccgtttttcagtgagcgaagggtgggagagagagaaagagagagatagagagagagagagagagagaaggaaggtggaagaaagcaaaaagaaatgagagacaggaagaaaaaggggagagagagaaaaagaggggagagaaagggaaaagggaaaagaaaggag

SEQ ID NO: 17431 - DNA, 1309 bp, Heterodera glycines
  unsure (1)..(1309): unsure at all n locations
aaaaaaggagtggaaatgtgacaaaatagaaaggggcgacccaattattcacccaatcgaccactttttgcgattccgtgctgttcggctgaatgtccgtcgacgcatttgtcacatggacggcctattcccgtaaaagatgtacatgtgaatttgtttgtcatttttgaagtccatttggcctagtgttaatgagctgttgataacgattgcaaagtcacagacgagcgaaagttaaccaattaaaagttgagttgagaaaaacgtggtaagaacgaggcaaagggagccctaagaagcaaaaaattacattgaaactgatgagtgagctgggtaaagggaataactcacaccgaataaatggttatatcttatggagatacgcacctgaaaactctgtcttccgataaaatttggttgtataaaatcggatggccattttggtaaggaaaaaggtgcaaaatgacgtggaacgagtgcactttgtacatccgtttgtattgtccgcgataataatgacaatttacgcaacaaatttgacctaaacaacttaattttgggttttcggtattaatttggcgaaattttttcttaaaattagtgctgtttctctgttccttttctgcaaaattacgacttgcttctcttacggtagagtcaattaattcttgcacaatttgtcattgttgaatcactctccgcgtcctcctctcccgtcgctgaagaacaatttgagttttcggaaacgaaattggtcgatggacaagactcaaccgactcagtcataagatggtttggaaggcgatgtctgtggtgtccaaaaagctttgtttacatttacagttagcacaaaccaaaaatgaacgtttaattgttaaaagtgtaagcagtgctgggctctacttaagtttacgtgtccaaccgacttttacgcgtccaatcaaagactatcccccctgtttcttaggttatatcttttttttcatacttggtcaatccatacatctgtggcatcattgaaagctttaagtctcaggaattcaaagataaagaaaagctgcaaatacttgtattaagataaaattgcaatcaaaaaaaactgattaatcattttgcgtatattcaagaaaatttagtcttgctttatcccagaatttttcaacacaagaaaacttcttttagcttaaagctttcaattgatcccaaagatgtatggattgaccaagcagaaaaaagctgttcggttctatgcattccatgacatattttatgntccatatttttttttttgcgtcccgtcaatgaccat

SEQ ID NO: 17432 - DNA, 1916 bp, Heterodera glycines
tcatcgtgttggtcctgatcttcgccactctggtcgttcagtatctctactggatgaaaacatgtaatgggtgaggggacaagttttttgacggttcaatttctttgttattttacttgtttatgttcggatataaaaaaaaacaaatacttttttgtttttgttaaaaatatctcataggcacagagtaacaggtccaccaaaggtttttttgggaaaggattacccccctcatcttataaatacggtatgattaaggaccaaaatagggatagaaatctgtctactcttttttaatgggttttaaaaaattaaattatggtgtctttatatttaggtttttgaaaactttatatttcagccattattttttaacaattaatttaattttttatcagcagcgaaaaaaaggggaaaatacccttagaccacccctctgacagagaattctggattcgtaattaaaacaattttataaaaaaaatgccgtaaggtttatgttaaaaaatccactaaaaggctttgagtcatttaccccacccctcctccctctgaataggggtagaaatatacctactttcttaatggtcttttaaatcacacaacttttatttaaaaatgattcacactttatttaaaaaatggttcatatttttttattttattgcaaaaaaatggtggttcactttttttatttttaaaaattgtaagaaaatatggttcatacctttggattttttaaaaattgcaaaaaaaatatggttctcacctttggatttttttaaaaattgcaaaaaatatatagttcacacctttggattttttaaaaaatgcaaaaaatatatagttcacacctttggatagatgaattttaattctaaaaaataattcgcagccaagggggctcgaactttaggggccaaaatctggtggactaactactgtttttcggttctaaaaaacctcctaaatagttgctaaagatgggtaaataaaagttgctaaaaatttcaaatttaggggtgtaaaatcgtaaaattttatccaaaaactaacaaaattaagccaaatcattaatgatttttaaaatcacaaattttttgtctaaataattaaattttggagatgaatttttgagataattttcaatgcatttttcctttttttttttgtatttttgttaacaaattatgggaaaaagccaaaagaggtgaatataagtttttttaaaaattcttagttttataggtaaataaatacttattaaaatatttaatttttttttcattgtacgcattttatcaatcatccaaattaacaatccatggtatcattcgatagccctaagtgtcctctattagcctgtaaatttcaaaaaatttcgttgagtttcaaggtagtttttggcttgttaatttcaaaaattggttccttaaataattttggctacaacttctttgaagctcatttgtcaacgaaatctttttaaaattttacaggctaatcacttattgctatcaaaacataccaagattgtttggatgcttgtagaaaaagttatgttgcattaaatttgtcaaattatttgatggtcttaatttttgaagggtcgtgtatactaaaatagagccaaatatatttattataaatagattgttattcaattatcaattgattatttaatttaattatttaaataaattttccgtactgaaataacccgcctcttccgatcatccctcatcaatacttttgacacttcgccacatcgatacttttgacacttcgactcaccacgaactcaaggcttcagaatctgggctggacgtaattacggattacggaaattacggactttttggagttacggattacgggttacggatttttgggattattccgtaattttgatccgt

SEQ ID NO: 17433 - DNA, 2049 bp, Heterodera glycines
  unsure (1)..(2049): unsure at all n locations
gagtttgcctcgcgacccagcgtgtttcagtcgtgggtgtttgagcgtggacgcgagctggatgcgctgcgtgcggcgtccggtgacccgacgcganctggatgacagtcgcaagcagttcaaggagctcaccgaacacattttggtcagttttatcacttcacggtttttaaattattttttggctttttaaaaaatttaaattgttaaaataattttgatttaatatttatttatttattttattttttatttaatatttttaaatatgcaaaattttatttacatatttttttaaataaaatatttattttagatatttcatttaaaacatataacctaacttatttattttatattttgtttctatttttaatttataggccttataaatttttattttaaaaaatatttaaaatacatttttttaaattatgaataataatttaagagttttttcgcctaaataatttattttttatattattgttcattattggcacgaattgcttaaataattaatgttaaaatttaagtcaaagcgaggcgaactgagtgccatcgctcagctggcgcagcgcattgaaggcgagatcagcgcttatttggcggagctcagtcggcgcaatgagtcaccggcgccgggattgcaacggcatcactgtgtggaggcggcgcagcgggcacaggacgattatgaggtaaatttaaaagaaaaaacactaaattctttttcaaaaaataaaaatcttgttttcataaaggatctttgctgaaacgaaacttgcaattttgttagattagtatgaaaaattctctatgttttcaaagacctaaaaaattttgtctaaaattaaggcatagcaaatttaagccgaaataagcaattttaggagtcttaatcaaaatttaaaaaattatcttaagtttgagtcttacgattccggaaaatgaaaattgttgaaattttcaaatatttccagtttaaatgtttacaaattaaggcacttttgggcgccaaacaggagctgtctcaactgttgcgccgagtggcgaactgttcaatgcaatatgagcaaaaggtggaggaagtgaacggatggatggccgaactggagcgagcaatttcgcatgccaatgtcggcacatcgggcgcaacaggtggaaacttggaaaaaaattttgcattttattttaaaacgaaattttaaattcagttttcaatcatattttgatcagttatgtgaatattttcaactttttgttcggctaactttttgggctttgtcattttttggctaatcgcaattctttcaaattctcattaggtagggtcgcgatttttaggttttaactaaattttttgctcaattgatttgaaaatgaaaaatttttctcaaaaatgtattttttggcaagaattttttaaaattatttttttagttattattttggttttttgctcttaaaaatcccagtcctactcatttgcaactgcaaatagtgaataaaaattatttttgctcaatttttggctgaaaattatgtcactatttgtcactaattcgtactttttgccactattatgtcactattttggcatttttactcactattttagttaactattttgggatttttcgtcactaaaagtcgcgaccctactcattagtctaaatttagcggttatgtttaattttgtaataaggttaattttctttttattttctgaccaatttttgataaatttttatttaaaatttatttttggccaatataattgaaaactttggcccaattcaaatatttccaatttcattttttgctcactttttctatacataaaatgattgctaaatttattattttggcatttaagccgatcgtcttgacctgttgagccgtctgaaccaaaaagcggttgaagggcagccgagaattgaagcggtcgaagccactgggcaacagttggacgaagcgacggcacagaccgatgcccatcagcgattacaggtgggtccccaaaagtgtgcccgcagaggcattttt

SEQ ID NO: 17434 - DNA, 1113 bp, Heterodera glycines
cttgagcgacgtttcatcaccaccgccagcgccatctaatttgatcaattttgatcaacaacgccatgagtgcaaagcgcttggccaacgactaatcactgcagggcgcgagttgaaagagttggaggagttggggtcgatgttgatccaaagcggaggcgttggggcgagcaagcggcgatcaaccgaaatggacgaatcggcagggggaggagcgggactgatcggaatgactcggcaactttttgaattgcaccggaaaaaggtgcgcagaaatttcacatattgttgggggagggataattatgaacaaaaatcaactagaaaattttgagttccatttctcgagaccctaacctgatattctaattctcgagagttgaaattatgaagcatattactggtattctcgagagcagtgaccagtgagagtgacccaagactgaaataacgacggcggccccgtgattttgtcttggatttggttaagtagaaaattatttcgggcactattaaatgaacgagcaattgatatttaattagaattttaaatttttgagtccaaaaaggtttttaaacgtgctacaacattcgagattagctattaaaaatcctgctaaaggaatcgcgaccaatgagattattgcaccaccagtcccgagattttgagtttttgtgccaattaaaaaaaactaaggaaaaaaatttattcgacatttatttagaataaattaggcttattagccaactaactaaatttaaggacgaactggaccgagcactgatggaaattgagagccgaattgagcgacggaatgacgaacgccaaaaatgggagacggaccgagacgcactgaacgcatggctggaacaggaacgggcacgtttggccagtgcatggagggcacttgcatgggaggtaaggacataaattttgtgggaaaactcgagactgaatccataaaaccgagactctgactctcgagttttacaagcccgcgattaaataattattctggacacttgaaattaccttgattaaactgttactttgaccagtaagcgacgcctaatttgccgtgagcaaagattaaacgatttaaacaaatgata

SEQ ID NO: 17435 - DNA, 3038 bp, Heterodera glycines
tcagaaagtctttggtttatcggttttggtctcagtctctggataagtctcggtctcgagactcttggaaaattttcggtctcaataaacagcatatgcttgatttttaaggacacctgtgttgaaaaggtgagcggtgtcgctaattaaaaaccaccaaatctatttgctttgaaaatttcaaaaaaatctcgatgtcttacaaaaaattaaggccaaaaaaaaacaaatcctgggttttcaaatatttttgccataatttggagcaagattatgaataattttttattaaaaattttaattttggtgtttttgaataaaaatgctgtcatcaccattgaatgtactgtttcaaaacgccaaaactaatgctcctttcaaaacagatataaattttggacccacgatcgaaataatatttgtaatattgtcaattattaatattattaattgtattattttgcacttcattaacccaccttttgttgtaaacaggcaaataattaaggtcaattagtggaaaatattcttttaatttcgctgtgtccatgaagccaagtttggcagaacagagtttataaaactgtaaattaatttaaaataatatttaaatattattttataatagtatttaaaaaaacaatttttattttaaatacctcgccaaatcccggctcaacgtttatgtaagtgttgtgatggtttgggttaccatcaagtaataaactggctgtatgaacagttcgtttgaacggtgaagcaaaaactttgtcaattttttcagttttgaaacttaatttacggggaaatttaaaatgaatcatttttaatacctagagaaatttaaaaaatgtttatgaaaaagtacagaaattgtacaaattttaatttagaaaaaaaaatcgctcacaaagatgcaaaagattatgaaattcactaaactaatctgttatataaaacccactctaaagttaaaaaaaaaattaaaatttatttttgtcacataaaatccgcaaaaaaaattagataaattaaattttttaccgttttccaagttctttcgcttgttcaatgcctcttttggacaaaggtgtgtcttgttggtccaattcatttaaattattgcccctaattagatatgttgtcaagccgttcagcatgacgaacaagccacaatgtttggcgaacaatcgggcgttggtctgggggttttttttatgaaaatttaataaaattgcaaaaaatttgttaatttaggaagaaagattaagatttgtgctcgcataagattgatgggaaaaatggggggtccgagatattcgaggcgatttggaggtgtaagttctcagggattatcaaaaattttccgaaaggattggtctaaaattttcggttttagagtccacaagtattaaagattagggtgaaatgaaaagtcggggtcactttgatggggaactgttgggagcccgaaataacgggaggcattggtataaataaaaaatttggaggtgtcacttttcagggatttgtccaaaactttccagatttccggggtccacaattaatattattttcttttttatttattttttattattttaatttgcctattgtccaatattgctgcacattatttgtgtcttcatctgtcattgtaatttgaatgttgcgcaactcatgttcaattaagtccaatgattgcaaaaaatcctcatatttgtacgatataccgtaatccttaaaaaaaatatataaattaattcaaaaaatttgaattttaaatgtttactaatttaaatttaattaattttacagtttcggtgcatttgtcgcagaattcctccttttccttcagctgatatcggatattcttcagcacagcatcataaattcccattttttcttcatatcgaaccaaatcgagcagttttttgcgtacttctaactctcgtaaaatctaaaaaaaatttgatttaaaaaattttaggctaatgaaaggggggagggagggagtttgatcagtattttattgttttgttggcaaaatcgtcataaaattccagattcgaaaatgctataatcaaccatcaaatacaaaaatttgtatagttgttgaaaatttttagcaggcattatcagctgtcaaacggtatcaaaaggattaaattttgttaattttgagcaaaagttatggtaattatttggtaaacaccctaattagtgattttttacgaaaccacttagcaacataaatttcgactacattttcaaaaagaaaaattcgacggcgcctagcggcaccatgcaaaagcaattaatggactttgctaatattgtgccaatgctccgcttcggtggagagaaatttggccagaaaataacgtgcaattatgacattttgtgcttggtgaatttgtgaaattgcactcattttcattttcggttgataggctttgtatgagctgatttttttatgctaaatttgaataagtgaaatcggaccaaaaattcttaaaattggatatatttaaattgacattaaaaatcgaggaaaatttttgaatttaatgcttttttatagcaaataataatattattaaaaagatatgtttaaaaaactatttttttttatttaaataaattaaaaattttgattttttataattttccatatttttcactaggaaatttcagaaaaaattcaaattggccaactattaaaaacaaacaaattttttacataaaaggcagcttgaacttggccgctctcttcaactgcaatttccttttctttgttcaatttctcattccattcatttatttttgcttggaattctttgaaaaattgtaaaaactttcctagagaaaaatttaaatttattttaatatatataatatttttttaattaccattaatgcactgtttttggtccaaaatccatgaaatcagattttgttcatcaattttgatgttttcacgataataagcatcatggcattgaacaaattttgccgcatccagaactccgaaactc

SEQ ID NO: 17436 - DNA, 1900 bp, Heterodera glycines
catacataaaattcgatgaaaacattttgctcattttgttgtaccatcatctgtgaactgagaatcccattcttgtcgatgcgaaatgaaagtttgttgcacaagcgaatgctgtctttgagccgtttaaataggctcattcgataccggtgttgaacgcgatcagtggtcacattcaaaagctccaattggtcacaatttgtgggtaattccacctaaaaatattatcaataaagaaaatgggtctgatgaaatttgatgattaaatgcttcatgcctatttttgtgataatgcatttcaaaactcgaagagagtgccttcattcgtcccattccgccggccacataaaattgcagataaccgggagtgaaagtgagcaccaccgtttcggcggagtcgtccaagtcgcgcataatctcccgaattggtagagagttcagaattgccttggccgtcacattttcattgtcgaaatcgaattcgagaatctgaagcggcagaatactcatactaaatggaaaatattttttacacctcgggcgctatcaaagttcgaatttcggtgtggacaacaactccttaaaagacaaaatggaagaggatgattgctaattgtaagcacctgccttcgtcttccaaaatgacgagcaatggaaagccttcgccattccacgaaatttgcaccattgtcatcgtaccggaaaacatattcagtgcttcctattaatgttcaaaatttggccaagaatccaaaagtgtacattttttgataaatttaccataagaggcctcatcggtattttaatgctgcatgtttgggtacgaaagttgaagtcttggaagtgctcggatctgaagtaggcactgccttgctgattgtgttggtcgtccactgccaagcgaatgccctcattgcttacatttaatgtgcaatgctaaaacggaatgttttctgccatggttttgccattgcttctcacgtctcggaatgccattgctttgaccacttggcttatttctttaacgtcatgcttagaaatgcaaaacaatgcttcttcactttcctcagacatttgttgttgggagtaaaatttttcctgctgttgttcttgtcgatgagcccggtccatttgcctctcatttgacctagtcccaataatttcaacttcctcgtcatggacatccattaatacaggtaaaaacataaataagcgaagtacttttttaaatttaattaaaatttgtaaaatgacttttgtcaaagtgatctttggcgaataatttttatttaaattttttaaattacctaatttttttattcattaaaattatttatttttttaaacaattaattattagattaacgcatataattgcctatttatgatgtgcctaatcagctgaattcgttttcccttcctttgcttttacctttttccattagttcatatacaaaaacacaaaactaaatttatcagcattaactaaaataattttcttattatgaatctcggacggtgtagcatttgcactttaagctttgacttaaacgatgtttcagctctcaaatgtggtcatacgtatcattaccaatgcatcgacaaatggattgcggtgatttggctttttataacttccaattagtcaacatttagaattccaaaacttgtccaaattgccggacatcgaatctcaagcgcgacatattgaagcttttctttgatgagggcgaaaagtcttttagtcaattggtgcaagaaccggccaatgctcgtttttttctaatttcatccatttatattattggttttttaatgtgattgtttttaggcagaacttcttgctcaactgaaagagacgcaagacgtgaaatgctttttggagaaaaccattaaagag

SEQ ID NO: 17437 - DNA, 1206 bp, Heterodera glycines
cgggaaatttgtcgggagatcgagcccctgcaacaggccacagccgggaaggggcacgaggcggacggtgcaacaaggagacaaagtggggccgaattttgaccaaatttactcggccgacaaaagagacccgtgccgctcatttacactaaaatgccagctaattaattgagtcgcctccataaagcatgaataattatagcaaatggcgaagacgacctcaaaatatttgatgccgttcactgaaccattgtttttgccgtccggagtgtccagaatgagcccaacccattctcccggctgaaattgagttcttccgacaaaagcaacacgacctgtaaagtagtgtccgcgtgtttccaaggtcaaaattaaaaaccaattcgctcgccgactttcaccgtttcgccaaccgcaaaagtttcggaactttgcgcttctgagcaagtggagaacaccgaatctttacctaaacttatttgtatgaggatcctttaaatctaaacaccgcatgattggccaatgtgggcccaaaagtcccacttcggaaaattactgatatttaaaattgttacttactcggcgttttcttcattaactacagcaaaatcaatcagtctccttctttaacacaataaatctgggcaaaaaattttgttttttcataaacagaaactctatggtataaaagaataaactcataaaagaaacagcaaatattttgagagcaacaaatttttatcatctaaaccaatttgtgcaaaagagaatgtccatttaataacatctctattgaataacttcttccaaataaaatcacgttgaatttcctaaattgtaaaatcatgcgatcagtgaagcgttgcaccctctcgaggacgactctgaacaattttttttactaatcaaaaaatgatcatgatatatgatgattcgtttgaaaaagcaaacctggaagtccttgaaacgctcgcgccaattggtgtcattaacaccaatgccccatgggtcatctgccaatggaagaaatatttatagcctttgtagtatttttttaattgtaatgagaacttacaatactcgttgagatagcgaaggtcctgatacttatgtgggaaatactggacgagttggtcacgccaactgaaaatgaaaagagcggaactaaattttttaaagattatgaaactcacagctgctcgactg

SEQ ID NO: 17438 - DNA, 1566 bp, Heterodera glycines
tcatcaataactcccattcaaagttacagaaccaaactaaaaaaactgtggagaccaagatcatatccaaatgtgtaagcggcttttgtccttcttttggattctttatttgaataaatttgatttgacttataaaaaaacttaaaaatacgtaactaatttcttttaaagaattctctaaataaattctcaaaaattttgaaatctacatatgtcgaaaacttattagtttttcaaaatttaacgaagaaatttaattttttccaatattacactgaatttatgcgtaattttcttaagcacaataaaatcacaatcaatttttttttaaaaacgccttactttaacttatttaaatctgagaaatgccgtcgcgaaatttgtcagcaaagaaaaaacaacagaattcgttagttcgggatgagtcgacctcttcacccagcagaacgcccaaatcggtgtcgaaagcgagtaacagcaacagtagccaacagaaacttcagaagaagcataattcatcagaactgtccacgattagcagtgaaagtgtcgagtacgacttcttttgttttttgagaaaatacagctaatgtttagaaaggatctcagctcttcaatgtctaccaatccgcacggacatccgacggacaaaaaatggaccattggggagaaagtgttatgccgttatctgaactcggagcacatttattatgaggctaaagtgatgtttctgaaagacttgtctggcggagatgtcggctatggcattcattatccggtcattttaatttaatccattttatcgcattgaagattttagggttggagcaaccgtcacgacgaagttgtaccacaacatgaagcactaattcgcttcaagaattactccgatgaagaggcaaccaaggcaaaggttatttttcgagtattttacgatgagtgttaagaaaaacaaattttaggaagacgtgaaaagggctcagcagatgctaaatgccaaaaaaagaaagcaatcggaactgaagaaccgctcgcaagcgcatgatgaaagtagtcgctccagcacaccaggaagcgccgacaacgcatgtaagtcatttatttgtcagtgcaattaccggtgcgttgtacgtttaaaagggactctaacaaattggatatgaccattgcgtttaaattaagttaggattaagttgtcatttaatatgcacaagtaggaatttagcaaaacgtaagatcgcccgtcggacgacaattgaaacaagcgcagtggccaaaaaggacatgccccaagtcacattgaccgaccctttgcgacgcattctgatagacgacgaaaacctggtcaacaaacagttcatgttgccgaaattgcctgcacggatcaccgtcttcgaaatagttcaaaaggtctttctaataatgttttcgaataacttttgctgttcagtaccgtgagtcggtggtcggtgtgggcgaaagcggaaatggcggactgtcgccgcgtgagttttacattgagtacgcggatcgcgacaacgtgctgctgaaccctacttcagagaa

SEQ ID NO: 17439 - DNA, 1896 bp, Heterodera glycines
tgcgatttatctgtccagaaaccatttttccaaattcttagaagaaaaaaaagaaacctcgggaaattcgttgcaaatgccttccacacggaacacccatttcgcctcatttgtcgggtccgaaggatgtggaaaacgtttccacattggttttttctgtaaacaaaaaagcagttagtctaattaaaaattacaaaattgaaaaaaacatatttgatgcctcattttctccaaccaaattttggtgcgcttcatttcgattaagtttctcgtccaaaatttgtgtcaatacattaaaaacaaaagttattaatataaaaaagataatactcaaaatcagagcccatgttttaaaaaaaaaccggttatcggattcgtgaaatccaatgaccatcctcaggttcttaagtcatgtctcttttttggctctattgcagttcacacgaccacaaaataaattggcaactttaatacaacataatttttgctaggagcacccaaattaaatattcttggtatcattcgatagcattaagagtcctctattaatatgtgaaattgcaaaaaatttcgttttgttgcaaaaaagttatgatcaaaaatgtttagaaaaccaattttttgaagtcttcggccattactttcttgaaacacaacgaagttcttttaaattattacagaccaatatagaacttttagggctatcgaatgataccaagaaagtttaatttgggtgtttttagaaaaagttatgatgaattaaagtaaactgaactataggtcgcccttgggctctgaacaaaatccatgtaattttcggggactttaaacagcaaaagtggccaaaaataccaaaaagtgtgaagatgaaataattttggttctccgacatcccaaaagccccggcgaattccatcaacattcggcgacagccaaaaaataaataaacctgggactcggcgcaatttgtctgtgatggatgatgctggtgatgatgctttccgttttggtgcttttgatgcggccggtgggccggcggatttgtggaagtcgaaggcattgcagaatgcttgaaaaaggggagaacttttgaatgggccgaatttcgaacaaaaaaggataattttttttttcatttttgttcgagttcgggtttttttctgttaggcagcctgcgtcccctttggcatgtcatggtctcaacaaaactaacttttatggcgttttggccactagccacgatcaggcataaaaaaagtaataaaactaaggatttgtctcatggatataggccgaaatcgcattataggattcaaatttatttatgtgaatgtatcattttgatgctcagctaaccgaaaaccacaaggaaaaaatggggcttaagcattttcacttatagcacttatttatagcagttaaaaaaaatcgtgaaaaaaaaaattgttttgtgcttgtgtcatccagcttaaattaaaaattcttggtatcattcgatagccctaaaattcctctgttagcctgcaaaatttcagaaaatttcgtgaggtttcaaaaaagttaggtatgtctagaaaagtgcaaaaaattgattttctgtgtatttttgaccatgtgtttttgaaatcatttgtgagtttttctttaagccttcatagattaataaatttctttggggtgttttgaggcgctgagtacgaatccggcatcctttttggcgaattccagaccccgaacccgaacgtttttcgaaaattaatttttaattttttttttaaatttgaaagtgattgcctcgaatgataccaagaatatttaatttggatgcttttacaaaaagtaaaaatagcgagataccagtccgaaattccgcatttttttttttggaaattatgg

SEQ ID NO: 17440 - DNA, 1332 bp, Heterodera glycines
tttgtgtctttatccagaaaaaataaggtaaaaataagttttgagaacccaaaaaaaatttgaaacacagaaaacagactccgttaaagtatcggtaaaaaaattattccctcaaacaaaaacctgtaaaatctcggtttcggatttgaataactctaatttggctgcttttggaaaaattacgactcagaaaaacagtaacaaatcgtcccgtatcctaacacactgtcactttactttcgtccctaacctgaaacgggcaaccccgatcatttggtccgtttatatttaaattgcgttcatcagttgtcgaaattttggtaagcatttaattaaatcgaatccttaaagtgattaagaatgttagggttaatgtgtgtgtcatttgtctgggaaaccttttttaatcgggatttgttggaccgggattctgattggcaaaaatttggcatatattttgaagaattagaaccgggttacaatttctgttccaactcatcaatttttaattttatggatgaattgagattgggtgaaaatttggtgggtttagttgatcaattgggctggatgattggtgatttggtgagccttggcatttttgtcaaaaaccccaaaaaaaatttgtgccaaaaaatcaaaacgctgtgaaaatgccgaaaacacaaaaatatgttttgttgcttgtttttaaattaaagaacatcttgaaccgccgctggctgctgattggggaagaatggagttcactccaacctaacgcccccattttttttcatgcaaactcgacgaataaattcgatttttcaatttctctgccgccaaacaatgggcgaagcagcatagagaagaagcatttagcaaaacagtgtgtggcagactaatggaaagcgacagacaaaagagcgaaaacggggcgaggaagaaggtgaggatgacagagagagggaagaagcgcagttaatgtggaaaaggaacagagcatgtaggcagagaaaataagaaagaaaaatataataagagaatgataaataagaaaagcagagagtgtttattgtgaaaagaatgagtgtttaacgaacgagaaacgagacaaaaaagaaaagagatgaaagaaaggcaatgatgaaaatgaatgtgttaaagataaagaacatttaagaaaatgtagaggtagagaaaaaagcaaaatacctatgtggagagagagagaaatggaaaagagagagagtgagagagagagagagggagacaaaaagaaagaaagagagaaatgtaatgagagagaagagaaaatagagagagagagagagagaaatggagaaagaaaat

SEQ ID NO: 17441 - DNA, 988 bp, Heterodera glycines
  unsure (1)..(988): unsure at all n locations
ttcccctcggcactgccggacccccccccccccaccccccccgtctattcctcaaaaattttttttttgaaaaaagcgcgccgcaaaaaagcggtttgaaaaaccggcacgtttttctttttgttcagctcttgcgtcaacatcagcaacagttgctgcagcaacaattgcagcagcagcaacaacaacagcagcaacaaattgccaattcaaatgccgcaagcaatgccaacaccaacggcacgtcaatgtctggcacgccgaccacaaactcaaccccgaaccatgttgtacaaaacgggggaaatggcggggctgggtgccatcaacggaacaacttcaaacactggcggaaatgggggaagcaacaataacattaacggcaatggcacagcaagtaataatgcacaaggttggcacgaagatgccaaaagagggggaaaagcatggcattccatccctaagaaatttgttttttccatgttttttaggttaagggtttcagagcagaataattgcaatactgtatcctggctactggtaatggtgttgactgcaattctccccccccccagcccaaaaatcccagggacacatttatgttaattcttttaattaattagtaataaaatttgaaatttattttattaggattcacttctataggagggtactggtatttgcgaattttttgtagatgagcgttttcgtggctccgccaacagtacgccgcagtccaacgggggcacaaatgggaggccgtggcagggtcaacgagcatcagttgccaaattcggcatccccgaaatcatcaactggcgtggcggtggaccccgcaccacggaaacagtccccggcttccatcgtgaatcctatgaatgtaaaagaaaaaattattccttanattaattttttaattacccattcctanattttcaattatttttttaagtanactgatattagtacatcattatctttttatgac

SEQ ID NO: 17442 - DNA, 2322 bp, Heterodera glycines
tcacaaccgtaaacggtggggagtgcaatggcaatgtcaacggggccgaaacggtgccaacattgttgactgccactgaaatgcactacacggagacattcagccggaacaacagcaacagcagcattgccgagctgaaccaacaacagcaacaacaacagcagcagcaacggttgcaattacagcagcaacaacaacagcagcaacgtgcgagaagtgcagcgcaacagcaacaacaactgcagctgcagcagcaggcaacagagtttgaagttggcattggactgaaccagcggcgcaagagcggcgtgtacatgctaggaagtgagttgtgctgctgtttcttatattgatataatattttggaccactgatcgtacccccccccaagacccctccatacctgaattttgaatggaaaaatcgtttttttgttgaaatttccgaatttcttattggcaccttctcgaaagttctcattcacccaaatttccataaaaattgataaattattttctaaaaaacttaattagctttaaaaaaacgccgcaaaaaatggcgtacattcaccttcaatatgctaatttgtcaataagcaaatcaatcacaaatcactaagatgatcatattgattattttttattgctttttaaatcgctattgatctgtagtgatcattgtttttcctctttgttcagacatgaacggcaaggagcatcaggacatcaaacccacactgaacggcggtgttttagttggtggtgctggttcagctgctggtggtagtggtggtggcggtggtgctgctattgcgggtactgcttgccctcttcccgttgctgctgctgcaccaaatgcggcggcactctccgcctcaaacaatgctaccgcgaccgttgccgcaaccagcacaccgatgtcgaccagtgtgatgatgaacttcatgaacaacatgttgacaacggccaagtccacattgcagggccaaggcgtatctgtgttctacgaccaaaacggacttccggtagaagaaaaaaatatatgttttttataaatcgaccaattgattagaaaattaataataagttacttaaaaggaggtttatattcttggtattacggtagctctaagtgttctcaaaacgtaagaatttttaaaagtcagaaaattttaagtttgtattattaggtactgcaaaatgttctccagttgcttaatttaaaaaactgtaaacattctttgatccagaaaatattttacattaattcttctaattataacttttttttaattgacggatttataaaacaaagacaatagcatctctttgttttatgggcaaagtcctggcctcgtcctttttttcaactttccaagtccaaccttgtttggcactcgacatatggacaacatcgaagcccatcaattaaaaaatcactcagaattttttttaaattgattaattataatttgtaattcaattggttcagattgattattcttcacgcccaatcgatccgattttccgtaaggcgcgcagtgaggttacatcggtcagcagcattaacagcagtcatttgcccagtggcacactcacattggcacaaagtgtgttgttacaatatttaaaaagaaccttattttggcataagtttttatgcttcggcacaatatttttcataatgagcggccagaatactctcggtgtctgactctctttttaatgcattagcctttatccccttagccaaaacttaagcttttgaaatgtcttatactagtaagatttctaactaagctgtatatttaacatccgccttaaatgtcttgcccaattaacttttgtcacatagcgtttaaattggtgaaaatggagaggctttattatgcttttaagccataaaaatttaagttttaaattcataatctcagaattggcattcaaatttataaagtataatttctttttttttatccttgaattagcaagtatctgtacaaatgtattatccttagctctttttcggtttttagaatttagttttaggcatggcatattcctatactccctatcaaaagttcatctttctaatttaaaaattttattttatttcccccgaaacatttttaaaaattatttttaatttcctttttctttagccaatagttcgtccgcagacggcacacatccaccgttggtgtccaccagtgccagcggagacttaggcttcctcagtcgcacctgtctcatcggcatttcaaatgctagcgccggcggtgggggtggtgcagatgcccgtcgcggatcaatcagcggcaac

SEQ ID NO: 17443 - DNA, 1705 bp, Heterodera glycines
aaaaaatcagatttttaacaattttttgcggcgcatttttccaaaaaacttttgggaagtgcgaggggagggggtacggcggtgccgataggcgccgccggaaaaattttttgtaatctaattctgatttgttcacagattttcaccaaaaaaggccaattttttgcgattttgaggacattctgccataaaatttcaaaattttgaatatatttaagaaataagaacaaaataagaacaatagcccgaaataaggacaaatcttataaataaggacagatccgagccctgttttaaaccaaaaaacaactctctcatttttatgtatgtccatgaaaattatagcgatagagaacaaccgatggttttgtcattacgattttgctttccctttttgcccattgggaattttcacccaaaaattcatctggcaaaattttcgaagtcatcgattaaggctaaaagaaaggtcagcggtgtatttttcaaagaggtgcccgccattatggcctttccagctaacaaattgcttgtgtggcaacagaatgacatagcccagacttcttgttcaagcaaaccaaagtcagtttggactcatcaaaattttaattgccgttcattttgatttctttttgcaatttagcactgatcactttctccaatttgcactcgaagtgtcgccaatcaatgggaataaaaccaaaagagttttctatctgaagaggtgcgtttgctctttctgttctcgctttgttcatttttcttcttttggccaggccttacgatgaccctttctccgggtttaaaagtcggctgaggcataagatcagtgagtttctcggagtgcaggacgaattggcagtgcaaccgatttattcgggggaccaatcgccggcggaagcgattgaagacgtacggacaaacgaatgacaattccaaaaactaaacatttcattttacccgttttctttttttaaggtcagtctgttcgatttgtttttcaatgccactgaaccgtgctcgttgtcagcacttcgaattggcacgacagattacgaaattgtgcgcgattcggcttggctggataagtgagtgagcagattattacatcaatttgggtggcagcacaacccggcatttatcggtttaacatctctcagacttttaaaaatctggttacccactaccttttgaactcgacgaatacgctcacaaatagagttagtttagatttttgatcccaatccgtgattaatggctaaaattaaaccaggtaaatatttaaaaaaataattagggcgggggtaggggtagcaaaactacaaatacctataaccgttcgttggatttgggcatgccgtgggaggggttagggttggcggattgcctcactcaaattaaagccaaattaagtgtcgaaatttccctccttccactggtcggctgtccagttttaccgagctgtaattggaagtacgcgacgaccaaagtgcaattccattggtttgttgcgagtgaccatctcccgctgagaataagccgaggcaagcggcgcttggggggggggggggggagtgccgcagaaaaagccgagacttcccattgaaaatgattttcatgatcagagatggtccgtagatacctagaaacacgtcatagtcgtctataaatattgacatttctaaataatgcaaaacaattttat

SEQ ID NO: 17444 - DNA, 725 bp, Heterodera glycines
acctcagaaatgtgagtttttgattcattttccaatacccatagagcattttgtctcgctatttaccaattctttctttcccaggcggtggccattctttgacggacagagtccgtttggagccagcggactggacgcacgtacacacggggccttactattccccgacgatggacgatgccggaaaatttttggctgtcgttgttgactttgacgacgatggaattttggtgggcaccgtttgtcaaaagccaatcgaaaaattgggcagtggcaagccgaagagtgaccaggggcaggaggaggaggaggaaacgctctttgagagacgacaaaaggagtgttgtgcgaagcaaacattggggcaaaggcggccaaaccgcacggaaaaggcacccgtgggcggaatccattccagaaatgaaaaaacccaatacaaataggatatttttgtctttggcaatgatttgatatttttttcactaaatagcgcatggaatgcaaaaactagtcgttaaattatttaggaggtatacagtaaatgcctcaattagagccaaaacctaagcgtatgctcctttcttaaattttagtattcggaacatttttaaactcgttgtcagtgccttaaatagaaacgtatcaaaaccgaaatgaacgacggggcggggaaagcacccaaagtcattaattaattaatgaatatttcactatcacaatcgggc

SEQ ID NO: 17445 - DNA, 2575 bp, Heterodera glycines
caattaattattatgggagcgaaaaaagtggtaaataaaataaataaataatgacacgggtgtaaacacatttaaatcggcagcggttcaaattttccggcaaaagtaaatacaatggaacaaaaaatgtaaattatttaaaccagtttaaacaaataaaatcatcggcgtctgtaaagtaaatgaattaaaccaatggtacgaatgtttaaaatcagtggcggttcaaagtaaaatctttaaaccagtagcggctcaatacttttccggcaaataacaagttaaaccattagtgtgagtaccttcaaaccagtgacggctcaatccttttcctgcaaaagcgtaatgttttccggaaagtaaatacatttaaacaggtaatggattcaacccgttttccggcaaagtaaatacatttacaccggttatgttgtcatccttttccggcaacagtaagtacagttcaacttacaaattagtgtaaatacatttaaccagcggacgttcggaataatttaaatttaaacttacgtcaatctttggcgttttatttcatttgccgctttttgattttttgattttaaaaaaacaaagatttaaaaaatgaaatcttttttactaaaatgcattaaaattcatttaggcatctatcaattcttctccaggagtctatttctttttttgatggctgaagacgacaaagttgaagcgctcttcagacgggcagaaaagtgtgtgttgtgttttacgaaaacaatggggacgaattcctccgacgagggcttttttaaatttttttgggccctaattagcaaaagtgccactaacccttccttaaatttaatggttttttaaaagcaccgaaatttttctaaacctaaattaatatccaaataaaacaaagtttaggaccctccatctaattagcctggatattgttgtgccatgcttaaattcttcgatttctacattaactaacccccccccattttttaaatatatttttaccatttctaaccaaacattgaaacccaaatgtattttagttctaccaaagagcaacggctggaggccattcgacagcgcaatttcatcgacgccaaatttgggtaccagccgtacactgagtcgacggcacgggatgcgtggctgatcaacgtccaacaggcactattactgattggaaaatgaaattttcaacaaatttaaatgccatggcatttttggaaaatccggtttaaacgcgacaaaaatttgccgattttacatcacatgacagaggcgacgaagaatttcacaatttttgaccatttttgtttgaatgcgggttccgtaatagtcaaaatgaatgtccctttttcaaattattagcaaaaaaaaaccctaacaaaaatttcatgacaaaaaaattccatttaaaaataaatttctttaaaaaaaatttttttttccgtctaggccgagctgttcgatgagcagacaaagtccattctggcggcggttgagctgtactttttggaggaggacgggagccggtttaaggtgcttttcaaatatcatatttacaaattgagtgtggttttttaaagaaattttatgctgccaaaaattcaaaatttttaaattgggcgactaaagggcgccagctcggtttttgcagtagaacttctttcattgttgaccgaactgaatgaatttgatttcattggatagccctaagtgttctctatttgcttgcaaaatttcgaaaaatttttgttaactttcataaatgttaaaataaaaaaattacgaaaaagtctgtttttttatgttttttggccctatcttgaaagttaacgaatttttttgaaattttgcaggcaaatagagaacattaggactattgaataatattaaatgcattcaattcggtcaactatgaaaggagttataccccaaaaaccgagctggcgcccatttggtcgacgcccattcgtgcccttattacccacttggaagctgaatattattactgttaacacttacgtaccttgttcaacatttccggttctgcacgcgttcaacaaacggtagtttaattgttgcataatgaaaatatttaatctataaaaaattattttattaattattagtcttattaattaattattagtcgccaaatgaaaaataattcgtgcttaagagctgccaataagatataaatgggacatttgaagaacaaaaattacatattttctgaattatgcgtggagtaagaaacaaatattaggaaagatggtacttttccgttttgtgcctacactttaaaacttaaaaaaggaaacaaaaggacggcaaaaaatgaaaattgtgccacgttcccatatgcatcaattagcgcagcaataagtaccgccttacattttttttaattttaaaccacaaatattcctcaatttatttccttatcccaaaatccaaaatgaaatggaagcagcagcattcaaactttggcgtcgcttatgtcatttatgcctccaaaatagtgagaggtgcattttcgaacgcctttgttgcctttttaaattttgag

SEQ ID NO: 17446 - DNA, 3527 bp, Heterodera glycines
  unsure (1)..(3527): unsure at all n locations
aaataatatanttagctaaaaattgaaattattatttttttaaaagcgccattttttggtcgaaaactacttgaaaattttgcatgaatttgtgccaatgaaatttaaatgaatggaaaaaaccattaataaatcagaattaattattaattaatctgctcgggtttttcgtttcatgcttagtcaagtgctcaattattaacatataaatattaccgaagaaaatggcgaagtgctaattttaattttcaaaacatttcacaaaaactctatcgacatttttttaaatttctccagccattttcgacaaataatttcaatttatcaatttatttaataaattctttaattactttttttgaataattgaaaacattgcaataaatatggaattaaagctgagaattcacacataaattatcagacgagagataaaacagagaaagacagagaaatgttgcagaatgcgcgtatcaaataaatttaaattggaaaattaaaaattgttatgtccttataacgtcatccgaaccgtggctttactactgagtccatttgccgaaggatttcgtccaaatttagccgatggattttcacatgtctaaatggtaaaattggatgaatatttacatacaatttaaaattttaaattttggaatgccgtacctccgatgtttgtgcccgattttctggtgcactcttcgccattcgtgaagacttctccgatggtgccggtaaagtcggcttccttttctgagggaatagctaaaaagtcattttcatttcatttcatattccttttttggcacctttttctccgatgcggcgctgccaaagtgaattggtcaggtgctatgagagtcagcagaagcaaagttatgacggcgaatttgaagagcaatttcaaattgaagttgccaaatgttgggccaattttcatttttaaaatctatttaatttttaaagaaaattttgccaaggctttaatgaaatagacaataatttcatggaggaatactactgactatataattttattttgaaaattgttaaattggtttacaaatgttttaaaaatgcgcgactaattagaccaattaatttgcttttttctctcttcttccaaaaattgaacatgttttatttgaaaatcatgaccagtttattgttcatttttagcctccattttgccatatttgttcggcgttaaaccgcaataaatttcacttaaaagtgaatgccgcccaccataaaaagtgtcattgtaaattggaacaaggaagggaatgaatgaatgagtgagtgactaatgataatgaatgaacgatcgaacgttttgngaaagtgtgggggtccttttttgggttttgcttctgcttgcttgcatggtgatgacaaatgataatggtcgacgaacaaatgaaagagcgaacgcaaaatgggcggacgcgcgaactttgcgcagccgtcgcccncggcggcgcttcggcttttctgctgatcagcgcgggcattcgctgatcagcagcagagaagcactcactcgccacaatgaaaaagcggcagagagctaagctaattgtgatcgcgctcctaataagtttcttctgctgcccgcctctgtcgatgtagagccgaagcgagtgaaaacagcgagacacattctcaaatcggaattatgtcaatagtttttacaaggggggggttttggggggggggggggggggagtgtcaattaaactcaattctatccgagaagaggaagagaggttttatatgatcgggttggttgggttggaggttgagaattggtgattggatgggataagatgggatatcagtgaccagtcatttggttttcattgatctgatcgggagccagacaatctgatttgatgcgggattagctttaatttactgattggattggtatatgagggaaggttcagcagatttagattggttgataataaattaaaaagagaagggacccacgagggacacgaagagaaccggcgattgtttttgttttcattccgtccacaaaagtgtcacaagttgcaggaagtgtgactgatcaaaaagcaaccggcacgttggttgtggacgaagggtgtgattagggggaaatgcttttttattgcttaagcaattattttattatttttgttattccgtttgtgtgcggtgagaagctattattgtacggatcacagatttgatggaattgcgtgccaaacggaggggggggggggagagcaaatcaagttttatctgccaatgggtgggctgaaagtgtgctgcagccagcaacagcagcacagaaaccaatccgatccgcctcctcttccgccgatggaagcgatcatccagaaaattttacgcctcggggacaatcaaggacggacgacggggagggggaggggctgatcagtttctttctcatcattagcaaatggggcggtgggaaagaagcacttaaaagcggaaaaggggcgcaatcggtgataaaatcgagaatgtgatgccagcagaagcaaaggctaagaggcaacagaaagacaaaacaaaaagcataaacaaaggaaatgctaaagtgttgcacaatttgcggaaaattaaattaatttaattaaagaaaaaaaagttattaatacttttttgaacaaatgaaaaacgtgttttgttttataattttccattttagaatgaagaaaataaagaaagtgattcatttgtgaagtgaacgtgatcggaagttggagaagggcgacggatcagtgtgattgataggtgaatttatcagtcggatttacagtaagcaattggggaacccgagcaaaaaatttgaaataaatttgcaaattttagggattgctattactcaattggcttaaatagtacaatgcatgaaaggaatttgacatttcccaatttttaacatttgtaaaatttcaaaatccaaatggagacaaacgttcagctgattaatgtccaattgaaatgtcaacagcgggcggaacattaaaaggaacgaaatgaatcacagaagaatgaatgaaataaaattataacattttattgaccaaccgaaaaagaaaaagcagttaataatcggacaaaaaaaattacttcccttacggtgccctgaattgatcacgtgtgatctgatcagtcgccggggggggggggggagaaacatgtaaaaattgaacttctattatgatcaattgaaatttcctatcagcttcgggtttgctttaaacacgctggcctatgaaaaaatggagttttatggatgtcaaattttgggacttttcttcgacgtggccatcaccgggttgtttcgtgacaaaaacaaaccagtttgatgctattcgaatgagctagacgcgctctacattttcaaatgtatcaacaaagggtctaccgccactccctggcgagacatggcctgtcaaagcagaacggagccaataaatttgaattcttgttaatcttcggcagttgcctttatattcgagcct

SEQ ID NO: 17447 - DNA, 777 bp, Heterodera glycines
  unsure (1)..(777): unsure at all n locations
tactttaatcacttaaaataccagcattgtactttgaccggtgaaattaattttttagaagtgtaaaaatcagatattatgctttaaaccccaaaaacaaactttttatttgttttgaagcctccattccttattttcagaaaatttttaacgaaatttttttaatttttggccgaaattgtccgcaaatgtccgtaaggcagtgtaatacatatgatggttattggctgactgcaaatttttaaattctttaaaagtttaaacaatttttgtgtattataattaatgaaaagtttttcggattttgtacgattttagaaaattttttgcttatatagaaaaaacttgaaattaattgatcagtatattttgagttcattaaatttaaattatttcataagaaagcaatattttacagtgttagattccccaaatatcactaaggagatcaatttttgataagtagttctattctcatttttattcccaacaaaacttttgattttgagcaagttaatttttatgactcggtttagcccattcaaaagtgttgaaattttgcagaaaaaaagaatacaaagtctctgtataataaatatttttataagtagcagttttgattaaaactgtttttgaattaattaattaggtttgattgccttctttgataatcactgngaaggtcaaagccattttttcnaatggacaaaatgcataaatttgcaaaatgaaacaatcatacgcactgcttttagcagcgaanagacacaaatttcc

SEQ ID NO: 17448 - DNA, 1528 bp, Heterodera glycines
  unsure (1)..(1528): unsure at all n locations
tcaaaactagttaaaaaaccagtttaaaggacttgccatatgaatttttaagattttcctttcattttaagttgggttgggcccccgaaatgtcggggttttatgaaagccgtcaattgcacctgaaattagagatcggaccggtcgattatttttttaattactcgccgtttgatatgagcaacaagttgatggtcctcttgacccaaattcttcatccaatgctcaacgttttttattcacctgctgcgccaagcgttggcgccttagctgggcgcctggcgtgcccttcagcggccgcagctcctccggcaaacagcaaatagcggcgcgccaaacgccaatcaccggtcggcgctcacacgtcacgctcggcgtgccgatgctggtcgtcaacatgcagagatatcagagaaaaaaaaattaaaaattattttagcaaaaattttttaggtgaatcttgcgacgaagacgacgagttataggttgataatgaagaaacggaggatgagcctaattgcttttgttgtaatctatcgaacaatttctgaaaaagatttattttgaattttattaatatttttancaaaaataaaatgtattaattanttttgggtaaataatataccgtacttcttcgattatagcccccgggggctctattgttcaacccccctcaaaaggggggctttattcgagaggggggatataatcgagtggggtctattgttcaaccctttttttcaaaaatttgataaaaatgtcttctttttttttgaaaaattttacaaaaataccgaaatttttcagtgattttaatttaattcaaaacactgaaatttgttaaccgatatgcaaaagttggttaaaaagaggttttatgggttcaaatccacttgcctttaaaattttttaaaatagtttttcgtttcgagtcatggttcgaaattgggtgaaatgatgtcaaatttttgatcaacgatctaaaaagcctaaaaataattttaaaaattttttacaggcaagtggatttgaacctcggaccataaactcatttttaaccaaccgtgaaactcagtaccgttcatttaggtaatcaggcaaaggtgtagaattgaggtcccgacggaaaaaaatagtaaaatttcaaaaaacattttttctatggtaaaaaaatgtgttgatcacgaatctgaactttgattttgaaaaatcattgattttatctatgacttttcaccaatcacttggttttttcaaaattttaattttctttaagtattttttccaatgagtttagggttaaaaaatatgctgatcattaatctgaagtcagattttgcaaaatccatcattttgtctatgatttttcaccaatcagcataaaaaaataaacctcagccaagcgggctcgaacccacacccatctcatataatccttaaagggatgaataattaaatttaaaaaatcgtaaaaaaattaaaaaattatttctctttacattcaatagcgcattcgaaagctcta

SEQ ID NO: 17449 - DNA, 1012 bp, Heterodera glycines
ttgcccactgcattgcgactagctggtaatttttatttctccggcctaatccagaaaaaatcactatctctttttttggaatattttacgtgtcaaagggtgtgcatttaagcgactcgctgtgcttgcccactgcatttcaaatagctggtaatttttatttctccggcctaatccagaaaaaatcactatctctttttttggaatattttacgtgtcaaagggtgtgcatttaagcgactcgctgtgcttgcccactgcatttcaaatagctggtaatttttatttctccggcctaatccagaaaaaatcactatctctttttttggaatattttacgtgtcaaagggtgtgcatttaagcgactcgctgtgcttgcccactgcatttcaaatagctggtaatttttatttctccggcctaatccagaaaaaatcactatctctttttttggaatattttacgtgtcaaagggtgtgcatttaagcgactcgctgtgcttgcccactgcatttcaaatagctggtaatttttatttctccggcctaatccagaaaaaatcactatctctttttttggaatattttacgtgtcaaagggtgtgcatttaagcgactcgctgtgcttgcccactgcatttcaaatagctggtaatttttatttctccggcctaatccagaaaaaatcactatctctttttttggaatattttacgtgtcaaagggtgtgcatttaagcgactcgctgtgcttgcccactgcatttcaaatagctggtaatttttatttctccggcctaatccagaaaaaatcactatctctttttttggaatattttacgtgtcaaagggtgtgcatttaagcgactcgctgtgcttgcccactgcatttcaaatagctggtaatttttatttctccggcctaatccagaaaaaatcactatctctttttttggaatatttacgtgtcaaagggtgtgcatttaagcgactcgctgtgcttgccactgcatt

SEQ ID NO: 17450 - DNA, 3373 bp, Heterodera glycines
tctctctccttgtctctctccttgtctctctctctctctttctctccttgtctctctccttgtctctctccttgtctctctccgtgtctctctccttgtctctctccttgtctctctccttgtctctctccttgtctctctccttgtctctctccttgtctctctccttgtctctctccttgtctctctctctctctctctctctccttgtctctctccttgtctctctccttgtctctctccttgtctctctccttgtctctctccttgtctctctctctctccttgtctctctctctccttgtctctctccttgtctctctccttgtctctctccttgtctctctccttgtctctctccttgtctctctccttgtctctctctctctctctccttgtctctctccttgtctctctccttgtctctctccttgtctctctccgtgtctctctccttgtctctctccttgtctctctccttgtctctctccttgtctctctccttgtctctctccttgtctctctccttgtctctctccttgtctctctccttgtctctctccttgtctctctatttttctctctatctctctttttctctttctcttttctccctcgccgagatttttccaaaaatttttgggaggcttggaagagtaagtcggtgtcattggtccattctgaaaattgagttttaacgaaccccccgtaattatttttgcaaaattcagtgatgatgaggaagacggtgacgaatcggaagaggatgaggaggaaggaggtgacgaattggaagaggaggagcaggaaggaggtgacgaatcggaagaggatgaggaggaaggaggtgacaaatcggaagggtccgacatggacatcgatgaattgtccgagggaatggaaatgtaattttctcaatttgtaattatttggtcctgttttcttgaagatgaagacgtatattgtggaacaaccttttcatgtaacattgtcaacaaatttttattaaagaaaaaacaaaatcaacaaaattcccaaagggctgatcaatgagtgatcgatcacttctcattcaatgagtgatcacttctcattctcatcaattcattcatttttgctgaccaattgagcagcgaattgcgaaaggaaagctgaaaaggaaaaatattttctcaaaattagttaaaaggctgttcgagagtctcgcttttggaggtggtcaattccaacaggtgttggttctcgaaactctgccaaatttcgctcactctcgaacagtttgaacaattacgactcccacaatttcactgacccttttcggcgttatcatcgttttcccaaatggtaattagatttcgtggaagaacatattgcccttcaatcgccgccgaaatccatttgatccatttcttctcgtcgcgcgcaattggagaacggacaagcaaaaattgactgaaactcttttggggttttaacaactctgctgatttatcaaattttttgctttttgaagtgtcaaaactggatttaattttttgtttttgtaaatctcaaaatggccaattttatgtaaaattgctacacaaaactcccaagttttcaaatttatggcgatttgttgatttttctatgtcattttctcttacaaaatgaatggggggggggagagggcggggctcgacttccctcacccctcaattcgcccgcactttcgtcttggcatcgccggccccaaaaattgtttaaattttcaaattttgaaatgttgattttgaaattttcagttggctaccctggttttaatgttctaaatcttagtcgttccgccgttaaatgatttgtcaaagcgaagtccgccattgagcgattgcggtaagaaatgagaggccggcgtttgaaaaggacgatgaaattggcacgaggagaagtgccattcacaaatgcctaaacaaaggggccaatcaatcgatggttagcaaacggtacattttttgagcctaccgtacactcgcctaaatattcaaaaggtgccaatgtggtaacaacctttttgccgatctatcgtaccgcctaactctaccatatccccattactagaaaatgtttttgagtctttggatctaccgtacccatccccagaaatgttaaactacaaacagcacaaatttaaaaccaaaattgaccatcaccgttttgtattgttcaattctcgcaatccaactctcaatatcagagttatagacacggcatcgcaacactttgggcggcaaatcattctccggacgagaggagaacaaccatttggtcaaagcttcgcttccgttccacggcacattggcattggcattataattaccattatcattggcactttcaaaggctggcggcaattttggcaattcgcccatataaaaggccactgattggagtggcattttccgcgaacttttgtcatcgtcgacgctgagaatgtggcggagaatggacggggcatatttttccagacggcgaaaaccttctgtttggcaaaaaataatgccacaaatgttttgtcggatcattggccaaatgaaacgttcaatggattttaaattgcggccaatttttgttctaatgctcagatttattgcgcaagaggcgaaaaggcgtcgaaaacgttggagaaaagtgatcacatcattgtcaatgtaactaaaattgaggggagggaaaatttggttgaattttcgatttttatctttttatcccaactaaaatcattggcattttttaaattgagaaatgtttgggcttatttctaaatttataaaaaaccttaacctattaattatttgaaaatcgttaagctaaaaatcatttggttatcatttaacttttagtgagtttttgtttcattttttaatttttaaaagatgattgagggacatacattttagcaatcgcataattcatttggttataaaacattaaatatttattataattatttaactctttctgccctttcgaaataattttattttggtcctcggattttattagcatttctcatttctggtaaagaccggcggacaggatcgaaatctcgagggattgtaatattattctcattaatttatcctattttaccgtattgatattctggagaagtcaacgactttgtccggcaacggaatgcgcggaattggcacaatcggtgccacttttcgattgtgatttttaattcgcatttccttcgtgccattctcgccaattttgcttttaatgcgaaaaaatttcaatgcccaacgacgcgttttgaagtgttcgtccaccatgcggtcaaagcgcgggcagagcagtgcgatttcaaggccaagtgacgcggcggcag

SEQ ID NO: 17451 - DNA, 1279 bp, Heterodera glycines
atttcggcaccctcaaaagggcacggagaaatggaggggcggcaagccgctgccttctttttgtccacctttgctgtgcagcgtcagttcgtccaattcctgcgacgccattggcatgccatcttctgcgatggcaatgcgcggactcagcgccagccaatccatgcgctgcagcgggtcataacggcgcgcgtgccgctcgcgtcgctttcgcttcagaatgggtgctgctgcggtcagtgctagtgcagcggaagacgaagcagtgtcgccgcgcaagcgctgctgaaggtgcgagtcggcgccggggacagccgctgccgcatgcgcttcggccatcaacaggctgcgccgacggcgatagtaccagatgggttggcaccgaaagcggtgaatgaacgaaggagcttttggggcctgaaaagcctatggcataagagggagtgccgagttagaaagtgatacgaaaagcattaaaaaatgagaaaagactttgagcaggaccatttgaggaaaaaaaagacgaagagtaagaccaagttacagtattctcatttaaaaattagagaagggagaaagcacagtatcccatccgatcagaatggggatgagagttacggtaggcatttaaaatatttctgcaatttacgacctgcttaacagcatctgctgccggccgcagaagcttgtaccgaagctgttgctgctcaaccggttccgcctcgtggatcagttcgagcgcgtggtgccgtcgttggtgctgtgccgcttccgcgtcggcgctgttccgcctgctgttttcgcacttctgcggaccctttggccgccgcgccccaccgtgcggacatttgcctaattgggccgggccccgtggggagggtgaggaggaggacgaaatcttgcgggacaacgactcaagcaaaggcacaatcacaaaacgcgggcgcgcgaagcgcaacagttcggcaagcgcatgggacggacacgcgagcgtacgccacttgcgacgcggcggcggcgacgccaatgcgcttactgaggcgaacgggagaagcggacagctggccaagcggcggtccaaacgcgccgcctccgctgaaaggggacaaagtgaggaagcgggacagaagcggacaattgaattttattaagataattttatatttttaacaattagactactaaaatgacaaatttggaaactaattaaaaatcatttaaaaaaatttttggatttttattttaaattttgaaaataaaaatgaatattttaaatgaa

SEQ ID NO: 17452 - DNA, 943 bp, Heterodera glycines
ctgttggcaccatttcctgctgctccgatctgagcgatattttctcattctccgtttgctcccgcgcgtgcgcctggttggccaaatggaacgcgggttgcgccaacccgcggggctgatgcgaggggaacaacgctctgtggcagagcgtcaatttagaaaatatatttggacagattcaaatagaaatccttcctctccgatcactcagaaaagatcactccctcagtgatcggggtcctgctgactcattcaattttcgtgaaatttgctaattgccaaattgatcgttaatttacctaaaaatcgcattttatgccctcctcccccgcccattcgttcaattaatgaccctcccccccccccaactcactccctctcctgtttgatcacatattcgatcagctctttgccctcgcccatcgcaaatcgccgttccaacattcgctttcggcgcaaaatttgcaaaatgtcagtgcctttgaatttgcgcccaaagtaatggattctgatcagagagacaggcaaaacatagtgattaaaattgggaggaggagagaattgtcacttttggatgtattggatgccgacgagatcaatgcacattgtggtgacggcgaggccaacgcccaaataaatgagcatcagagcaatgtatctgacaatgagcagaaaagggggaaaataatagcggagaaacacgaaaaaacaaaaataaaataaaattgtaaatttaaataaaaataaataaaaaataaaattaattgtaaattaaacatttcaagagatgaaatgccgataaagtacgacgagcaaaatagaacaataaaaacagtggccatattttaaataatcatttgtcatgaaaaaaagaaacaaaattatatataaaagagttgcaataaactgtaagaaatttcacctaattatacaaaatacaatt

SEQ ID NO: 17453 - DNA, 1720 bp, Heterodera glycines
aaaaatgagatattaaaaataatttttaaaataatacttactgattttaagccaatttagataattttaaggcattttgtgcctgtttctccctttattaggaatttttttccaaaaaaaaccattaaaaaaaaatttatttacatattttgggttttttgtacatttttcttacatattttaacattttttatacatattttatttacatacatatttcgcgatttatcttacataaaaaaacaatccctaattattactttaactcgtcggggatcataccatagaattttacctaccgatgttttcggttgagaatttatccttaggttatttataggacccggatttatattggcaaaaaaaaaaacacacaccaaaaatatagattataatatagcgaaaaaacgaaaaatatagacaaaaagctgaaatgccaggtcccggtcgcgtatggacaataaatttatgaaaattgtcttgaatttttgaaaaactcgaacacccgtaaattttttgtcattttgtcagcaatgaagaataatttttgatacatgaattataggacattagagtttattatttgcaaaattagatatttttactcgaatttcggtcataaatttttgtttttcacaattatggtatttttccaattttttcggttttaatggcatgttttcaaaaattttttctttctttaggggtatatttttcgaatcaaatttttcataagaatctgtgggtctctgtacttgattctttcctgtccgggctcttattattaatcacatttttttgttttctcaccccaaactttcaagtcccattaattagtgttaatgagattaataattaaaattctttcttcacctccatcttcagcaacaaagcctgttcaaaagccacaaaaacatttggcaacttttgaattgaaacattggcacattcttttaccaggccagtgatgttatatttgtctgctataattaaaattccaatttatttaaaattcaattaataaattttcaccagcttttaaaacttccaacaaattattggcattcaatccgttaaaacgcttcgtgtaagcaaatgttagcatcactttgaacgcaccaatttcaatgtcggggacctcaatttgaccttcatcgtaatggaacattgcttcaaatacatcggaagcactggagagaattgctctatgagctgttacaatcttaaaaaaggtcaaaaaattcaatttaaaaggctgacggaaaaatttagagaattaaagtaatttttcctacaaataaataatgataatatgttaggactcgggtgggaatcgaacccaccctaaatcccaatccgtgggcatccgaccattgagctaccgaggcatatttattggtcttatcaacattgaaattttgatcttatattgatcattaaactatattcaaaatttatatgcattcgcttatagattttgcagaaaatttttcgagaatttacaagatttccataaaaatatgttctaaaaatgtaattgtttatccttgggcattaagatatggtttttgctttttttgactcgcctcctttttgtcatccttcccaaccaaaaaatgaacatccgaatattctcctttcttcaacactttctccatttgatctgccaaagaattgaaaaggttccattactggtgccttaaatttgaaatttattaag

SEQ ID NO: 17454 - DNA, 1857 bp, Heterodera glycines
atcagttctgaagaactttaacacaccttatttatttaaatataaaagctaattcttttcaattttttttgaaacaaaacatattactcacatacttctgtctaagccctgcggagctaattaatgaataataaaaactggagaaattgataactcaaaggcgaatgttcaaaaattatgaatttaaaaaaaaattaattaaataaatgaaggaatatatgaatcccgtggaatttaagtttttggatcagggacgatccgctgatatgaaggggaggtataatcatacggtcacgcttggtcatttgctgtggtctggaacttggattcaacaccccgaaatatactaaaaatctaatttcatcgattggaagcgaaacaaataattgtttaatttatatattttttttaacttcatcgcaaactttcttgggcccatatctctaaaatcaataatcaattaattcaaatccaatcgactcagaatttcaaaggggcgtggtcaaacgaaaaataaatgttttattagacaaaaataggcggttgtgcctcggtaatctcaatgttagaggttccacggattggttggaggaatgagccgtttacaccagagacctaacattttccaattcttattttaattaattaaatttaaaaaaatatagtcttttgtttaggctcaactcaaaaaaagtagtcttctcaaaataaaatgaaaaaaaagtctgagtacttcgtgaaatcttgaaattaagggacggtcttttggagggtcggaggtgtaaggcattgaccggaaatggcattttcccacgcccatttattactccgataaactcctcccattccgaagggcgcttaaaaggcaatggagagccagccaacgggatcagtcgagtcagtcgggagccacctaagagacttggccaatcgatccccgcctgggagacgtccccaggcatctatcatcatccattcccttccaagccctaaggggtctaattacggacgcgtaagaaggtctcctggaattaattcccctattagcactgggtaatgggaccaaaggtatatttcattctgtaaccttaaattagaaatttaaaaaaaatgtttgttggtcatagagcccggaattttgaaaaaaatcgggatttgggattggcagaaggccgtaataggattccgtgatgaataccccggttttgctcggattccaatcccgattttgccatggtcccgatccgggagtcttttagtgctgggattccagcgggatatctcactattttttcgaatttagcctgagtatttttttggtcaattaggtttttgtgtataaaaacagaatcattaatttaaaaagcgacggacttaactcatcaatgttagattgggttttacataaaatttacctagcaaatttatttaatttaaaaattgaaaaaaaattaatgttaactgtaaagaatttaatgaacttttttgtttaaccatcaaatgaattaaatgaaaagtattcaatggaaatggccaaaatgagtgaagtttgctttttttattagccaaagaatttaaaacgccataattattgtcaccccccccccaaattagaagcccctgaaaaggagcccctttggagaggaactaaaaaacagcagaagcccagggggtattttaggaaataccgtatatgtaaattttaattaaaataatttattaattaaggcttcttcacgtcgcctccaattgttattttcaatctggaaattgagtgaatgatagtcagcataaacaaatgcgcttataaaggctgaactgggggagtgtattttgtattttatgcataaaaatgat

SEQ ID NO: 17455 - DNA, 1932 bp, Heterodera glycines
ctcaacaggaatggaaaatgtaacgaaacacaacccaccgccaccgcaccactcccaacacagccgaggaatgagtggggggggggggggtgacgcgagtgggctcggggggaaaatgaacacaaaatcaaacgaaacgaccaaacaaatcgtggccattggttcacaaaaaacaaaaccaaaaatcacttcattatcattgtcatcttcaccatattcatttaaatgttgtttgtttgctccgcttttcattcattcattataatttccaattgcatttttcactaaattttgtcaaaacgtttgagtgcaaaacgaaccttttcccctccttccaattaaattgcttttgttttacatgtaattatcaacataatcatcagaatcatcagcacattccccgcgggggaggggcggcagaagaacagaggccaatgagcaaaaagtccctccgcccactctcgtcacttttcgctatgcactcacgatttcattctccgcccccctccctccaaacgttttccatttttaaacgcttcataatttttggattgaatttaaatttattaaaaagcaatttaaaaatttcagtgagcttttccatccctacaaattaaattatataaattttattcctcgcgaaacatttggcaaagtctttcaacgcgaaaaccgacaaaaaaacgacctcagaggccatcaaaaacgacaacaataacagggtgaagcttatccatttaaacgcatcgccataagcagaaaatgttctctttgggcgaaccgcccgcggcaactgtctcctcttcgccagcgacagcggtgcggcatcaccaccaccatcaccagccgcatcagcagcaacacaaccactcgcaacagcagcagcaccaattcggctccccgtcgccggcaatgcctccggcatcgttggccgatttggcgtccacggccagctcgctgctgtacgcgttgcagtcgtcccagtccagcgcggtgatggcggccaacacaattttggtaagaatggccgaataaattgcaatgatatggtggttccttaaccatggcttggcatatcgccattttgattaatgtttaatgattattgttgatgcttttagcaaaatttcgtcagcggtgtgcagccttcgctggtgtcggcgctgaacaacagctcccccgccctaaacgttcatcaccacaaagttgaacccgctgaacaccaatcacagcaacaacaacaacagcagcaccagtccgtttttgttacaactgccgctaccgtaccacccccggctacagtcaacaccgtgtcgccaacggtttccaccgcggtgccgcctttcccgatggccagcaagtcgctgtccccgtcctcctcttcgcgttccgtcacaccgacggtctcgggcccaacgagcgcgggaccgttgcatcaccaccatctgatgagcagcaacagatccgaaagctgtttggaacagtttgggcaacagcacagcaaacacttccaagcaatgcacggcggacaatcgcagggaaaaggggaaacgattggccaattggagagcaatatttggtgagtggggagccaatcaatgagaagggccaatccaacggcacaatcaggccgagtttgccaaacattccaattgatccaaagcttccaaattttactgggaatgcgattgatcaacagagtcatgtgactgattacaaattttgcaaattcttctctcttttgtcctccattccatcattcgttcgccccctccccgctaattaatatttaatgtgtttatcaaatgtaatttttgccctctggcacatccttttttggaatgtatgcaccgaccgaccgaccgaccgacccattcattccttttcccctctcccctctttctcctgcgactgatcactcccgatcgcgtc

SEQ ID NO: 17456 - DNA, 817 bp, Heterodera glycines
ttggccctcccctcccccccccccaccctatcattattcctcagatttattttgataatccccgtgcggatttgccacattgactggatggctatatgtgaccttagcttgcacatctcttcagcgttacatctctcgataggtcatctctatgaaaaccgaacttgtatattgaatggaaaacaatcacgaaaaacatcattgaccattgaaagaggaaggaatggtgaacacatatcaacaatactgctgtactggctatttgttgggcttaatgcccgggtaaacaccgaacgccaaaaacaaaatgtaaacatttggtaaacattttttccaatttctcgtaggctttgaccttgaacattgaatttcattcacgtcatttatgctcatcggtcaaacaaaaccaatttttcttccttttgccctgcggcgctttttgcgtcaatcgccgcggggggcggggtatcagcagctgtggcgaagcaattgggccaaattttgacgaatgtcccccgggggcatagggcaaagggagcgaagatggtcccgttttagaacgaagaacaaaacaattgttggccttgtgcccatcaaaaaaaatagagaggaggcacacaaacagcgacaaaagggtaaaaataaaaacacaccccggggggaaatgaaaaatgcggggaatgataaattgacacgacgaacggacgtgtgatgatgatgatgatgatgatgatatgatagggaggaagaagaagaccaaactaaaggggaattatgaaaggaaaaacaaagcagaggacagattatgaagggaaca

SEQ ID NO: 17457 - DNA, 852 bp, Heterodera glycines
ctccaagcaaacacaaaacacagcccaatgccgaagacactttatcgtttaattccaaattaaatagtcgacgacaatcaatagaactgacgaaagcaaaaactaacaacaatctaactattatcacccaaaatcacaaacaaaaatggcataaaattaaaacaacagaacgcaaacatattttaaatcactatattatcacagtattcaaataaaatttgggtgctaacattggacattttgaattttaaattttaattatttatgctttttcttgtttttctataatttttcattcattttattgaaataaaacaatattcaaaaaatttagagatcagatacaacgaaagatggaaagaatgaatttaaaagaaatgcaaaaaaggctaattaggcattttggcatacttaaaacaaaaattgggtgccagcattggcattttaattttaaaaatggtccttttctctctctctatctcttattgctttcatcaatttctctgctggcattggtcttcttcgctgcttctgtttggtgccgtggaattttgcgcaaattttgttggcattggcacggcatttggtactgaatcgtccgatggtggcgattgtgccaatgccggtgattgtgccgaaggctcgtgttgttgaaaatgggcgaacaaagcaatgaaacggtgcaaacagtaggccaccgacaaatgaatgttcaatagccataactgatcagaagtaaaaagtgatcagagaatttgcaaaaattaaaattaattgattttacaattaaaaaaattggcataaaatgggccaaaaatttaatctacgctatgttctgatcagaaaatgatc

SEQ ID NO: 17458 - DNA, 2100 bp, Heterodera glycines
  unsure (1)..(2100): unsure at all n locations
aaaaataaaaggaatttttggtcggttttttttgcaattaaagaaaatcaattgattaattggggtaattaatgaattaaatgcccgtgaaattgttcgcttccctccgctcaaggtcaagcaagaaaattatttcactaattaataaacacattcagaatattttagtgtctgatcaatgaatggcacggaatttcttttaatgatttaagcacgaggccccaaaaagttcaaatttagaaaatttttgaacttcgatttcaacaagatttagtgatttcttgggcaaaaagtgtgccgtttgcccgattatttccttattttcggcacctgctcatcattttctgcccgttcaactgtttcaatgccatgcgttcgcacttcccacagttcgtcctccaattgaaagtgccgaattgtccgttccgttgttggcattgcaatggcacggcgccgaattcgatggattggcacatcaaattgatccggcaaagctcctcaaattattggaaaaggccatataattatcggtctttttgtcttgaatcacgggcagcaattttttggcctctattcttggtaccaatccagtaagtcttggcactaattgtctgcttaaattcagagtcttggtacaattattgacttttttttttacgatttttggcaccaattttcggcctaaatcccgagttttggtccaattattgaattttttacaaattttggcaccaattttcggcttgagtctcggtaccaattttcagcattggagtctgagtcttggatctatttttaaattctcgagtcttggtgccaatcctcattttgatcagctcttttctgcctcatggatgcaaaattggcaccgttttcgttttccgttggttttggcacattgttggcatcagcatttatggcttcttcatcttcctcttcggcacggtcataattaagcggctcttcatccgcttccatttctaccgcccgttgctgctgtccgccaatgtccgtgccaatgtaaaagtgccgattacagtctaagcgacaaccgaattggcaccgtttgacgacggcttggtacgcgacacggacctgtgccattttgaaaatcattaggcacgtgcactgtaccagatctgatcaaaaacaattgttcattcaaatcatgggattgatcagtgagtgatcgatcagagatttccctagtggatcaggtcttcagcagagtctatcaaattagagattgctgaacaaagtaatcattttgattgtctcgtcatcatcagtgatcatagataatgattttgatgccattgtatcagttggttagtgatcggtttattcgtttctgatcaatgatcaatgatctattatttatctgttttgatcagcaataatgatcaaaatgaagcttaaaccttgtcgccaaatgggacgaatcggatgccaatgcgaagccgattcgggcccatttgctggatggaagtcaccatggacaaatttgtgacacacctgcagagaaaccggataataattggtaaaacgtcaatcggagcaatgcgaaaaaggcacgaagaaatctcattaaaaaaaaattaaaaaccttaattgtgaaataatgaaaaattaaaaaaagaactaacgcaaaagctttaggtgttaatgtaaatttcgtttttacttttttacatcaattttttatgttttccgttgaaacttttgccgtccccttaattgttttttctaggcgtcacccctcctcattttttcttgtttctattgtaaaaaactaaaatttctttccttggaattttttgaaaataaattttaaaatatggaggatggcttatggaatatgtgcccttaccctcccgagtcccaggtttttcgataaaattgccccacccattggcatcgatcagtgccaccgaattgntcgcctcctcattttcggaattgatcgctttcaggtcgctgatcagcagtgatccgtcctcatcatcaccatcattagcataattgtgcgggaaagtgcggcggtggcggcgccgaatctccaaaagccgggcatgcccagctctacctttgcaccggcat

SEQ ID NO: 17459 - DNA, 2967 bp, Heterodera glycines
ggaccttggtactcagttgtccgtgtccaggtcccggtcccgacctaccctaatttatagcaatatgtaaataaaaaaaaatttcgataaaaattcttggaaaggaatgaataagaacaatcattaccaaaaaatgacctaattaggcttagaaaaacgttttttagttatttgaaaaaaaattaatatttagaaaatcattttagggtctcaaggaaaatcgaaaaattctcaaaaaatcttaaaaatatgtacaaataatagttccaatttttgttaaaaaaaattacacattaaaaaacaaatgtttttctattatttatgtagagcaagaaatcccccccccccccaaaaaaaaatgtttacaggaaatttccaacctaattaattaattaattaccttcccaggtccatcaacgttccgtgcacaatttgttgggtctgtccgcccgcccctggtggactgttgagcaaagcgaatgtgccaaacagctcaaaaccatggaacgtcaatggaccgcgatcagaggtgggaccaaactccggagattaattcaggatcagcagaggataagattggataattcggcacggatcggatctcaggattaaaatgcctgttttaggattcctgctgatccgagtcaattttacaaaataccgtatttactgaaatagaacccctctcccccctgtaataaagcccctccaccgaggggggttgaaaaacaaagttccccccctgaaataaagtcacttttttttgaaattttaaatttctaaaatttgaattttttaaaattttattttagaagaagcattgaaagtgtggagcaaaaggaaaagcctctttgttgaagaagccctaccaataggcagcagtggaatgatgggaggaggtgaattggcactcgttttgagaagcaatgccatcggcggattcagagaagaggtaaagagagaaaaatgtcaaaatttaaaattgctaaattaaattaatttaattaataaaggttaaaattatatttttaaatagaattttgaaaattatattttttttgtatggaaaattattttttaagtattaaatttattaaaaggtttacgactgaaaaaatgctattttatttaaattaaaaattgttaaattttttattaattttaaatatagttttcaaattaatgaaaaaaaaaattcattaaagatttgcgaccgattgatgcagtcaacatgtgaactgcttaagcaatttgaaacagcaagctgtgccaaggacaaggtgaaaaatttaaaaataataaatcagaatttaagaaaaggattcgaattaaaaagtttaaaataattttaaaaacgaaatttaaaagggaataaaattacaaagtttttttttaaaaatgaaattaattccaaagggtccgaattaaaatatgaaataatttattaaattgaaatttaaaaggggtccgaattaaaatttcaaaataatttaaaaaatgaacactctcagataaaattgtccgttttgttggccggcacgcgaacttggcccttttgtgggcccaccaattatgtgctggaggcacagcttggcctggtggcacattcggatgcacgaattcgggtgggcaacgagacaaggtccacccacaaaagttttttgaggaatttaaccaaaaatttttttttaattttttaggggttggcgcccgggccgattcctcgtgttcgacacgagttttgagcgggaaatcagcttcgaaggggtgggctgaaaaaaaaacgtttttttaaatttaaattttatggaattcccaggccccctccaacgcaatacgactcgcgctgaccatggaactgtggcacccgcaaatgccaatggaattgcgcggcaaaatccgtgccgccgatggcagtgatgaagagagaaaatgaaaaacaaaacaattttttttaaatattgttgttgggaagatctcatccggattagaggagagttggatgggcagacagaaatttcgttgattttttttttcaaaaataattaaaatgagtacaatttggtatttattcaaatatggatttttgaaaaatatgtatgtgttatttctattcaagatagatccaatccgatatgctcgtcctccgggtccgcaatgtattggtgattgggcagggtggacaaccattgcatcatgcttggaaaaaaaaattacaaaatttttggatagaaaaaccgcaaaaattggtacctttttggaaaaaaaaaatctatagcaatttttttttcttcaaaatttcataagtttaccaaaaaaattttccaaaaatttttgaaaagatttcattacaatttatttattgcaattaaatctgcggtttgttttttgcaattcgccttacgattgtgtttcgcattcctcgcgcaaaattcgctgtacaatcagccgatcacgagcatcgagcaccgccgcttcaatctaattaaaaacattttttttagaataaaaaacaaaaataattggcacaaaatcaaaaaaaaaaattaaaaattcacttcctccccccaatcgtttattgagccatgcgaacgcccaaacttcttttcataacgattaaaatgcactttctctgaaagaaataaggggttaattgacgtacgtgtataaattttttttgaaattttcaagaatttttttttttgaaaattttgttggaaaaatttttattttagaatttttctttttattataaaacttggttttcattcaaaaaacatcatcacctaacagaagaccgaggccaggagcgcgagggatatccaactgaaaaattaaattttttttttttttttagatttttgagattttttttcgataagctaattaccctgtttcgttgaaatgaacgggtgatgtcacttttgtacatgaaaccacggagcacacaaatgacagcacctgaac

SEQ ID NO: 17460 - DNA, 479 bp, Heterodera glycines
agagcgagagaaagagagagagagagaaagagagagagagagaaagagagagagagagaggagagagagagaaagatagagaggggagagagagagaggagagagagaaagagagagagagagaggagagagagagaggagagagaaaaaagagacaaaggtgggagagcaagagaaatacagggagagaatgctagacaaaatagagaggaatttagaaaaggaaaagggagagaaaaaagagtgggggggaggagaaagaggagaataatataatatgctagacaaagagaggagaatagaaaaagaaaagagataaggtggaaaaatgaaagaaaaagataaagaggacgagggaggaaagaaaaacaaaaaaagttaagtgagagaaaaaataaaaacgtttttcttactgtccgtctgacgccaaacacgcgaatacggccggcaacaaatcgttcaacaacgcgggaccgtcg

SEQ ID NO: 17461 - DNA, 2112 bp, Heterodera glycines
tttaatttttttaaaagagaaaatgagtcaacctttacgtttaatttcgttttttatttaaattattgttttgctgtccttttatgttttgcccgcctttttcctcgtaattggtcgactccccgtaattaggccctgctttcggcactttgttacaatgtagtaaatgttgtgaacattcagctgacgcgcaatgtccgcctgtgaaagtccgctctccatcagtttgacaacggtgtccaagtcaacttctggctaaaaaagtgccaaattaaaaaaggcaataaaaaaaatttttttttttttttgcctttttctcttttggaggaaccgattcggcacgtttttgctgttcagattccttttgtgtgctcaacaccaatgaaaaattgtgaggcggcacttctttttgatcaacagtttcttcatcgtcttgaaacttaaaaaaacctttttaattagttaaataattaattaataagtttaaattgtttattaccctcgtttttgtcatacgcattttgcgtttcggttgtttgacagatagaatttgaatagaatcatcggcattatcttcacccttaataagtttaataattaattgtaatacaaaaaataaggcaaaattataaatttgatttctaaataattaaataaaaagataaaataaattagaaaagcaaaaatttttctgttttaaccttgattatttttggttgagcagattcaactccgttgtgttcgatttcatcaatttgcgccttaaaaatatcaatttatttgaaaaaaggcacagttaaaattttaatatattaatgacaatgccaaaagtgattttcgtggtattagcaaatattatttgcaaaaagtataaatacctaaagtctaatctctatttatattttttttatacatactttttgacacaaaaatcaaaaaataaataaaacaatttaatttacctcaaaatcttcggctttttcaataatttgttttttgactggcaaaggcaactggtgcagcaccgtttctttctgttccatttcttcatttgagcacttaaattaaatgacactaagtaaatggccttttttcatttttttttcaatttttgatttaacagttgaggaggggcgggggatatataagtaatatactgtaatggaataattagtgtcaacaaattcgcgctaccttaataacggagttcatttttgattttgtcccaattgaagccgtcggtgaatttttccgctttttcttagtgctttttacaacaatagcaggcgcgaaaaagtgccaaacatttttggcattcatggccaataaaattgtaatgatgccgacaatgagaagcaccaaagaattgcgaacggtgtccaaaaatgccttttcgtcggccatttgtttcattttttgaatttgctcctaaaattgtgattttaaatgcaaaaaactaataaataacttacatttgtcaccacaacgtgcgaattcatttcagcattttcatcaaaaaggcattgcaaattgacggaggcgtctcgtaagaattttgccagttttgactgatcatccggctaaaatttttgttaattaattattcggtaactttagcaaattgttatatgatacaggcttccttaaaattctgaaaatgtggccagagatgttatcactaataaacattttgtctacattttcggctttgggtaaaaatgccattttgtttagaaaccggtaagatttttttgggagcgggagtatgggatttgtgggagcggagtacgggatttgcgggagctggatcaagaatcccgaaatctctgaaatttcaacgagggttggggtaacccaaaaattaatcttaaatatattattgctcaatttcaaagtcccttttatatctcaatctgttctctatacatttattttcaacatttggatcagctttgcaaattgatgagataaaaaatttgttgaaatttttgaaaaaataaaataaaattcttattcagaccctttcaaattcaacaaaataaggagaaaattcagatctgtgaactttaagaagatgaaaagatttcatgtttaccttatctgataccgatt

SEQ ID NO: 17462 - DNA, 1251 bp, Heterodera glycines
cttttcgagaccgggtcagtggtttcggccaggggtgggaaatcttttccatttttgtgcacttttggatttttctcccagcctcaatgattaatttattatatacaaaataagttcacctgcaaaagagcgccttcgcaaaataaaattgtgttcaaaataatggaaatgaggatcattttggagtttttggaggatatcattgggccgactaaattttaagaatcgtaaaatttaaatagattatattaaaaatatttgtttgatttagaagaaaataataataatattgtaaattcaattccaacgaaatgaccttttgactgagaatctttattttatgatagattattggaaaagacctttaattttattaattctttgtgagaaaaggcaaaattctgacctattttttcagatggtgattgcctttggatgagttatttgaaatttttattcaattatatgcatatgagcaattagtattcaaaaagatttataaaaatattaattaatagggcttccttttttaggcaaatgcctaaaatttttgcgcacttgatacgcatagataagcacgaaaaacgcgttttccgcttggtttgaggtgtctacgatgacttttataatgcctatttttgcctatttcggggtttttgtgcctaaagtgcctattttaggctttttgaaaaaagccataagaaaaatgcaataaaaacgaaaaacacacccctaagaaaaaaatttgttcatattcgaaaaaaactttaaaatattttatcagtgctgaaatttaatttaaatttcatgccgttcgttttttctttttttttgccttggttccacaactctcgacattagtcccaaaccgacctcattacaaaagtcggtaaattggcgtttttctgcgaacgtctcgcactcgcccacgccgacgatggtcttttcctgaagtaacaattaaaaatcccaaaaatttaaatttttttctaaattttgctggacgggatcccgcgggattatccctaaaagtcctgcgcagggctttacccagcataagcttcctcccgtgactgtctcgggttggctggccgacccctcccaaagcatggaaacattaagcacctgctgctactgattgcgttgcggcaaacagttgcgtcgcgccgccacttggttgcccgcctcttccggcggcggatggttgtgcgactgaaaggctaacatcactcgcctcttcgccacatacac

SEQ ID NO: 17463 - DNA, 3239 bp, Heterodera glycines
  unsure (1)..(3239): unsure at all n locations
gtgcccacaggggtcgccttggaaattttggtttatgtgcgttttattaacagattttgagtattttaaagttgtactagcttcaattaagcaaagatatattatganagccaatatgttccatatttattagacaaaattaaaatgtttcaaccttttttaaaaaagttaagcggcgccaaaactgcaatttaaaaaaatcatttttttgatttttggcaataacatgtttgtacccgaactaaaagttttgaaattttaaaataatagagctatcaagagtacatcatatcaatttatntaatntaagcattcagagttaatttggcaaaaacaaagtttatttgataaaaaaataaagttttgtccaagtttctgaaaagtaaaatttataataataattattatttttattttctgcatttttttggctgaaaaaagaatttgcttaaaattgctgtcaggaaatttggataatgattttgttttaattagtgcttactcaccatactttgttaattagtgcgtgtaatcatcaaatataattcacatgaaaaacacattaattaacaaaaaaatgaatatgcttaagtaattcaacgaaattttattcgcctattaaatcattttttataattttttcttcaacaaacgtaaatataatcacacaacggaaccagtccatcaattaattacgatgtaaaacataaaaatagaagaagaaaatgcagtaattagcatttaattcatatgaaaggcatgcccattaattaacggaaaatgactatttaaattaggcgtaaaaattcaatttcttataattaatgacgaaatgtaaccatcaattagtcttttttcctgtttggaagcattacagaataatatcaaaaaaaattccattggctttaattttgttttgtcttagtgccaaagtcagccaaggtctttatttatgtaaagaattttcaaaaaaacgaatactttttgtcacgattctcgaaaacaaagtcccaaatctcgagaccgaattagtccaattacaggataaatttaatattttaaattatttgattcatttagaaagaaaaaagttatcatctataaaactgataatggtactaattattattctcatatttttcgccacttttaatggaatttttggggttggagaaggtggtgaagaaaacgatttgttcagtgatttgtggaagaattatttcaacgcaaaaaacgtgcagaaggcaaatgttggccgaaacggaggacaaaaagtgaccaatcgcgtaaagatggaagaaagggacggtggtgtagaaatgggtgcggtcggcattcgcatgccacccaaattggcacaaatggtgatcaagagtgaaccaaccgcagcagcagcagtttttgatcagctattgaaaaatgtaaagcatgagccaaaagaggaggagtttgagcaattggacattggaaaaatgggtgtggttggcattcgcatgccacctaaattggcacactctgtgatcaaagatgaaccgccatttgatcagcagagagagcatcaacaaaagcaagcaaataaagagccaaatcatttggactatgggatagaaagaatggaagaaacagaaaattcattggaatcgaatgggaaaattagccaaaaaagtgccaaaaagttggcaaaaaagaaaagacaatggcaaaaggaagtggacagaacgccacaacaatttaaaaaggaggagaattccaaaagcgacataaaagtattgatagaacaatttgatcaaatgaagaagaaatttagaaaaaaaatccattttgttgacagaaaaattaatgtgaatttggaaagtaaaattgcaaaaagattgggcacttgcagaaccaaattatacaaaatgaaaagagaaaatggtaaataaacaaaaaaaaaaatttttaattttaaatatttttaaatgaaaaattcatattattgtttttttaataaaaaattatttttttttaatattttcacataactatttacttgaaaaaattcacccgttttaaaaacttaaaatttaataataaaaaataaaaaaattttttggtatttaaaaaagtttaaatttttcaaagagaaaatatataaaattttaagtcattagaaggattttatacttttaaaataattaagcaaaaataaataaacactttcaaaataaaatttactaaacttttttaatttttaggattattgaccagaaatttttcaaatgaacaaaagaaggaaataatccatcgatttgaaataataaaagaagaatttatgcgcaaattcaaaataaaaaccaatgccaaaattagcgataaaattgcgcgaaaagttggcgtcaatttggagacaattaatcgttggaagaggtcatttggctcaactggtaaaaaataataatcaaaataaaactaaatcttttgtttttaaaagatttttgcatagctttttggggataaatgtttaatttttacagcaaagccaatctatacgagcgcagaacaattggaattcatccgaaaatatgatgcactgaaaattcaaaacccactgatcagcgatcagaacaccgcccaaatgatcggaacaaacgcaataagcataaaaagatggaagaagaagtttggtatcgcgtatccttgcaaaagaagacggatcacgtgaattgattgggcagtgatcagcaatggcagttgcttgaacatcacagaagcggaagagtgatcggtggcttctgctcagaattggtctgctgacctggtctgagtgatctgcttaatttgtatgctcttaaataaactgatctgcctagtttggtttgattgatttgtgttccggtaaacactgatcagctgggttgaattcatccttctcagcacagtaattgatcatttttcccttgttcatccgggaattgttgtgccttgccatgaccaatctaatggtttaatctggcgatcttttgccgcttttttcacaattcgcttggcttgaactgcgcaaaacttgtcattttttgaattagagtacaaaaacactgatcagtttggcttaactaacactgaccagtacagaaattggtcattttttccattcttaatccgggaattattatgcacttgatttttataatttaaaaaaactggataaattatggtcaaaaaagttcgggaaaatgcctttgaatctttttatgctg

SEQ ID NO: 17464 - DNA, 2802 bp, Heterodera glycines
  unsure (1)..(2802): unsure at all n locations
tagagtgcagcgggaccgagaaatttgggcaagaccgggactttttgggttgaaaaacagggactttttggttgggaaaaccgggaatttcccggtcaaaactgggtaaaaccgggacttcggtactcagttgtccgtgttcaggtcccgtcccgcagcactctagtaaacacagacttatgaattaattttggtcacattcaatcgtaaaaattaatttaacacatcaattttgttccaatttcttagcattgttcctgctgtttttgttgttggtgcttcagttcttctcgaccattggtgccaccgttcaattggtcaaccaaagacacttccttattggagagcagagtatggcacagaacgcacaccggcacggcacgccttacaattagtgtgtgttgaatgggaagaaaaaaataaaaaggatttgtgagtggtcatacataggttggaaattaaattttgcctttgtcggaatggaaattcagtccgtttgacagaaatgaaaattgtggaaatttctgaattcctttgaatccgaaatatgaaaattcaagaaaacccaaagcatataaaaatgctaaaaaaaattcaggggatgaggagacgaactgttctcttaaaatcgtgaccaaacatgacaaaaagatgatttgcctacttggcaggtccactacaaacactgtttgctgtgcaggaagaacagaaaatctaaataaaaaattagacatttaaaggacattaaggacattacccccccccccccccctaattacttttccacaatgacgacaattgatgcgatgctcaggccccggctgcaattccttcacgcaatcattgcaccggtcaacgtcctgttcgtcttgccatcgaaccttaaaatatactgacattcatacgtgtgcaaggggggggggggtcaggaaaagggtcgtgcgttcggcgatgaccccccctaaggggggtcagcgtcaaattttttgcggtcgaccatttttgcccccgttaaagaccttttttttgccaatttttgcgcgaccatcttgaattattcagcccctcctcttgcgttcgaacgcacgaggaaaggatgtcgaacgcagaaaaattggaaaattttggcaaaatttcttagggaaaagtcaatttttcaagtccccactctgcgttcgacaaatcaccctcatgtcagggttagtcgaacgcaatgcacgaccctttccttgatctcgccgctcccttttctcgattttcccctttttcttttctctctcttttctttcccttttttcctttctcccttttttctcgacccccccncccttgcacagctatgtccaccatagtccgggaaaaattaaaaataaattaaaatttgttttacgattgggagaagtcggagtctgaacagtgctggtcgggatggcctccaaaaattcaatgaactgctccatgtcgacgcccaattcgtccaaagtgagcgaccgctgctgtttttcgcgcatttccgtgcagagcatccgatggatcaccggcgaatgggccataagccgagcagcagacacagtgatctgcagtggataaatgccaaatttttaatgctttcattttttaatgatcagaaattgctgtgggtggtgagtcaccgttttgtcgcaaattttcactgtcaaatcgttgtccggtagattaatgtaaataccttttatatactaatttgccaccaaacaatattaagagccagaaaatattttgaataaatacgaaaaacaataatatttattccatgtcataataatgaaatagaaataccatattaaaaattaagtattcttttaaaaataaatgtaaaaaacgtaagttttactcataaaccaatccgggattttgaaaaaatgaaattttaatgaattcttattataagatattagtaatttgaaataaattattcctttattaataattaataattatatcttcttctaaatttacataacctgatcaaaaaaagtagttttttgatattcaggccgattctattaatatgcaaaaatacaaaatatatttatgcttaaacccaaaatgatcaatgaagctaaatttcatcaaattttatttgcgcttaaaaccacgattcaacataatttttacaagcatatattttttaattgttttacaagaacattaataaccaaatatttagtattaaatacgacaaaaattatattttatatttagacgatttaattcaaaaataaatagcttaaatgagattttcttaaagtgttccttacataaataaaattttaaaatttattaatttacactattcatcataaaaaggaatttcaaaaaatgaacgttgatttaagaacaatctattttatgctaattttaaaaataaaaattttataagcaatttacaattaatcgaattcgctgacccacaaaatgtccagcctacgaaatgtccaagtctcgaatttgagttttttattattcagatgggcctaaggttaggcaaggggtaatataaagggtatattcgtattcagcgaccccgaaaaccctaaaaatccgaaattagactcattttgtttttataaattttgaaaaattttggacatttcgtgggtttttactcttttggacatttcgtggcttggacactttgtggggatgccatcgaattgaaatatatcaacgttaacaataataatgttttttgatatgaaaggtttctgtttatgctaaaaaaaatgtgaaaaaaatatgagtagaatatagcgtcaaaag

SEQ ID NO: 17465 - DNA, 1837 bp, Heterodera glycines
cggtagggtgccaattttaaaaaattcaaaaaatgcgctgccagggcagaacgccaaatttgttgtcccgccaaagtgtttgctgcgcgttgctgttgtgcccgccgtctctttcatctccgtgctgttgctcatcaacaactcatgctccgccgccgcctctgcccatgcatttccgtccgcagcagcatttttggcacaacgacaacagcaacagcagcagcaaagtgagatcgatcgatcaattaattaattataaattaattggggaggggcaaagagtctcgcgcagatcaacaatcaattaattataaattaattgaggataggccgagagtctcggagcggatcaattaatattatttattaattggggatgggccgagaatctcggcgcggatcaattaattaggtaattggggataggccgagagtctcggcggatcaatctgtgctatgacggttttcaaaataaacattttttgccttttattctcgatataattcgcttgcactaagtgttttctattagccttcaaaattttaaaaaatttcgttaatgagcaacaattattcaatcaatcaattaactagttaattggtaatggtcgagagagtctcggcgggtcactcaatcaattaactagtcacacggctattaaaagtcattaatttttcaactcattaatagggcacaatgcaccgcttctcttccacctgttgatgaggcaacacacttcattctcccggcttccggccgccgacagcatttcccaacaaaaccaacaccaacaacagcaggacatcaacaacaacaatgccgtagtcgatgataatgatgttgaagccgaagatgaagcggcggcagcggaaatgccgggggcgccggcggcgacggcacagcagcgctgggaggactcaaccggcggcggcgacgatggcatggaggaacagcgacgggacggaaatggcggggacgaagaggaggtcgccggcgatgaacaacaacagttacaacaacgacgacaacagatgttcaagcggaagttgttgttggcgcaggacaacgacggcacggcggcggcgagcggtgccaacgacagcggcgaaacgtcgccgcgggcgttggcacgctcgcatgtggagctgttcacgcgaatgcgcagcatttgcggtcggatgaaccgcctgaagcgcaagcggacaccgcggcctggctcacccgagtcgttggtcgctttcctgtgcgacagtgccaaattccagtgaggggcacggcacaaaaaaaaacatgggggacagacggacggcacaatttgatcattgatctccaaaaaacggaaaaaaatatttgtttttttttttgcccggatgcaatttttgtgttctcctctttgtccaacaaatctcaaatatgtaatgaaaattgtgtgttcattttgcgttgtgtaaacattctctcctggcgaaaaaaatagccgaaggcacaaaactttaattttgccgatctctgttttgtactgactccccatgaaaaaaaatcaaatcctttcaatttggcacaacgattttggtacggtaattaattaattaatcagcctgttcctgcaccaataaacaacaacaacaacaaaaaatttgggctctagtgcactttatgagtccaatcgacttttatgagtccaattgagttttatgagtccaatcaattgacaatcccgtgtttttatacaataactttgttcatgttcgaacaaatcctatctttttggtatcattcgaaagcacaaagtctaacgaagctaaaatatataaaatcgcagcgttcaggcaatta

SEQ ID NO: 17466 - DNA, 1411 bp, Heterodera glycines
agcagcagcagcagcagcagcataatcatcaaatacacttagaaatgggctcaaaaaagggggaaaaagaggggaaaaagtaagtgggtgaaaaaggagactccaacaaatgggaaaagggatttatttaaattaattttaaatatttttattattttttttatattttaaaacattggcactttttcggagtggtatattactggtatgaacacaaaatcttatcaattttatttggaaagattttgaaaatccaactctcaaacaaattctgccacttaattttttgggcggcaaattggtggcgagcaaagtaaaaatggtggggacattttttgtcggttaataataatatgatacgtatctcgtggtattgtgattttccattatgttgtgtcagtggtgttgaatcatagcataaagataggatttgttcgaccatgaacataagttattgtataaaagcacgggaatgtcaattgattggactcataaaactcaattggactcataaaagtcgattggactcataaagtgcactagagccaaaaatttgtacgggaaaaaaagcaaataaattcttaaaaatgtacaaaagttgcacacttgtagtaaaacgctaaccagtagaatgtaaaaaacaaatacttgagaaattaggaaattttttagcaaaaaatctcaacttaaaatttttgtttttaccgaaaaatcgcatttgtcaaagcagcacaataaaaacaatgaaaaatgagttgaatgtgttatgttcaatgttcatcaatgtgatgggggagcacaaacaaagacactttgccatcggaggcacccgcaaaaagcatggacaaatgggcagagggagaggaggaggacaattgagcacaagggacaaaacggcgacgacggcggctctgatcatcatcatcattttggcatttctccgccgcattttcccaatggggcgacggcaccgctgcatcagcaacagcacagtcggaagaggatgaagatgatgataaaacgcggatggcggcaccagcagccgcgtgaaagtcgcatttggccaacaaaacggtggcccattggccgccgacgccgcccggcggggcgatcaccacagagcgtatctgacaaattagatataaaagaaatcttagaaaaaaattttctaagaaaattttaaaaaaacaaaaaaaaacgatttttatagttttttatttctaaaacagttgaaaatttctcaaaatttttttcatgattttttgaaaaattcacatttaaaatttttgtttttaaatttacgggagggggggggactcagaccgccgcacctcaatgagcccatccttaaatccgctggccaatcgcctcacagagtgccgttgttgttgttggccggcaccgccgctgc

SEQ ID NO: 17467 - DNA, 1527 bp, Heterodera glycines
tcattatgagcgggatacgtccaaccgagcgtgtacagtgatcgacgagtgccaattcccgcagctgaacgactgccatccgaggtgtgttaacggcaccgtgaaggtgctttatcccgagccatggcttgaaaattctcgaccactcatccatccattatggcattaattacattaattttggagccctttcctaaatgacatgagcaatggactaattatgtcccatttaagtgccgagtgcacggaccttgcccagggctacacctgcaagtgccgaagcggcttccgcgacgtgtccccgtccaaggaaaagccgggtcgtgtctgccgggcaagtaagtgccgcccactatcgttttgggcctttataccgtattcaatctcccccaaaataccgtaatgccattttcctcattttcagtggtcaatgagtgccaatttgcgcatctcaacgactgccatcagaatgcgcaatgtttggacttggaggtaaatttgtgaaaacacaatcacttgatataatcctttttagaaatttaaaaattaaatttacgcccggtaaatttggaaaaaaaactaaaaacccatttttgccaggacggctatcagtgtaagtgtgaaaacggcttcaaagacgttcgaccggaaaggccgggccgactgtgccaacagatggtcaatgaatgcgcacgtgcggacacaaattcatgcgacaaaaatgctaaatgcgtggacgaagaggcaagttcagaagagaggcacacaaaactggcatttgtcattaaaaaattgtgtgtgtctaaagttagggtattacagtaccatgaacttttgggatttactgttttttggatattacagtattcagaacaattccttgactttaccgtatttattttatttccggtgataaatttccatgctgtacttttcttttaaattcagccagccatggaaacggcctaacacagtaaaaccctggttataaccaatgcataccgtatctctcaaccgcatgacgattagttacagtcttcccgacttgaatatacagtatcaattatccatgaaaattcatagcgcataattaattgttcatggcacggttttcatttctcccccatctccctgcttcgtcccctctgtgtgttactgtattaaaatggcatactgtcctctacagaatggctaccgttgcgagtgcaagtcgggcttcgcggatgtgtcgccaactccgacgctgcccggccgcgcgtgccggcccatcgtcaacgaatgtgcggagtcgaagctgaacgactgcgaccggttggccaaatgtgtggacatggaggacggctaccggtgcgaatgtccggccaactcgcgcgatatttcgccatcgcccgccttcccgggccgcgtgtgccacatattcgagaacgagtgcctgaccgggaagcacgactgcgacccgcaggcacagtgccacgacaacgagcaggcattcacgtgcgagtgcccggagggcttcaccgacccgat

SEQ ID NO: 17468 - DNA, 1180 bp, Heterodera glycines
attaaatccaaagcaaatcatttagtgatcggtagaggtggttcttgaggcacaaaaaaagtcccagatctcataggccctttaaaatatcaaatttcctggtttttcggatcggaatcagaccctttgccctttcgctttaaccgatcagattgattagaaccggtacagagagagagagagagagattgcgctgctcctctctaaaaacctttaaatttttaagccgatctaattaatttccgtttttttagtcccccgatggattgcaaggccgaatttgtgtgcgcaactcattttgccgtgacccgaagctgaacaattgttcccggaaagctgtatgttatgaggaaggccaaggctaccgatgcgaatgtgcccgaggctatgtggacaagtcgccggacggcacgccaaaaggccgagtttgcgaattgccgccggcgccggcacagccccagcgacacccgtgccaagacgggagccacgactgtcacaccaaggtggataggacattttgtgtataactcagaaacaaaatgcaattgtgtacatatttggtgctattcgttgtagaataacgagatgaatccattgaagctattgtaattgtttgtcgaattttacagcacatcagttaggaaaagcagcggaagtcatttaaaaatatcctggaaaatcagagttctgctacccaaattgaaattgacttttctctaggcatcctgccgagctgtcggcgccactgggttcgtctgcgaatgtttgcccggctatgaggacaaatcgccggatccgaagaacaaaggcggaagagtgtaagtggataaggccaataaaaaaagctttggattaagccaattaattgatcagttttatagcgaaaatgataaaatttccttaatgaaattctgcacctaaaaagagcaaaagccaaaaaccaaaatcccagaatgatcgcttcactttcaactgatcagaaataactcgcgacttaaattgaccgaataccggagaatttgaatcttaaaaaatacttaaaattggctcaaaacaaatcttcttaaaatttcatcgctcttttcagctgtttgctccctgaacccgatctgcctggataacacccgaaatgattccgatgctttttttgatcgatcaatcacaattccttgattcactc

SEQ ID NO: 17469 - DNA, 2458 bp, Heterodera glycines
aaagcttcaatccatggtagtcccaataaattatgtccgacttcgccgctgacataggcgatcagagtttgcggtggtttgtcggcaatttggacggtgcattggaatttgccaagcaaagcgaatggctggtcattgcaatttttggcatcgatgtcggatggagtcagttccggttctcccaactctcgccatgtttgcaatgaaataattgtggcctgagcgccggtgtcgccattcatggaagtttgccttccattaatcaaaatgcataatttccaccatcgtccttgagtcgtgccgacatgcaggcaatttgcgtcgactttgacagtgtgaaatgccctgtggttgttcggtgccgcctttgctttcttttgccggcaaattgttgaaatgtgtccttttttgttgcacttgaggcaagtggcgtccctgaatgtgcagtcggagcgccaatggtcggatttgccacatgatccgcatggatgcgtcggttgaccacgcgttggctttccgcttgaattggcatttggagtttgcttttgattggagccgccgctttgtctttgcgctgggtcggcccattgccgtggccttgtgcgaatggcgtttgtggcaattggtgggttgaccagcgaaagggcgctctccttgacaagttgaattgcccttaattcctcctcaattttcttgagcgaaatgttggtgccatttttctgagagtcctccaacattttcaatgccttttgtcgcaaatcatggtgttcatcgttgagtgcgatgaccaaaataatgcacttgagctgctcctttgtcagactcaggtcggcattttcacatgatgcgttgatctgcgcaattagtgatgagatgtcttgcccttgttgctgtcgaattttaaaacattcgaagcgacggacgaatagcgaacgtgtctcggcaaaaagctgtttgagctgtgaaatggtgtcattccaattcacttggtccggctgggttgggctgatcgtgtcccgatatttgctgtactcctcctctccgagtttgccgagaaggagtcgcacttttgaggcctcaggcagtgtgcttccgtcgtcctcgatcaattttccgtaccgtttgaaccagcattcaaatgtggtaccgacctccggattgtaatgaaaggttgaaaggcgagcatcgatagagcttgccaaattggcattgctcaaatttgctggtgcggcgttttgcggtgcggcattggtgacctttgctggagtgcatttagcaattgttgaagctgttgcgcgtccatggtccaattgaagaaaaactgcacacggcagactttaatctcacacggagagaaaagtttttgatgatctgcgaaaattagaaatcaacacgagctttctaattttccactacgagcaatatcagcacgaaataaagctcggatttgttgctttgccggtgatgtgcagttaattgctgactgcgccaaaatttgttatgtccgaagataacaaattaaataagtttatttgccgaaaaaaataaaataataaaaatgcagagaattaaattgggaggtcaaaattggtgggcacaataacaactgaatgaggggaatcggagggggaagatgacgaagtggcgttgggtcatacacctaatcaataattacttccttctctaacaaaaatatttgaatattcgtaattttttcctttttatcttttattaagatgaaaaatttactaaaaaaaaaatttaaattttggccgcgtaaatctgtcactaaattgtaccaaaatttatgccctgcggcgccaacaaactacgcctgcctcacaatgctttcaatttttaattttgttctaaaaacctcctttttagcactatttacatgaaacctttaataataatttctgtaaaaaatcctcaaatgatcgaatttactatgaaaatcgtgagaagaaaaaaaatccaaacaaataaactttaaatttattaacttagaggcgaaaaaaatgaataaaaagcgaagttttcgctttttgcttatttttgacataaaattaaattttttaaattcaaattgcagttgaatttgaactaaaatcaaatatttggagaaaaatgggaagaaaagaacttattaaagtaataaagaagaggaaaaaagagaacactacacatttaaagataaaatcaagcaaaacgagagaaaattttctaaaaacaatggaataaaattgaaagaaaaattgtgttaaattggggaaaaatcgaaaatatatttataaatggatcaaagaattaggaattattcaaaaaataatttataaaactacaaatcaaaacggatgaacaaaaaagtgaaattgttcaaaaatttatagtgttgaaaaataattataagcaaagaaagaaaatattctgcaaaaaatggaatcaaatttatgga

SEQ ID NO: 17470 - DNA, 1484 bp, Heterodera glycines
gaaataatatttattaatttccataataatatttgtcttcctttgtatattttttatttattttatcagaaattttgtctataattattttttttttcttgaaattttaaaattttttattacttttttgttttccaaaacatcttttttcacgtcgctcttttctaaagacttaaggagaaagggtacggcgtccggcggtgccgataggcgccgccgggaaaattttgaaaatttggttagatctgttaacagattttgtccaaaatatgctaaatttttgcgattttgagccaatttttttaataaggtttatgactttttgggccctgtgatgccgataggcagcgctaaattttggaattaagctctattttctaagatttttcaccaaaaaaatttatgaatttcggtaaatttttgtttttcttcgatatgtattttgtcaaaatatgccaagattggtcgatttctatgagtatttaatttaaaaaaaaacaatttgtcacaaagaaaataattaaagaagaaaacgtcaaacggtatcgaaatcacgacagaaagtaatgtcatggcactaacctctacaccacattccaaatgtccaaaattgagcaaatcttctttatttaataaaaatttggcaaatggttaaaaaaattcaaatttcgtctaacttttttgcattttctcccacgaaaatgccattcttaggggtgtatatttaaccccgaccccgatcggggttaagggtcggggttgtcggggtatgaagcgtcggggttcggggtcggggttttccccgaaaatggccaaaaatgtcgggggtcggggtcggggcggggtcggggttgcaaccctatgaataacaacaagtcccaagtcttgtgcccattctttcgcttcttgaattagtttttcaatttcaacttttgccaaatgttttttaatgtccatcgcataatctcttattgtgtatgtgccttaatttgagtaatttataggtgtattaaaatgtttggtaatataaaatgattattttaataaaattcaatcagattttgttttgaatgggtgaattaccctttaaattataattgaaaagcacaaaacttagcttataattggtgagatttcggttaattaatttattaaagcttttttatttttattaaatattccttaaaattatcacctgctgaacctgatgaacttgcttctttttcagttgattcatttttgggaggtgctgtgtcaatagaatataaagacaaaatacaaatgaaaaaaatttgtgaaaatatctcagttctcattgtctctcaatgttatgaataagcctggaattttttaatttacaataatacattatatgtttttaaattatcctcttttataatttttaatgcgaaggaatgcaataaaaacatttccggagggagtaatggataaaattatatgtttacaattataaaatgaaaaaa

SEQ ID NO: 17471 - DNA, 913 bp, Heterodera glycines
acatttgaaacaaactttttgcacttaatgccaaacagttggccgtcatgaacatttatattttaaagtttttacacttattgccaaacattaacccaaacttttatcttttactttttacacttactgccaaacatttgcaccaatattcatcatcaattttctataaatgtttgggtaaaatgtttggcagtgagtttaaaaagttgaattgataaatgtttgggtcaaatgtttggcagtaagtttaaaaagttgaattgataaatgttttggtcaaatgtttgtttcaaatgttgggttataaaatgtaattgataaattgttttggtcaatttttgttcaataattgtaaaaggttttttgtaataagtaaatatttaaccaaatgtttggtagtgcatgtaaatgtttgggccaaatgtttggcagtaagtttaaaaagttgaattgataaatgtttgggtaaaatgcttggcaataagtgtaaaaagttgaattgataaatgtttgggtcaaatgtttggctgtaagtgcaaaaagtctaatgataaatgtttgggtaaaatgcttggcaataagtgtaaaaagttgaaaacataaatgtttaggtcaataaaatatttgggtcaaacaatttttcgtacttgcaaaatttttagtgttttgttcatttaccttcaataaacaagatttgatgattaaaacatttataatttactaaacttttcacacttaatgccaaacatttaacccaaacatttatcattttacacttactgccaaacatttgaccttatttaaagtttttacacttactgccaaacatttaactcaaacatttatattataaccagggaacgggtttatatgtttttacatatttttttgcgcatatgctatcgcatgaaag

SEQ ID NO: 17472 - DNA, 3493 bp, Heterodera glycines
  unsure (1)..(3493): unsure at all n locations
atctaagaattttttcttgaaaaatttctgtttggaaaatttttcgaaaaaacagtatacccctcaagcctccataaaatttaaattttgttttcaaaatttaaactcacatcattgcctccccgaagccatttcagatctttctccgcctgatctttccttccttggacaatcaaactgtattttggcgactcagggcaaaatggaagtgcgcacaattggaacaacacgggcacctgaaatttaataggaatggaaaaataaaataatcatacatgaacaaggggtgcgccaagcccaatttttcgtacgaaggtccaaatttttctccggtgacgaccttttttttgctattcaaagcaccttttttgcgcggcgcgttttttcaaaaaacttttaggcgaggtggtggcgggcgggccgggaaatttttaaaaatatgcccaaaagccactaatgcattaaaatatggcataaatttggcacataatccctcaaaagacatattatataatctcaaccctggattagacataatttttctacatttaccagagtaaacgcaaaaatcagtggccaaagatttgcagagccaaaaatttgtggaagcccaataatttgtgaagcgagaattgcgatggtaataaacaattggtgaagcgagccgatggagccacgcaaattgtttggtgaaatttccatcaaatacattggagacagtccgctgttgaaccctacaaatttttaaaaatgggttttataatttaaaattttaatgaaaatttaaattacaaaaaaaaaaaattcgtggttaattttaaaaaatttaaattttattcaattttcaaaaagttatggcagtttttgcatcatttttagtcacaactttatgaaaactgaatgaaattttctgaaaatttttatgctagtagaaaaaaacaatgagctatttcgtttaatcccagattttatttattgtttttgattaaatttcatttattttttcaataaaaattcaaataattacgcttatattattaatttaacaaaatattttcgtcatacacatacatacccgtgttcagtccaataatgaatcgtccaatggtgatcaaataataaacattcacatattttgccagtgtcatcagtgccgcagcaatgatcgccaaaatattgttgtacagaagtgatttacggcgccctaatttgtccgcaacagtgccaaccataatgccaccaaacattccgccaacggcaataatgccgaccgcaagtgccctggacaattaattcataattaattgaattcatttctcgaataataatgacaatttttcaaagaattaattagtatattgttttagaaaactccgatagtcaatttttaccatgtcgagtccatctcttccactgttgtcgaaacccctgtcatgttcgtgtacgattcagagatccattctttgattatgtcccctggaaaatttaaaaaggaaatgttagagatttgaggtgaagaaaaattctagttttttaaatctaaaatttaaaaaaattaaaattttttgtttcaaaattttcaaaaaatgcaaaaactaagaatttcaaatgagtcttgttttgcaacaaatgcatcataaaaggcagtaaaatccgaacctggaatattgatgcagccaatgtgatagcccatttggaatgaactgccgaaagctaccacaaaaacagcaaatgccaaaatgccggtgagtcggccctgcgtatagcaagaaaatgaagagttcgaaattcaaatgaccaagaaacaaaatgatacgaccaaaaaattgaagacggttaaatttggtcaaattcatgtgttaattggtactgaaatgcccgacaaattcaaaacgggtccgttttgcgtatatttttaaaggacgaaatccgactcgtattgtttttcgacttttatcaaaagcgacaaaattaaaaaaaaaattgttaatccttttattttttttctaacataataaacttgaattgtgcttttagaaagagaagattaaggcttaatcgattgaataatgccaaaaatgtttaaaacaggcgatttttacaaaagttatggtcatttttgtcgaaaaacagtacgagtcgggacaggacgagttggatttttatcattttgaaatcatcccaaaacttcaacccactaccacgaatgaactcatccaaattttgcttgccaacacgtgccttgaccggtggcggcgctcgcttggacccatccggctcggtcgtggtctccacaaggccctcctttgctttgctgatcaacttctcacgctgctcctggtcccgagtggacaccactttgtccaagttcgtctcggccattgcaccgtaattgatgcttgtggtgttactgttttcgttggatggcaaaaaattggtcgtcagaatgaattggttgttttcaggtggtttttgctggaaaaaataaatcaaaaacaaattagcaaaatttgggggaggatggcgatatgaaaatgcaacaaatattattattggagtgcaacaaatataattgcttttaatgagtgcgggagggggagtgataaattattggacgatttgcgatcacaaagttaggtggggtgggtcaacaaatgctccccctttttgttgataggaagacacaaaaccgaaaactgttggggctggctgataagtgatgataacaaaaatcaaagtgcggaaaaattgctagcattttttttttggtttttttttttaattttttttggttggttacactttatgtacgctgatgcattattgagttctttctctctgtgtttgtcattgaaatgggacgagaatttctgtcactgaaaacgagctctccctcgtatgattctctttttcgctaaaccaaaaaagtggggggggggggagcaaaaaatggaacttcaattatcttcaagtaaaaaaggagaagatcgttttaaataagggaaggggctaagaaatttcagatcctgttcttaattcattgaaaaaatgaatggttagcaaagagggctaacaaaatggtcgtaaaatctattcaaaaaatgaaaacatagaaaatttccatgtatcacatatttagggacaagtgaattcacactgatgagctttcctcagcactagtgtaagccttaaaatgagaccagaaaagagcggacaaagttaagggaaacaacatcaaacccatcagtggatgaaatcaagggagcaaagtttgttgatcagaaaactgaaaaataaagaaaatccccaacacgtgactccaccatcttatgatgatgatgggggagagggataaggataaagcaatgtgagaggatgggaatggatgatgatggatgagaaaggacggcaatgtggcaggataaagtgaaattacatagggaatcngataaatagtgctttactgcagtttacgcgtccaaccatgatcatc

SEQ ID NO: 17473 - DNA, 2914 bp, Heterodera glycines
  unsure (1)..(2914): unsure at all n locations
cctggttcacattgggttgccgtgtattgcgagcatcaaaatncgggtggaatactacgattcgacaggaatttggccaccgctaagccctttcatccaaaaatttttaaagagttttgctcaaattcagtttcatcaactttcgctccaagcaccatactcacactcatgtgggaagcatgtgattttctttatatttggacggtgtatggggatgcactttgaagcaattttgcaactgctaaaacgcgcaaaaatatcaccagatttttttgtaaacaaatttatgcaaaaaaatgtgtttaaacaaatataaataactagaaaactcaatttaaaaagcgcaaaaaaaaaaagaaagaaaaatgcacgttgatttcgatccttttaaagttgaatggtcagcattaactcaaatttctccagaagtagtcgtccaatacggtggttataatgtgttcagaggggttccatacccgcgcggtagtggtatcgggtctgtttttaggagtctattgcgttacctaataccaatcgggaaagaaatcgggacagccatcgggcgccaaggacttgaatctggaaatcgagttctatccaatgtattagagggtagggacctcaaagagtcacttgttagtgagggaaaaacggggctcaaaaatttgctagagaaagcagccaacaacataaatgcccaaaaaggtcaagggttcgacttcaaacgatacacaaagagaaatgatgcaagagaaggtggtgcaattggtaaagcgaaaaaaggtataaataaactacaatcaaggttgggaccacacgatttcctaccagcaaacaccccagcaggtcggaagaaaaaacacactaaacagaaatcggtcaaacgccttcgtaccgatatacttggaacctattaataaaacaaccccccagaagcacaatcatgagttgttcacaaaaaattagcgaaagtagtccccttgccacaaatagtgctttgaacattttttcagtacctccaacaaatgtgtcggttgtgcgctcatatttccgtgaagtcctccccctagtgacaataacgcaagaatctccgtatctttttcgcctgtacagtgacaatctttggaccgatctttcccggatttatctcttccttgacctttcaatagaaaaaccggatgtggacggcaactgggtgtcaatcgcagctaccgatgctcaagtcggcaccattcagggaattggttaaacatttgttcaacaactaaaagtctcagttggaaacactgaaatttacgacagcggaaatttgtacccatataaggtttacattacgaacacactttcgtttccgatgaacgtcaaaaaaagcttcctcgcttcaactggtcactatgcgacacgcacacacgacagcgtcgctgacgagggctttaaagctcggtgtaaaatttttgagggtgggaagcgagcccaatttctttcacgtctggactttgacctgggaaaccaataactttatttgttgaacaatttggatcttttatttacaatttacaaagctcgtgacactttcatcatgcagacattgaaagcaaacgatactaccaaataccgcgttagagtccatgacgtaaaactgtatgctaaaatgattgatgttcagtcatctttgaatttaagcatctacaaaacgcttgaaaaacaaccagccacatatgcagtgcgaaaaactgaaatcaaatcatgctttataagtgaaggtaggtttgaaattgactacaatgtattcagtgcaacaattcctcgacgtatgacaatcgcacttgtcgcaaacggggcatttaacggaaattatgctatctctccatttaattttaaaccgtttgacatacgagacattgcagtgtacgctggcggcatgatttacccaattgttccatacaagcttgactttgccaaagatatttttgtccgtccttttgttgacatgtatgagggaggcacttggcatggctaattcagagcgttctttcgacatcacaaaagagcaattcaaatctggttggaccttttttgtaattccactcacatcgacgctcgacgatagcacagggtatgaactcttaagaagcgggacaactagcattcgcgcaacatttaatagtgcaattcctgagggcggagttgaaatgatagtgctgggtgaatttgaccaaatgataatgatagactacaaccgtcacattgtttccgattcaaagcttagttaattaactgtataaataagatgcataatgcgaaaaaatgccaccataaaaatgaccttcttaaacactacagtcaacgccagtttaaagccagagatacaagtactaacatttgaaaacaaaagcgttcatcctaacctcctcgtgcaacttctattgcttgcccattatctcattgcttttcccgttttcattttatgctggtattctttgataaattttcttaagagaagaggacatatttctcagcgtgatgccaatgagatgatggatgatttgcgaaattaccaattaccaaaaaattcatcagttatttttccaacgccccccccccgattcccgcccttcaaaattttgaaaaataaataaaataataggagactcagaattttgaaaattttttataaaaactgatgacaagctaatgtgataaaacaggttaattcttttcctttcagtatccctgcaaagtttggggcgcttctgatcagtttctgaaaaaaaagttaagcctaaactttttggcctgtttaaaaaggaattaaaaatttttaaaaattttattcatctccctttttgatagaaaaagcatcagagtgcctaaactaacatgtaaataaaatttggtgcgtttcagaagacct

SEQ ID NO: 17474 - DNA, 967 bp, Heterodera glycines
gtcaacgccagtttaagccagagatacaagtactaacatttgaacacaaaagcgttcattctaccctcctcgtgcaacttctattgcttgcccactatctcattgcttttcccgttttcattttatgctggtattctttgataaattttcttaagagaagaggacatatttctcagcgtgatgccaatgagatgatggatgatttgcgaaattatcaattaccaaaaaattcatcaattatttttccaagtttatcaataaagaaatgattaacgcacaaatattcaatttttttcacatgatcccctttcagccttgatgaagatcaaaactaaatttaggagtgcttttccttcttttgaaaaattagggttacgtgacaaacgcatatgggccaagcttttccaacaacgttaattgaggagagttgacgatccaccactcggatagagccaactgcaaatctctctgtgctcattacgaaaaattgtcaacgtgcaatcctgtctcatggtgaattcacgaagaaaaaacaaaattgcaatcacatcaagaccattttggagtttgtgtctcatcatcttcaacaataaaatgcatttttaatggatttttaaaaaagtaaaagacatgctcaatcttttttttaaaagctcacaacaaatgaatcatttttctctttcattctctatcaatttttcttggctttcttggttgcaatctcatcaacatcatttttttcttttggcacatcactgtcatcattccctgggcacttcttgaaaaggttgacaatccaatcaaatccagtgtacgtctgattgttcgcctagggcgtggtttgtcaaatacataataaatatcaacaaaaaaccttaatgttaacttttgcgatcagcttcacagcaatcaaatcgtccaagtgaaaggaaggctttccggctccttctccttggcgagcaattca

SEQ ID NO: 17475 - DNA, 3003 bp, Heterodera glycines
gaaatatgagacgagaaatcaacaaaatctcgagattctgttcattttttagtttttctttcgtgcattgctaaagacaaaattggtggaaagtcgcgagggttgcgaatggacgcgttgtggcaggacggaccgcggagtgtccgcttttcgacaggtggcggccgttactgtcaggtggggacggagcggcaaaggctttgtggatctattgcagtttattcgaccataaataacacgacacaaatgacagaacattcaaatttaaaataatgttgaattcgaaggctaactcttagatagctattttattctgtcaaaattaggtcgacggatgtgtcttcgtttgacagtttttggagtgagggaaatgcggagagaaaagacagaatcacttccaccgtcgaattgtcctacgtaaaaatgtgaggatctacaaatttcggacttctttcaaacttaaggctcaacggcgttcttccccattccgtccgtgttctcgcctttgccccggtccgcaggggtttcaggtaccgttttcgccctttttctattccttcgttcggtcttttcagtgctcggttcaattgcgttcagcgtgagtacacttacatttttccgcgtactgccattgccgacctttccgtctgtcctctccaaatgatttctcaatttgttgcctaattaagtggctaaacgatgcttgcgcgcgactctgtggcacccacgactttcggaacttttgtcacatcgatcggaatgagaagagattggccacttcatacgtcagaacaattaaggaggctcgagtggaccaattagggtgaaaagtgaatttattttaatgatttacattaattcgccattttaaagaaagggtaaaatgaatttcagcagttcgtctcacgtcgcttcccttgtcccctcaacgtctgctgaactgtccgattcgttccaattgttgagattgaccgtcaaggccaatggttttctttggcaccaaatccgttgcatcgtttccctcctttgggagatcgcttgcggcaatgaggagcccgaggcagattttcattttaagtcaaatcttagaaacaacaataatttaatttagctgatcgacgatttgtttgacattgagaaatttcctgctaggtattttccttttttttattaattaaaaacacaattaagaggaatgttccgatttgtttaggcctcagtacaaaatggccaacgaattgccattgtgtctgttcgactgtactttcgacgaaccgattgattggaagttcgatttcattgcgttgggttcagtcgtaaatacccttcagaaaaaatgggctgaacatcagataaagttagtttcggccggtttcatgcgcccatgacattttacgcgttccataaatggcacatgaaatgctgtaggacgtgtaaaatgtggcatgggatgcgtaaaactgaccagtgccttaatttctgacaaaagcgtgttcataaagttcctttattagagcggcaaacattaaagaaatgttggatggacttaattttcacatggcaaattcgcccaatggattggatgagtttgtgcgcaccgaacccaccccgaaggtgccccgccatattttgctcacattttataatttttcagaaattcattcccatacgaaaacgttcactttgcgagggattggaagaacgaagacgaaaagcacaaaagaaaaagctaaaaatgggaggaacggatggaaaaggggcaaacaacgaaggataacaattaatctatgccttttgaatgtgttcttgttaccgtaaatatttatagaactttgtccataagtataatacaattagttggaatgctcgtctatcttatttccttttatgcatcatcggcaacattttccgcgtcgtttccgttccgcatgtgtttcatcttcgtccgcaattctaaggctccgcctcgacccgtaatgccgttggaaaggagtcgtgccgattccatcggtgtcttccgtctcttcggaagatttatttaacatttctaaatgataatctttttaaatgaatgcaaaacacatcatccggaaaatgtgtttctgtaccgaaaagatttgcgtgtatggctgagtggtttttgtaagataaaaagagaaaaggctacgattcgaaccccctccacgaaatggatattttttaagcgattttctaaaattatttttgagggctattgccaaaaatttattcaactcgaaaccagtggctctgggaccccctgggggaagtgcaggggaaaagataccccactaaaaataaagtcaaattgctaccaattgccaacttcgagaacagttcgctgaccccttcgttggttttggctgagcactcacagaaattggctccgatggattgagaatacctcaaaaagtcagaataaaatttttgcctattattgggtgatagtttttgtaaaagacataatttttggtaaaaatatatacaaatccataaattttgaagaatttcctggctttgcctaatggcaccaccggacttcatttttcgctaaaaaaatggtaagaaaatttctgccatcgataaacaaaattttttttttttggtccactcactctttggcctcttcctttggcaccgttctgtgccgtgccaaatcgattttgttgccaattatgaaaatgacgactttatctgccaacatacttctcagttccttcacccaatttttgacacggtcgaacgatttttggtcggaaatgtcatagacgagaagggcacctgaaaagggagggacttgggtgaaataggcaagcaaagtttggcggcaatcattaagaattggtgtcccgacgaaaaaaaatgttaaaaatttgtcgggtattttttctaggcttaaaaaatgcgctgatcacgaatctgagctcagattttgaaaatcattgatttttatctaagattttttgtcaactacttgattttttt

SEQ ID NO: 17476 - DNA, 1719 bp, Heterodera glycines
  unsure (1)..(1719): unsure at all n locations
gctttccctggtatttctattaaactcattaaaaaacacataaaaatgtgtgtggaagcatttggacatatnttatgtcaaaaagcgatgataccctgaagagcgcactagtcatgtttcgtttggcttatggtgcccttccccccgactgaccatattccacattgtccgcctgatgggcatgtgaaggccaaaaataagggagttgtattctgtagagggtattgtcttctctgacagcttgagaatggacgtcaattacgggaaaaaggtagccaaaatgaagcagaattgttgcaaaatgtagcctaaaaaagatattcgcagtgtaattagcgagttgaacagttatatgagtatcaaaccacaaaaacggaggggggggggtgaacaaataaccatggggggttaaaaaagccaagactttgagctgatgaccgaaaaagataaattaattacgcttcattggtgtcctccactgataagacttcttggatatgctgcaccaatgcctggccagtgatcgcttgaggtacagccacacggaaatatttgtgagtacgcaattgagccgattggacaattcgaacgaggacaaaatcaagctgaaagcaataaaaaggagttaagtaagtaacagtgaagcacactttttgaagaatgtgttgtcgggacgttgagacatacgtcacactgctcgacgacggcagtgaggtcatttgctgaagaaaagaaaggtaaactgtaataaagtcatgggagcaaaaataaataaaataaaaaactgcaatgaaagaataaatgatgaattaaaaaacactattcgagtgaattttttaaatattactgaaacgactttttggattgtagtgcactttaaacgtccaataatctcttaggcgtccagtgcttgtttgtgtttgctggatgtaatttttttcatattgtcagtttttggtttgataccaagaatgtaggtattgaccaagtaataaaaagttattgccaaagaaactgaacattggacccctaaaagttcattggacgcctaaagtgcactagagccacttttggttcggtttcagggaatttaaaatcaattaaaaaccggtcaaaaaaaaaaatatttttttataatttcgactttttatttgaattcgggttatggatccggaattgctgaaattaatgtctaattcgtgacaagcgaagaaaaatgtaaaccaaaagggtcctgcctgacccaaggagaatgtttggcattggaaagtgttatgtataaaggaagggatggggtaaaatgatgatagccggtgatgcaaaaggggaggggagatgaaagcgagtctggatgaaggctaaatgaatgccgtcaatggcagctattgaattgacgtgttgtacaccgtagctgagtaagtaaaaggataaggaaaaagggaaggggaaaagagccttcctttaccattcattacaagatcgatgatgtaaaagcggcgaaagcagcacaagcggcactcagtgactgctaacgcctagacatagcttccctttacacgtgccctttgcacacattttcttttcctcttcttggctttcatgaatgcttggatggacaaaaagaaatggaaagcatgctgaaacacacaagaagagtgaagggaaaggaaaagggaataagaagacgaagaaagtcctggaggaaatgaggaggaagaa

SEQ ID NO: 17477 - DNA, 2068 bp, Heterodera glycines
  unsure (1)..(2068): unsure at all n locations
ggatagcagttaattgtataaaaaaggggtatttcatttagtttcagaaaaatccagaaaaattctaaaaagaactcttagagctgctatctaatgatcccaaaatgttggatgcttctagaaccggttgtggggcgttggtttnttttatgatgttgggcgccgcgccgttttctcttttggggcgtagcnngnccttcgnccaggggttcccngttccgctggtcgctggtccggttgtctcgngcctctctgntgttctcgcgcccgcgnnntttcccggtgttttggcgctggtncttggtccgnncccggccctcntggcnctcggtggtgttcccgcggccctttggggggtggtcttgtccnncgcttcgccttgcgtttcgtggttttccgcttggttnggggtngggctgctcgctcttncctgcctgctcggnctgcgntgccntcgggttgggtctcctccggggtgtggttgctcgntctggtcgtgcgngtgcgctgggtntttgcttccntcggntgggcgtgcntgtgctnnngctcccgncgcgtgctcntcgncnnttntttttttccctttcngtgccgacaatttgngcnncctgcggtggtcttccctgctttttcttctcttncctttttnnnttctncgtgtagcatggcgctaagctttgcttctcgtgaggatgccattaacttttgcgagaaaaatcgctggtcctatattgtcgaagaaccaccggttggctttttttattgactatcatcttgatctggcttgttttagagccgtgaaatcaagccgaaggcttatggttccaatttttcatggaacaaacgcacgagagtcagcactaaatgaaccgataagaaacaatgaaatttagtgacttaactaataaattcctgtacatttacgcatttttcttttgaaaaaaagttgtattacattcactatttgattactttttccgttttagacgacttaaaatctgattaaaaaaaataaaacaaattattgtgtaaagacactgtacaagcatcatcaattcgttcattaaactccgaacaattaagaaaaatgagagctcaaaaaaatatggaaaataatgataggtacttgtatttggcgttttcagcatttttctatttcaaataatttgggttatttttttctgaaaagttcgaaatttagtcatctaaacggcaaaaaaaaaatccaatatttttcgtttttttatttttaaaatattttaaatgtctgctattaatgttcttgaagcgatgaatttattgaagccggaacaagtaactgtgcagaatttgctgattgaaaatggacaactcattgaaactgtggcggaatatcagcggatgggcaaaatcgttgtaagcgaattctttcgcgggtaatactgcagaattgggtccctccgaaaaataataaatttcttcggattggttaaattccccggcgacgctcatcgacacgctggacaacaaaatttccttaaacttcagaatttaccaaattttcttgcggagtccagaacccatctctctcccgtccttacaattaatttctgccctggtattaaatgttgagccaattcattaaaggaagcgactaaataccaggagcgactgcacagaaatctcatttatttggcaaaactggctgattcgacatgttcttctcaccttttactggtgattaagttagacaaaactgtacttttcctttttgctcatacatccaaaacttaaaaaaggttgtcaattttggcgcgaggatttttgatgtaaaaaagggaaagtaccgaccaaacatagtcagtacctgttaaattggacattcagtaccattttttatcaataaaagggctacatgacatttcgcctactaacccaaaaacattcatttcgcctactaattagtaggcaaaatgaatgtttttggcttagtaggcgaaatgaatttttttgggttagtaggcgaaatgtcagtaggcgagatgtcggtagccgagatgtcgagtaggcgaaatgtccgtacacc

SEQ ID NO: 17478 - DNA, 3728 bp, Heterodera glycines
tggaaaatggtggcatcggtgggatttgttcagaattcgccctcggctttggtcaaagtgagagctacgctactgaattctattatgacgaaaagctcgaaattgctttggccagtgaatataagcaaaaattcttttgccaaaatgacaacgaatcgttgccaactgctgaagtgatcgaccaaattctgctgttgactttttcactcgcactgcgcttacaatttaatgcaatgtcagcattttgttttaaatttaaaaattaaatatttaaataaacattatttagatttgctatttatccaatgtttgacatttttcactccaatgaaattaagcattggcaagtccgaacccttttgactgcgtataaacaattatcaaatgctaaaggcatcactgaacatgggtaattaagcaaattaattaaatattaattacattaattttgggatatttagcgtttttccttttaaactttcccaactttcggatgacaaaaaatatgcttattggttgttaacatttattgaggaggaacaaccgacgaataaacaatacattggtatgaaaataagagaaattaatttccttgtaaatttcagaaaatttcaatttcatcataaaaatttccgaattttcattgtctcctttcgatgtttacaaagtgctcgaggcaattctatcgaatgttaatgaaaaggaaaatactgtgcataaaaatggatcagcagaagtgccaaaactgtacgaatttgtgagagaatatttcaatgccaaattaaacagtgaaaaagcatcaaattctcccaaaagtccttctttatccattgattgtgtgctcgtccatttgggctatcaattgcaaatgaatgcttaccaaaaattcagagaattaacggagaaacaccaaagaaatacaaatgggtgtgcaaaatggagcaaggacattttggaaattgttgatctctatgagtttggggaaggattgggatacaggtaaaatgaagaacaacgaaaagaacggaagaaattgagggggaaaagaaaagccattttataggacatttgttcgctgatgtgacgaagttacaaaagtatcaatgacagtaatatttaaattaatattatttaaattttatttgcagaaaatgatcatagtcataaaatagcaaaagctaatttaattaatcaatcatggtattgaaaggagctctacatcgcctctattatcttatttaatcttgcaaaaatttacaaaaagttgtaaccaaagaatttttttaaatttaacagaagaatagagaaacctgttctatctaatcacataaagaaattaaaattagttgtttctgaaaaagttactaaggaattaaatgtgttatatgtttatggtcatacaaaaatgtcaaatcgtttaaatgcgtgaaaattgttcaacaactcttaatatgattagatagaggaaagatttctccattattctgtaaatttcaaaattttattgaattttaaaaaggaaaaattatttagtctaatttttcgaatttttttcgttacaacttttgtaaaaaattttgctagctttttaaaaaatacatacgataggaggacatagagctaactatcttccaataccaagattattaattagattaagtttggctaggtatgtttattttctgaaataaaaaagtaataattaaacttagatattattatcattgatacttttgtaacttcggctcaccacgcattattcattcaacgataataaacccaattggaaaaattcatttttcagctttcacatataatgttcaccattttaggatgtgctcgactgaaaaaagataaatcttagagaaaaaaaattttaagattttcaatattagacatcctccagaaaatggcaatttattcatgtttggtttagaattgcaccagttgagttagaattgttcaacgagccaatacaaaattatgcgaatgcaattgaaattgacacacatcagtgcagaggttaaatacattcgaatttgtaatttgagacttaaaataagctcttctcgagaccaaagccccagcaccggaagagataactaattacccccttaatgactgacatttgtccaaatgagtggcagagaaaataaaaaaatagactgacttaattattttgagtgaggtgagtaaaatatttccttggttttatttagcattgactcaatttgccaacgacgcattggacaaaatggtcaaagaaaacatcgacaaaaatgagcattttgatcgattacaaattgtccttcaaattctatctgaaatgaaagacacggaaaattatgaaaaacttaaaaaattattggaaaattttgaacaaaaaattgcaaacgaaaagaataaatcgttgctaaaagagccaacgaaatttctaaggcagttaattggggaatacagctgcaagggttattgtacacagatcaacggaagagggaaacgtgacttcggttccggtcttatgatgttagtcaaaatcccataaaatgaaattttatgatataattttgctcaaaatcaccaaaattttaattctttatatcattgggtaaatagagagagaacactagggctatcgaattttacgaagattttaaaagttgattgcttttgagcgaatttatgaataaatttttgtgaaaatatttgcattcgaaggtttttgactaatgtcccatccaattactacagatcggtgaacaaaataatgccaatatttggacaaattttgatcgaagccctcaaaaaatcatatggtcaaacagtggaatataatgtgaaggaacaaaaactgtcatttccatcggaattgggcgaacatttgctgggacgactcgacgaaatgatcaaaatgttcgaaaagtaaatgataattaaatttatttgatttttgaattttcaacagggcttcctcaatttcgtcgtcagttggccaaattggccatgaattggactttttcaaaacaatccataacatcgcatcagcggacaacattttaggagcttaatataaagcgcagcaagtcaattccggccaaagtgaatggccaacttttcgaattgcttttgtccttggccattcgcctgacaatgcaaattgaaaatgatgagaaaaaattggcgaggaaatatttggaaacattccttcgtacttatcaaagtattgaaaaatcggagccacattttattgatgggtaattaattatttaattgcattttacgacgatttaacattttttgttttagtatatttcaattgcaaatgaattactcacataaaatgatagaaattcatacgacaaattggcatttgccatattatatgcaggagaaaaatatggagaaattaaaacaaaaaaatgcctatggtaacggattttttacttttatatttcgaaaataataaataaataaataatttaaatttggtgtttgtcagagaacttccaatttcttcttttgctgtccaattactctacaaatttttatgaacttttgatgattgcgaagaaacttagccaaatggagaaaaatcaaattttaattgataaaaaagacccaaaattttttgttgacattttaaatcatttgagaggtcaaaacaaatctgatcgaatttttaaagttgaaagcgaattttgccttttggcatttattgttagagattt

SEQ ID NO: 17479 - DNA, 3077 bp, Heterodera glycines
atgattttcattggcggcttcgcttctttgctcaattggttatatcttcgctttttgacctcctcttgtgatggaattcttcgctttggcatttttatggaaaaaaacaaaaggcattaaattacaaaaaaaagtgaatttgtcgaaagaaaaaggtgtcatttatttaattgataagattaattattagcgttatgttaaagtttgtttaatgataccaatcaaataaatgttcacactttcattttatttttttttcggattttctttggcatttttaaagatactaaaaaagagaaaaaaagcgcccgtgatagagcataacaattgtttagggggaacaaaagtcgtaatttgagccaaaatgtcatcgaaatgatcatcgttatgccctttgcagtcttcgcgcctaaggaattcgcacaaatatgaatcaaacactttttttaaatgtggaggtgtggccgcacaaccgaaaagtacctttttaaatgccattgtgcgtctcctaacaaataagcgatttcaaatgccaaaatttaagaattaattattagcaattttattcagttgtgttgcacaattaatttggtgtgtcatcattagaggacactgagcgaacggagaaggaaaagagtgcctaattgaggggaaagcgaaaagggacaacaaagggacaaagaaaagagatgaaatgggaagggaagggacaatcggagaaggacggacggaaaaaagaatcgaatgccaaaatcgaatcgatcccaaaatcggatggacatttctccgcctctcccatcgccgccacctccgccccattcgacccgccggatgtttctggggtcgtctgatcgttgatcggcccaccactgccatcttagcgccgggtgccgtcctcgaagaacactcctccgtcgatggcgcagtatttggggcagattcccttttctccggatgtgccggggggtccaggaggcccggcagggccaggctgtccgtctgcgccgggcgcaccgtcgggtccggccggtcccttcggtcccggggggccgggaggaccgtccgcgccgggggcgccagggggcccgggaggtccagggggacctgaaaagcgggttaattttgtgggcaagacatgcgttcaccttggtctccttgctctccagtctctccaggaactggtgcttctggggtcgccggcactcccggctcgccgggaggtccctgtggtcccgcttctccggggggtccaggagggccgcgtggtccaggctcgccattgggcgcatctgagccaggtcgtcctggagttccagcttctccgggctctcctggaggtccaggtggtccaggagggccgggcggtccctgggggcatggcttgcatgggggaggcgtcgtgggctcgcatggcgcgtttggcggtttgccgggcgtgccggggtttcctggtgctccaggcttcccgggtttgccgggtcttcccggtggtccctgcgggccgggctggccgggcagacagcagtcaccgcacgccggggccgcgttcaccacggggccgtagccaccgccagtttgacgagcagttcggttggacctcatgtccatgtcgggcgtcgacttcatatggttcacctccacgtaaatgtccttggctgagccctggagaataaaacgaaatgaacacagaatgccaatgtcaaaatgccaaatgccaattccaacggcaatccaattccaatgccattggaaatatgccagtgccaacccccaaaagcatttggcaccaattccctcttccctcccaaccttgcaaaagccgagctcgtgctgcatctgtcgccgaacgtgggctacgtaattgtacaccatgggcagagtgaccacaacagagagaacggccacgatggagaaagtgacggccgaataggcaacgaatttgtacgcccgaatgcgactgtccgactcggtcattttctctgctgatggctaaaccgaacaataaacacaaactaatcagcaatgatttgatcgcttttggaaataagaaacatttaatgggcggttttatcagatcaaatcagcggagggattcttccgccggtggtaattctgcgtgaatggacagcgaaaacgagaagcagtggctaataaccggggttaaatgggggggggggggcgtccgacgtggcggatccatcccgtttttttttgttggtctgacgaaagcacgcgaaagtgaagccaaaatgaatgccctcctcctcctctgtaccctcggacattgtcacctcgccgactgatcatcgccgatcagtcaccgatctttgaatcagtgattgatgcattgggggacatgcctttccgtccctttgccgtcctttcgctttgcttttcctttctttgcttttcgtttgttttgtctgattgatggactgctttgtcagctgaccttcagcagctttcgaaaaaagccgaacaatttgtctcggaattcatctcgcaaatcattccccgctggtcggaaaaggttttgcaggcaaaggacgaaaaaagtgacgggaaagagacgccccacccaaacagtgaaggaatgggcgcggaagagaagatccggcatggcagggcgaaagccaaaaagaaaaaggatggcatttttggaagggatggaaaaagaagagggaatggcatggcatgccaagggatgagggaacatcggcacatacaaaggcatgaaccatcagaacgccataaaaggcacggcactatatggcaccagaagcacgtatgaaaagcatggcaccttctccccgaagccctcccccttacgcctcgcaccctttgcttttgctgttctccgtttggactattaataaattattttgagagcaatgggaacggagagggggggggggggtgaatttgggggagtaataaacgcatttatgactaaatgaatgtgctgcttttaggcaaatcactaggttaagtacccgggcaacaagaagcattccctggaggggagcagaggcaaaaaacaccatacttacgaagggggcggggaggggagaagaagc

SEQ ID NO: 17480 - DNA, 1393 bp, Heterodera glycines
tttcccggcggcgcctatcggcaccgccggccccctgtttccaaaatttttttggaaaaaccgcgccgaaagaaaactgttttttgaaaagcaaagaaaaaaaagtcttcggcggccgaccccctttcgcaaaaattttggccgatccacccctcttttttatgtatgataccgaattcactcgcaggtgtacagcaagatcgctgttgcacttcaccatttgcgcatgccaactctcgcggcaattattggccaaatgcgtgccgacatttcaccccatctcgacatggttgagcatttgttgcgcaacacacccctaacggtggacgcggggcacgcctatttcccactgattgccgacattcacctcatggagaggatggccggtcaatttgccaaaaccaaactaattggtcatgccattacatttattttcagcagcctatgaaaagttcgaactgccactctatttgcaggctttggtaagtgtttccaccagccattgggccgtttgttgttcagtttggccttttacttgggaaattgccgttttagttggaactaatgccaacccgtgcggtgaatgtgaataattcaccggtgattttggaacgcgaaggtgttcgacgtcgtcagcgttttatcgaaattgtgtttagacaatttggggaacaatgttaactgtgtctttccaaattgttttaacaaaattcagagcttatcccggtgggggcggtgcaatttacggttttgaaaatttgtctattttccgagatttaaatgatacatccctgaaaactcatttgttcttgttttggtctctttttttttgttaattgccattttctcacatttgtctcgccttccttcgttttccgattcaaataaaatctttttttaattcaagtttttcataaaaatcgaaaatttgcatttttttttaattttcccacgggaaatgatgcgtggacggggatgaaagtagtgcacccactgtaattcctaaagggtgtcaatgtcatcttcgggttaagttgagttaatgagtgctttcattttaagcattgggcgtgaaaagccaataatgccctcccctctccgccgcttcggaatgcgagtgcctttctttcccctttcgtcctcttccattttctctcgtcgaaaaagactttaaaaaaactgttaattatcctccctgaaaggataatagcttcgacctttcaattctgaaagtaatttctgtccttttctctgccaattttgagttgggaatgactgagtaaataaacggagggtttgaaaggcttcttcgtatatataaaccaataatttctctcttcattcctttttgcggcctttttccaaacacttctttttacatgttaaattaatt

SEQ ID NO: 17481 - DNA, 555 bp, Heterodera glycines
agtgagggaggatgtatggtcatagagaggggtcgggagggttgggagagggacagccatcggaggggagaggcgacttgaggaaaaaaggagtgggggggggtttggttcggacgagtgataaattgactacggttgatgaccgggtgcctatttcacgccttgtcgggactgggaatgccttttgccgttctctgatgccgccccctcccggccaatttgcattccctaaggactttcccaaattgggcattcggcgcatcatttcattcatatccattgaatgacataatttttccatgaaaaatacagccattttcagttctttggaattctttattcaccaatggacgatggattcggtgaggaaagcaacgccaagggattggagcagtgcattggggaaacaccgaagaccatcgagccggagccggtcagttgtacttggcggaaagcgggaaaacccaaaacgggaggggggggaaaggaccgttcgaccccgaaagcacttccacaaagaggtgtctgatcacccttttaatttgaatcgatcaa

SEQ ID NO: 17482 - DNA, 1489 bp, Heterodera glycines
cgtcgtttattcatatttgcataatcctccacattttatcgattccctccctttttctgatccattcgttctgatcagcacatcactatcgttttcaattgactgtccatgcccaaaatgatcggcggaagcattttcgcggcgggcgtcggctgaaggtccatgcgcgagaggagggcacaattctgaaaattggcacagacccgtaaagcggtgcttttccattggctgacctcccctggcggagattcgccccagcaaatgtgacggatcagcaagtacggctccaactcgcccatttcccactcgtcctttgtttctttcagttcaaaaacgccgtcccctttcgaagatttcgtctcccccaaaaggtcgtctttgtcaatgaagccaaataaattggctaaagtgactgggcggttaagttttattaaagaattccattatatttgacaattataaattataagtaacatgaccatccgcttcccaaagttggatgaccgcctcgttgcgatacggcttctccattccctcgcggtaacggcacttcaaagtgccattgatgcgaaatttgacgccaaaagcgcaatgaatggaaaagaaaaggaagaagcagaagcaaaacagcgaatttgagcagaacatttattaagcgagaagatggaggaggaaaaggaggagaacaatttaagaaagaatgacattaaacgacaaaattttggcttatgaaaaagcgctgattcattcaaaaaatgtcattgttcgtgcagcttagccttttgtgttcttttttcaattaaattgtgcaagtatttaaatcgctgatttgggcattacggtgttgaagcaatcgatggccaaaatgccatttgatcaccaatgatccaatcactgttcattgtcagagccaaccttaatgtatcattagcagtgccatttcttcaaggtatttcattcctttgtttttttcttcttttcattgtcccattcaatgctttgtcagtataatttcgacttttgcccaacacattttcgaggatttgcttttttaaatctttaatttaaatatccacctttttttggattacgcccattgctcatttctttgttaaaatgccatggaaacgcttgtgccgtgccatttttgctgaggtcagttaaaatcgccttatctgtgctaagagaaacatttgcaagtatttcaaaaaataaccaaagaattgtccttttttggcgaaaataaaagctttgactctccacaattataaccttatgttgttatttcgctcaaataaatttatatgccaaagcataaaatattttattgcttttcccaaagtgtcaattccaaccgcataatgtaaatttccccgcccctttccccgtgtgccgttctgttcacgcatgaataattgatgcgattgacactttgtcgcttatacccttggtgaaccattgttgaacagccttaactgctttttatttg

SEQ ID NO: 17483 - DNA, 1363 bp, Heterodera glycines
  unsure (1)..(1363): unsure at all n locations
cccccccaaatttaaaaataaataaatttcaaagaaaaatgggcaaattttttgaatttttcacaaatttttttatcatattcactaaatttccaaaaaaaatttgtaactccattgtaccattattttttgaaaatttgtcccccaaatgggaaaaatttatatattttttggcgcaaaaccgttacaaattttgcttttccctggggcgcttaaaatttgaaaaataaaatggagaaaaatttttcaatcaaagagcaaaaaaaaaagtttttgaatttcccctccgaaattttttttgggtattggcttggctttgcccccaatatttgccgtacttttgccccccccccccccgccatttccgtccaaagaattctcagaattaaaggcgcttttccggcttttccgccagctgtgacagtcttttcctttcagtttatgtgcctttgcttgtcattctttaaacaacaattacgaatttctctgttttattttgttgaaatacataatccctttaatgccaaaaacagtcaaaatgccaatggataatttttcaatggcctcacaaattgtgcctcggcttaaaatggactctttggccactgattcggccatcgacgacttttacaaagtataaaaagaagaagaccatttattattttgaaaataaatttcatttttgaagattgaccgaagaggcgccaatcgctttttaggagagtctctgctggcgatgttagcggataaaagcgacgaatgcaaagggaggggcgacgggaaagtaattaaagcgaaggcaaaggaaaagcggaaacattggccaatttagcacgtttatatggatgactcaatggccgaacgacgtatggccgaagagaatttgcaaaatgttcagtccgccagggcaattttgtccgcgcgcttttcctccgtttctgcgaatggaagcggtgacggagagaacgattccggcaaattgccaccaaaatctccgaggacaaattcggcagaacctcgattagacgcagacaaaattctgaacattttgctggtccgatcaaagctgatattaagagtgagtttattatgagaaggagtgatcgaagctgccaactctccgtgggaaatgagttttttgagcaaagagagggaaatgatttaaaatgggaaaacaaattggcaaagtgttacacgaatagtcagaacagttgatcagtggacataagcaagcaaagctaagtaatcacagatgagaagaaattgnggatggacgaagaataatccgtaaaatctgaacaactgnggaagagcgggggagaaacagaagacggagggatacacacacaacagaacgggggga

SEQ ID NO: 17484 - DNA, 2145 bp, Heterodera glycines
cggcaatttcataggcattcaggggactaaattgcaattgattagtgccaattagggtcattttgtgccaattcctttcgcttctctcaccgtaattggctttctcagcggtcgcatgtcgcacgcgtccagccattttgccaattgcatttcgtattcttgcccaattctgatgcttttcatttccgaaactttcgtttccatttctcgtccctcttcagaagcagcaaaaagctatgaaaaataataattaatctattatttaatggaatgttcatttaccttttcctcatccatccgacccaatctttttcgctctttcaaagcgtggaaatcatattgcgaatcctgcaaagaaaaaaaaatggtgggtattttggcgtgatgctaattggaaaaacccattttgatagttcaagttaaaaaattcacttcaattttttcagataaatgtccaaatcgccgatgggacgacgaaacattctgaaaaaaataaaaattaaaaaattaaattaaattaaaagtaaaattaatttatatgaaaaactcactgacaatgaaacgcaaaaaagaattatgggaaaaagaaaaacctggggaaacattggtaaatgatgaatggatggaaaatttgaatgcaatttaacaaattatttgtctatttaaataagcaaaattatcgctctaacaaatccaattagcaaaagggaggacccatttaaacatttgaaaacgaattaattttaattatgccttatttaaacgtaaacaataaaacgaagcattcaaatatatataaaataattaaaaattcaattcgttttcccgattgtcacgtcagtaaaaatagcacttctcatcaagcttaaaaagagatctttgaataaaggaacaattgatttatgctttaattcaattattattagataaaatttaaaattctttcgaattttcatttaaacaattagttttctgtcggaatcaacgcattcaactccattcatcactggattggcatacatttttttcctaattctctcgccatttccatcactctctctctctctttcttccgatcactctctcttccctctgatcacttttctcacctcgtccgatcactttagtccctctcacttttgctctgatcattccttccgcccatctgcccgtctgtttgttactcaatgatcatccagctttacctccgtattccttggtccggatggccaaaggcggatgattcgtttcttttggccacatcgactgactgaaaaatccccgggagaattccgaaatgcctccggaaaaatcggccaaatgccccggggctttcactttgcttattatttggtgggagagcatttgtccccggccatttttctcagcactttctcacaaatttcgcaaaaaatagcccatcattggggtgaggagcatgtgctcattaactaatgagtgtatttgttaaaaggaagggtaattaaattggttaaacaaatccaaccaccaattaattttttgatggccatttcattttaaaacaacttaaacatcgccgttatggctgaataaatttccaatatgcttttatatattttattaaaataaatgctaagattttataaacgataatgaaacgattcactgagaaaccgttctttcaaaaattaaaaaaagaacgacgccatgaaaggacgacaacaacacggacaaccacaacaacagaatacaaaaagtaatagaaagaatttagaaattaaataaattaaattattattgaattttgatttttgtcagattttcgagcagacaccgggaagagttcagcagcagcagtgagcagcatgaagaacaattttatggtgaaaatgaaaatggaaagccaaagtcattgcgtttcacacaatctttgcaggtgtttttttgggttaataaatgcccattccgctaattattgtcaattaattattaattaaaaatcaattttgtttggtttaggatgcttttcatcccaatttaatggatgaccatcagcagcaccttcttcagctttccaacgaatttaccccgctgcaacgcgagcctcggcaatatcagccgagaaaagccgagaggagcaaaaagtgttaagctttaaggaat

SEQ ID NO: 17485 - DNA, 2228 bp, Heterodera glycines
aaaatttaccaattgccaatggcaccaaaaatgtcacaattaaagacaattggccgacgcggagacgagcagcgaacgagtaccaagaagggtagtacttcgctggacagaaatgaaaaaataataattaaatttgctaattaattataaatttgggaggggattttatgggtttccacttccccccccccccttttcgacttaaaaatccattataaatcatttttcgttttgattccagaatcctctggacgtttttaaagacacagagaattctcaaagtttacattcatattcctattaaatttaagattagttgacaatttattttcccaatgaaaagaaaatccatttttcagacaccaaatatttaaatttatataatatttttgatatttcgagaatcaaatatatattttttcgttttaattaatggcttaagagttttgtgaaaatttgaaccaaatttctgaggaatttttatccatatattggcaaattttcagcgttttgtccacatttgcattttttttccatataaatccgctccctacttttttcgcataattttctttaatttaataaattttgcactaaaagcttacatggaaggccgagagcagacaaatctgaaaatgaaaagaatgacttttcaattgtaataaatttaatgtatagcattcataaatgtgatgcttttcacccatagaaaatgcccatttggaaatgttacataattagggaggctatttgtaagctttccataaataaccaaaatttacaaggaattcaaaaatctctttttttctaaacaaaagatatttttcgcaaaaaacgttaaatttagttggaaaaaaatttatggaattttttgtccggcgctgctaattgtgagatgcgccgctgggaaaaattttgaattttgcagcttttaacgattaatattttttaaataagcctctaagtagtactaattaggcgcctagcctaagcctatgtgcgagttgccttttgtacgattgtcatggcacctcttggttaggtacctgtgccctgctgctgaagtgccgtgccccggtcccaaacttgggcattatgtatatcaatgtgtgtcagagatggatggcattccgaggcccaaaaattttcggaaatcgtgaatccctgcccatcgtccctggtttgtataacaatgtgtcttaccaatgtccttcccttggttgaccttgctttttgcacatttgcacttccaatctcctttaccaaaagtctttattgcgccattttgcccatatccttggcaatctctctgggtattcgaattttcatttttgcaagtttgctgataaaagacgtgcttttccttttctgaatataacagattttcactctttatccaattttcccttttttggggcgaaggatttatttttatttttttctgtggggggcgcggcgtggtacttaccgtaacccttgtacgtctctcccgttgctgggactgtgtgacaccaaaatgtggaactgctgctggtacccaatttcggtaccttatccaattttcccttttatggggcgatggatttggggaggcgggggcagggcgtgtggtatctaccgtatcccttgtacgcctcgccctttgccctttgctgggactgtgttacacacaaaatgtggaactgctgctggtacccaattccagtacccaatttttggtacgcaattttcagtatcaagtttcagtacccaattttctgtacccattttcagtactcaatttacagtacccaattttcggtaccgaattttctgtacctaattttctgtacccaatttaaaatacccaattttcagtacccaatttacagtacccaattttcggttttcttaccgagcacacagacgagggcagcacagacaattggtccgtattcttttactttttcttctcgatgagaacagttactcactttttctttttcacttttgtcatcttctgtcccaccttccatgcattcgattgcttttgttggatgaatgaataataaattatttgaatttaatttaaaaatccgtaattaactttggcacgaacttttcctctggggttggttagtcccgtttttagaggaggacaattttctgttccttctcgcgggaatttttcccgctttgttctgacggtctgatcaccgtggagcagtaagtgttgtgacaagggcgta

SEQ ID NO: 17486 - DNA, 2730 bp, Heterodera glycines
attgaagtccgcgattaccaccatcagcaataaactcaaatatggaggagacaattcagctatgaaaaaatatatggatttaaaaaataatttaattaaaactttttaaaaatatatatttttaaaaaccttaaaataaaacataaacttttttcaactaagtaattcaaaaaaagttctctgcaaaagaatttttttattatttcgtaaattgctgaattgtccgtcccctcagttgactgttggtccattcacataagcttgaaaaaaattgagaaatttgcagtttcttacactgcgcggctggttagagctgttgtcgggcagcgaagagagtggtggtcaatcggtggccaacgatctcttcgacagagcgattgcgttggacaaaaatttggacgcctatttgggcaaggccaaactgatggagatgaagtatgatagattgatgagatgatggtgtttctttattcaaatttgcctcatggccgactcgagagtttcggaatcgagtcgagcatttaggtcccggtctcggcatactctatgggtcaaatccaagtgccaaaaatttttttataagaaaattctgagaataaaaaaatttgtatttttaatgatttttaaattatatgtgaaaagttttctgttaccattaccggtttgatttttggaaaagtcgtcatacaccaaattaccgactgttatcgttcctttaccgtaaccgaaatgtcgaataactcaattaactttcatctgatcactttgcccctccccgtaggcaaaatgctgtccaaatgcaggctgttctaagtgcccttcttaacgtaaatgcttccgttttgcccgcatatttggaaatggcaaagggtgcggcaatggcacgcagttgggaggcggcagcggaactgtgccaaagagcgtcactcattcaggcaattttgctttcacaaagattcacatgaattcaatttttttgggccctcaggctaggaaattttggtttactgtattttctatgaaaattttgactaaaaaattttttccaacagagtgactgtattcctgctcttcttcttgactttgttctaacgacattgattcatggcgaaatgtcaactggagaaacagttttgagagacttggtggaagcactgatcaaaatggagggctcaaaccagcgaaaactgatcgaaatcggcacaattttatgctccgttatgatcgatcgggaaacaattgcagaacaagcaaagtcgggcggagaatgggaacagctcagaaaactgatcagaaaaaccaaaccgttacagaaaattgactgatcgggcgattggattgggcaaaaaaagtcaagcgatgacattaaaaagccgcttattgttggccgaaggggacagaggccaggcaatgcaaatggcactgatggcagtgaaaatggtgtcggaggaaagtggggaggagggcgacgaaagtgccgttctcggtctgttggcaaagattggatgggagaaccagggcaaggacgtaattacggattacgaaaacgggaattcaggcatttctccgagtaaaaaaatgggattacggattaataaaaatatgtcccgcgtgaatgtcctgccctgtcgggaacatatgacaaaattgtgtgttgagggcataaaaatgggaattaatttgatcagatggaccatttggtaatttccaaatggatttatgaaacgtgggtcaaagatcaaaaatgcagtcattatgttaagcgctgatccgtgcccaactcgaagatgcaaatggccaaagctgcaaagaggcggcccaacaattaaattttttgcgtgaaacgcgcccgaaaataactgaaaatgcggtaaaaaaacaagcacaacatcatttgacattttaatttgttgccattattgaagcatttccattttttgtgcgcacttttggctttacgcgagcgaaagagcgactcggaggcgttcggccatttgcgcaattgcgtcgacattcacttcgatgcgcatcatcgtgtaggcaatttttagatttttttaaattacagtaacctgtattccaaaaaagccgtaacccgtataattttttccccaaaaatggcgtaatttcataatcccgtaccactatcaaaattttcattggccataatttttgccgcaaattttggcacaattaagacgggcaccaacactttctcagtgtgccaattggccaagctggacatcactttttgtgtggaagtctgtgaattgcttctcgaaatgagcagcacagtcagtgcggcgccaaaggaatgtgcgagggttttgacggcagtgcgcgagaattgtgccggtcggtgtgacccaaaaaaattcaaaaaaatatataatttttttccaaaatgaagggctcacaaaacctacatttttactcacaaaagccaaactcgcaatggacgacaatgcatcggctgaacagttgttgcgcatttgtgtggacaaaaacagtgacaactccgaggcgtatttgcttttggcacaggcattgattgatcaatgggggcgggaggggggggggattcgaataagtcagataatggatgagagattagctaattagggaaaattgataatggaggagggtgattgacggcggtttgaatgattaatcacccacccacacgcagattcacgtacaaaagaatgacctggacgaggcgtcaaagct

SEQ ID NO: 17487 - DNA, 1636 bp, Heterodera glycines
gttgggccttttttagtacttggaacgggagacgtcctgggaatcgaaggggttgtaaactttttttccctttttccacttttaaatttatttaattttcaatttttttaagcttttttcgaaaatttttttgtttttttttcggcaggccctgcctctgacaatgttttttatttaattagaaaaaaaaattgattttttttttttttgatttattttaaatatatttcatccttaaattttttaaaaaacattttcaaactttccccttattaatttaaggcgaattttgccttttttaataaattctcttgtgaaaaggcaaaaaaataggctcttttaaatatgcctatttaaattactttaattgctttcctttcgcttacgaccataccacgttgaaagcacgccatcccgtccgatctggcaagttaagcaacgttgggccttcttagtacttggaacggagacgtcctgggaatcgaaggtgttgtaagcttttttccttttttcacttgtaaatttatttaaattttcaatttttttagctttttttcgaaaatttttttgtctttttttcggcaggcactgcctctgacaatgttttttatttatttagaaaaataaattgattttttttctttttgatttattttaattatatttcatccttaaattttttaataaacattttcaaactttcaccttattaatttaaggcgaattttgccttttttaataaattctcttgtgaaaaggcaaaaaaataggctcttttaaatatgcctatttaaattactttaattgctgtcctttcgcttacgaccataccacgttgaaagcacgccatcccgtccgatctggcaagttaagcaacgttgggccttcttagtacttggaacggagacgtcctgggaatcgaaggtgttgtaagcttttttccttttttcacttttaaatttatttaaattttcaattttttttagcttttttcgaaaaattttttgtctattttttcggcaggcactgcctctgacaatgttttttatttatttagaaaaataaatttattttttttctttttgattattttaattgtatttcatcctgaaattttttaataaacattttcaaactttcaccttattaatttaaggcgaattttgccttttttaataaattctcttgtgaaaaggcaaaaaataggctcttttaaatatgcctatttaaatgactttaattgctgtcctttcgcttacgaccataccacgttgaaagcacgccatcccgtccgatctggcaagttaagcaacgttgggccttcttagtacttggaacggagacgtcctgggaatcgaaggtgttgtaagcttttttacttttttcacttttaaatttatttaaattttcaatttttttttagcttttttcaaaaaaattttgtcttttttttcggaaggcactgcctctgacaatgttttttatttatttagtaaaataaatttattttttttctttttgattatttaattgtatttcatcctgaaattttttaataaacattttcaaactttcaccttattaatttaaggcgaattttgccttttttaataaattctcttgtgaaaaggcaaaa

SEQ ID NO: 17488 - DNA, 1667 bp, Heterodera glycines
  unsure (1)..(1667): unsure at all n locations
tccagcggtgccgataggcgccgctggggaaaattttgaaaatcttagtgtaatttgttaacagattatgtcgaaaaattgtccaaagttttttgatttttttctttttttaagaaaataaggagatgatgtggctctaggacaggggtgtgaccgaaaaattttcaaaataagagcataatgacaaaaaataagattagggtcaaaaaggcaatcttgcaaaattggttcgaatcagttaatatacaattttttataaagaatttattaaatattatgtttttcacatcccattatggattttaacaatttttggagaagaaattatcaaatcttacatttcggtgaaaccgtgctgaaaaaaacagattttcaaacaatttttttacggtgtatttttttaaagttggtgaatgggaggtgggtacggcggcgtcggaaattttttgaaaatttcagcgcaatttcatggcagattttctaactaaaatcgtaaaaacaattcaaaaatcgtaaggtgcgggcatgcggggccgaacattaatgcacagcacaacataaacctgctgttttcaccactaaactacaatacttaaataatataacttattatttcttaccaaaaaagtcattcttaagggtgtaagtattttcgtctttttcgtaaaatattgctctgacgaaaacgaaacgaaaatccaaaattttaaaaaccgaaaacgaaacacgaaaacgaaactcaaaaagtgccgaaaatgtatgacgaaacgaaaacgacacgaaatttcgtccagccctgactgggatcccgcaaaatccggcgcgggatcccgtcccgcgccgggctctattttttaccccccccccccccccccccttatggggcggggcggggcggtgaaggcttctcgaacccaaaaattttatcactaaatgcggtttttccctattcattcattaaagcgggacggtgagagccaagcggcgcatcagcagaagggctttagtcagaagcggctttcgtcgtacgttgacctttcggacagcgaagaaagcgacggagagagaaaggcgcgaagaaagagcgaattgaaagacgaatgctatttttacaatatgtgacaatggcaaaagggcggaaaaggaagcattggccattgtccacttggccaatgggcatcaatcattgtcattttaccatatcattgtcagcactaattaccattgttatttctatggcaaaaagcaattcgcgttgttttttgttgacaaaaaaatggtaaagagcacaaaaatggaaatttctctttacaagaatagatttaaacggtttaattttattttatgattgctagggcccgggtttgtatggatttacatattttttgcacactttcagcctaaaatcacgtaaatagtatttttagcttagtttgatgcttctggatgcctttttctttccatatnttcagggtttagtccatagtcggcattttcacaaaaattttaaaaacgcatcctaaagatggaaatttcttggaaaatacgcctctnaaatcgtaaaattttggaaaaaatactanaaagtgtgcataaatttctcataagcaagcctcgcgtaaaaatgaaatttttctgccattttttctaaattcantatttttcag

SEQ ID NO: 17489 - DNA, 1370 bp, Heterodera glycines
ttttcgactcgcccctttttgcggtcggccgcgactcggcccttcgccggtggtgcctccgcgtggtcgaggcaaaatacagcggaacggcggaggaaacgctgaatgggtcattccggggaaaagcgcaactcggcacagacggaggccaacaacaaccaggggagaagtacaatcgtaacggtaattagaatgaataaaaggcaaaccgaaggaaacggacaaaatcatttggggaaacaaaggaattccgagaatggcatttttgttaggcccacaagtacaagcagttgcgcgctctgttcggtctgctcacttacctcgactgggccatggtgctggtcaccgccttttcctgtgcttccatgctgttcgagtcttcgtggccaatcggtggcgacaatttggtgttgaacaacccttacttaaaggtgccctcttgggatgggcaattactgtaccggttaaagtacaccacaattcgcaaagccatcatagcatcatatttattattattgctaattttcaggcatgcgattttgtatttgtgcttgccatgaccattgagttggcactcaaagtcgtggcccatggccttttcttcaccccaaatgcggtggtgcgcgatgttggcggcgtaatgacactatttatctatgcgagttcattttggtttctgatttggatgccgaaccatgtcgagcaaaactcattggcacaactgctgatgatattcagggcaatggtcagtggtgaagcttaaaagtaatcgattgacagattgattattgttgctaattgattgtcggatgcaaacaaagggaaaagcgacgcttttccttttccgacaaattgcgattaatttgatttggagagaaggctgaatcaccgaatgggggtcatggcagttcgtacaattggcagttcgtacaatggagtttcgtacaattggatttcgtacaatgggactttcgtacaatgttccaattgcggatttcgtacaaaaaatatatataaagtcgattttttctttaaaaactcatttaacgacttgtttttattgccacttttgtgaatgtttgaaaaattaacacaataaattgtatttcctttcctaaaagcaagtatttaagttatgaaataattgtcgaaaactttcgttgaccaagttcatttgagtgagcaaatcctccaaaaaagttcccgaatgaattattattgtttgcgttattaatattattattttggatactcattagctcattacttatttataatttgcttataattgtcattttgatgaaaagtatgtgtcgctgtcactatcacttattttttaaaatttaatattgtacgaaacgtcaaattga

SEQ ID NO: 17490 - DNA, 2027 bp, Heterodera glycines
attgctctcttagggcgttttgttctcgagcgattgccttaagagaggcaattttctttaaaaaaaagactgattaaagctcaaaaaaacggtaacgggtgtgattaggtcacttcatcttcactaattggtctctaatgaatttcagtaattaaatccaatgattagccattgatctttccatacttcgccaaccaccgacacgtcgttggccaaatttgttgtcctctcaagcagatttccaactttgccttcttcttgctcaatctgtttagaagaatggcataaatgtaaggtttttagaaaaatatgcaattttaaatatttaaatttttggcccatgcctcggtcattcgctgtgccgccttcgttcgcagcttttttgccgattcggcaagttcgtcgctgatcgcctccaatttggctgcctctgctgagtccataagtggacgaaggcgatttaagtcagaatttagctggccaaatgccgtcgtccatcgcgcatcaaagtcggaaattgctaaacggcactttatggtaatgatctgggcatgtgggattttggaatggtaatgatctgactagaagataagccttaaattgcttgaaaaacaataagataaccaataatactcgagaataaggcattgagattcgagatattttcaatttgaatggaaactgacccaatttaagtgcatcttttccaatgagatcattgtgcagtttatgagctgtgtcctccaacagtgatcggagtgaatcagtgtccgcgtcaaaccgtgctttgagtgtttcctgaaaatttggtcaggtttaaggcattccacatctgacaaatatataattgttactcagatatcacatgttaaactatgacaaaaattattaatgatcagattcaatttcgaaagcataaaagtccagagtgatcgttcaataatgattttgatgatgattccgattttccatattcattacgttaataaaaatcggcgaatttgtaaaataaactcaatttttttgtgtccaacatttcattaaatgtcctattttcggtgccaactttttcaaataattaatttttggctcctattttttcatttgtgccaaacacaaatgttcaatttttggtgcccatttactcaaatattcaattttctatggccaattccataaattttcaattttcagtgcccaattttcctcccgttcggattttcctctcttatcattatcaactgctgctgattgtatgccacaccttgcttcgtgcctgatccaacgcgctgttgcactcgctgaccaacgcggaatagtcgcgtcgcagttgttccaatgccaaccgatgctttttggtctcggcacccgagtcgccgcccaatgccccttccagcttgtccatgacggtgaacacgttgtccacgccggggcccaacgcgtgcagtcgctgctgcagcgactccaacacgggcatcgacagggaatctggcgtggtctaaaagtcgaacagggaatgttccaatttgaaactgaagcccgtaaatttagggattttccctgctgggggaaggcttggagcttttatggacttttatttgttaaaacgccattaaaattgtatatagtattagaaaaaagtaaaagccccccggcaactaaaattaaaataaaatttgacaaaaaaatatttaaaattcaaaaaaatgaaaacatatgataagcttccatattaggggggtgggataggtaattagctgttttaattagggaataaacttggattccatctattggatataatagagaccattaagttaattaatctgtttatcctattattgttttaaggcttcttatgaattaagttggactttttcaatcgaccatagtcggcacttacactttcccggcaagggcacggcgacggatcgaaaatggcatttcccatttgtgccaaaaaaggggacggtacacaaaattttgaaaaattcactcgcgcagcaagcagaaccaattactactaa

SEQ ID NO: 17491 - DNA, 1104 bp, Heterodera glycines
tgactagagcaatcgaacgctaacggacgacctaatggaaaaaaatccccgaaggagagaatttaattaaatccattccttcgggggactgtgccgggcaccccggggtaagcaaaacgatataaccaaaatataaggaaaaattttttaaatcgttttttcacggcaccgttcctttttgatactacagcaatcagagtgctaaaattaagttgtaaataaaacttggtgcgctttagagcactttctgaaaaaaatatttatgaaacaaaaaaatcgattttttcaagtgtccgtttggggtactcaaacatttatggggagcaaaaatccaacgcagaattaaagtacaggctatagggaagctattcccgaaggattcggtctccccataaatctgggcgcatcggttcggggggactgccccgaaaacaaaaaaatcgattttttcaagtgtccgtttggggtactcaaacaattatggggagcaaaaatccaacgcagaattaaagtacaggctatagggaagctattccggaaggattcggtctccccataaatctgggcgcatcggttcggggggactgccccgaaaacaaaaaaatcgattttttcaagtgtccgtttggggtactcaaacaattatggggagcaaaaatccaacgcagaattaaagtacaggctatagggaagctattcccgaaggattcggtctccccataaatctgggcgcatcggctcggggggactgccccgaaaacaaaaaaatcgattttttcaagtgtccgtttggggtactcaaacaattatggggagcaaaaatccaacgcagaattaaagtacaggctatagggaagctattcccgaaggattcggtctccccataaatctgggcgcatcggttcggggggactgccccgaaaacaaaaaaatcgatttttttcagtgtccgtttggggtactcaaacaattatggggagcaaaaatccacgcagaattaagtacaggctatagggaagctatcccgaagggatcggtctccccataatctgggcgcatccggtcggggggactgccccgaaaacaaaaaatcgattttttcaa

SEQ ID NO: 17492 - DNA, 926 bp, Heterodera glycines
cccacctactggccgtcgtagtcgagtgtgcggcggttttttagcgcaatactcgatattcaaggctaaacgatttttgcgcttttaaattctttgtcagtttcccattatttcttgcccaagttgatgcaataatttttttttaatggacataaaacagttgagaaattgggcattgaaatgagtttacaagaatgataaaatgtgttttctcatcgtcgtcattttgtgccaatgcctccctttacggtgcctaaccgctcgtccaggtacagaatggcactgccgcccttcttggcactactcgccctgttcttcagccagtacttgcgccggtgacggcccatcagtgccgtcccatggcggcgccggcgtcgctccaggcaagcgagcagcagacacagcagcagaaatgcggccacaccgaaaaaggtgccatagaggccgagcagtacgagcagcacatccgagtgggtgctcggcaccggctcggctgtgatcacaattcgacgcggcgaatcgttggaagtctgcggtggtcgacgaccgccggtgccgtcgccgatgggagctgagaaggcgtgaaaatttatcgggaatccccacttggaaaagccgggacaggcgccggtgtttgatccggcattgttttgaaaacccgacttaaccggcaccgggccgagatatgtaaatgggcaaaaaaaggcagccaatttttctggctttgcggacccgtgccgtgtttctaccggctgaactaccgaccctaccctcttcagctacccaatttttttgatcacattagtttaataatctttgtctctgttgtccaagagggatgatcccttctctatccctggcataaatcattaatccatgccgtggtttcgtgtgcttagttcaccgccctctcgtgtttttcgaag

SEQ ID NO: 17493 - DNA, 2196 bp, Heterodera glycines
ctttgtctctgttgtccaagagggatgatcccttctctatccctggcataaatcattaatccatgccgtggttcgtgtgcttagttcaccgcacctcgtgttttcgagcttaggtcggctaatcctcggctcgcttcatttgtcgcaatgggccgtgccgaacccgggcttttgtttgagattcggtgccgaatgtcgtgctgtccctccgtcgattcgtctgtatgtaaatcgtcattttcgtcgtcatcctcaaaataatcatcatcttccgctgcggaagagtcgtccagcagctgtttgtccttcttcgcctcctcctcctccccaaaatgaggatgatcgacggcaccgttttgtggttgcatcggcttggcctgttcaccacgtggaatgtgttcaatgtaggcagtcactaaatgccgcagagatattctttttatttgtagcaaattctgccggaggagggtgaattaggtatactatcggcataaaaatgcctggcagggtgttttgttagataaaagcctaaaattttgtcctcagcccctcccccttggcactcacctcgcgcgccctgcggcgtcgttcttcccactgctcgtcccgtgctgtcctcctcctcctcgtcatcaaattccaagattttggcaaagtacacattgttggcatcggttcgcaactgttgaagctgttcagagtcgtcaatgccatgcggcggccaatttgttggcattctgtcgccgaccctttcatcggcatcattcggaaatttttgaattttgaactcagccggcgaatgctgcaataaaaaaaacttcagtagccaagttcgttttgtcgggccgataccgtatccaatgaccgtgtcggcgccgtcaccgtatgcgtcggtgttattccaacgccactgccaccggtggcactcgtcaacagttgttgcctgtcatcgcttaacaactgtatctctgtccgccttgacacagcagcagttgcctgttccgtcgccgtccactgtttgtgcggtaccgtagcttggccgttgatcagatacggtagcgagacggagtgatacagctccgcaggcccttccaccagcacagtttctggaaaatgcaagagatagacaggtcggtcgagaaagggaagaaaaagctcaagatttaattttttggcgtttcgttccctaaattccgtcgctaaatgcatggtcagcaactctgtttttctcacagctcgcttatttgatgcttcttaccacgtgcatcgggcaactgagttgtcgtaagcattgcgtctggccaagtcgcgcgcgtggcagtgactggtggtgcttctgttgttgttcgtgttttttggggttgtgtgtggccgtttcagcagatgctgatcaacttttgaagcagaaacacctttttgtgtcgcatcgggcagcaattggacacgcgtcggatgtgcagcgacggattgggcgcgactaaatggaattaggccgaaaattgttgaaaagtgccgccggtttctccggcgtaaaaaggggtgcaaaaattggccgattggaccaatttcgatggaatgatctcgcgtgatcagccgcgcaaaattcaattacggttctcgacaatttggcccttttggttttttacattatttctaatgcgttttttacctcctcccgccccaccaaatggcgtaacgtgtgtaaaagtcgggcggaagtcgagctgaggaatactgaaagtttggcggtatgtcgagcaggtcttcatccgacgagaacaggcgacgccttcctgccaaagtgccggacggcgcttaaaaaatttatttaaattttattttaaacatttttcggcacctgccccttccgccgatgtcgttgtcccatctgcttctgctgttggcattgtgccaacggcacgctttgtcgtcccccgtctaaattcgttgcctttcttttgctggtgatcgccctgcgctgaatgatgcggcgagttcgtcgacacgtcatccttttgttgctcctgccattgtgccatcattctgtaaaaaactgtgattaattatctcagtctaattattattcactcttaattagtctttgccactgttccgaagtgttagctaattaagcagttattcatttaaagaccttttcgctctcactgtccacttttgcaaattaggtaattaatt

SEQ ID NO: 17494 - DNA, 3672 bp, Heterodera glycines
  unsure (1)..(3672): unsure at all n locations
ttaaagctatttttctttaagaatactttcgtttattttttgtcatcttttcttttctttcttttaatataaacatagatccaaaatccattactttttattttttacagcatcttaaaaatgattttttttatagcaataacgattgaaaatgttttattttattgtttatagcacattaaaaaacaaaaaaaaattgctttattacaaataatatttatacgacttttaaatgtaataatatgtaaagcaaaattcataagaaatgtcctaaaattcaaatttattgaatgttgttggcccatataaatccatattttgggtgttatggaataaatccatactacgccactggttcaagcaacttgtttttgcggcttagctatgcgagagaagccaaaaaatagcattttctctaaaaaatctttgttatatttggggttttggtacataaaaacatattgaacatattacggcatttttgagaaaaaaactgtaagaatatacaaaaaaaaaataagaaaaagtctcatttgttatctcaaaatcagacaaattttttcatattttttaatttttcaaaaaagttgtcaattttctgcagaattttaaaataattaacctcattttgaatttttgttttgaatgcaatcaatcaatcatcacaattaatttcaatatttttgagcaaataaagcgccaaaatgaacaaaaaacgttctctataaacaaaagcaataaaatttgtgaatatttgagcaattaccaattattcttgttcatttaaacgaacagctatgaaaacatttaaaattattaatttgcagaaaatagaaaaaaaaattcacaattacgtaattaaaataataactaattagttttttcactatattttaaggcgatataaaaggaatggcaaaataacagaaaggcatcagtcttacattcatttattaaatataattacagaatcaacattaaagcaaccttaattggcatttaacttataaaataataaataaatttaagtatagaaaaaaattaaaaaatgcactcgcttctgctgcttttcaatgtcacggtttacgtgattattttacttcatttcgtgcccaatgaaaatgggttggccagtgccattccggtataattttttagtctaattaaattctaattacataagaattattcaataaaaaatatatataaggcggctttcaacggaggcgacgcgttgctgttgagaaagaagcgccaagacgaagatggagaaggtgaaggtgaggagggggctggagatgatgccgagggtgccgaagaagacgccgaaggtggtgaggatgaagaaaaagccgacgaggaagatgaagcaaaagaggacgaagacggagacgagggagaagataaggaggataaagctgaagatgaggacggtgacggtaacggagacggcaaagacgacgaggaaggtgagtagtgtcaaatcggagacacatggacgggacggcacaacactgagtggtcttggtcaagaagcgatgttcaaaaattgcttttttaattggagcaaaaactaagcctcgtagtcgtagagaggcattttgatttcaatttgcccaaaatttaaacacaacgattgagttgagttgcagcaataagctgcagaagaactaagtttattttggtcgtatatattgaggaatgggatttcgattaacgcaattaggtaattagatgcatttatttcccattaatatcaataaaataatttaataaccaaaaaatagacgacgacaaagaaggagaagacaaagaaaaaggaggaaaaggaaagggaggagatgaaaatgaaaatggaaatggaggtggcggtgtgccgcaaccgccaagcgcaggaggaggtggcacttgcacggacaaaggcaccggatgtgagccaggcttttgtagcagcacagactttgctcgggcgcactgtgccggcacatgcaaacacgttttgcaagagtgcagtcatttggcttcggtgcccgacccaggtgggtgatgaactgttaaaatgttcatttattattatttttattaataatatattcgtgtttgttcagcaaaatcatgctccgacacgggaacgaactgcggcaccataccggacatttgcaccgtatgctttttatgtcattattaaattattggttcagtctcagctagagtgttgcgattcaaaaaactgttcccatacatgggaaaataaaggctttttgttaattctaaatttcagctacaaccatttttcaggatgacactttggccgtttgtggttgtgctcacacgtgcaatcgttgccatcaccaggcttcatatatggcacaaggaaggtgcaagaatgtgctgtaatgtgatgaattggcacacagattacagtaatgatgtaaaagcattttaaccaaccatttccaaccgtataattctgccgtacatacacaaaaaacgatttgtagtttatggcatacagtaaaccaataaaactattctcgttgattcattttaactttaaatcatttttgataaacaatagtggttataaacatatgaccatgactgtaaataaatgctgtcatcattcgataataaggctccaggaaaatgcgtcattaaaataaagtactgttgcattaaatcatgtattacaaggtcaagattgtataaaaatttcgttctgaattttttcaattaacttttttaaaggccaataataagcactcagggatcactttttaaaagtttttctttcaacaaaaacgacaattattcggtgtttaatttgccgatttttaacaaagatatattttttttcaatatagatgccaaagtggggaaatggcattttagcgcatttttgacccatgttacaattgttcaaaaatggcacttcaagaattcggctgggaaaatatcgcatgtcaacagaatttgtaaaaaaattgttaattttttgaaaaaaacgtaaaaaaaattccgactttttatataaaaatttcggaatcggaattctgaactcaaaaaatgtcagaaatcgtaagtcggaattccgtgccatccatggttaaactttactttttttttgacaaaacatttttgatttttaaatttttactcatttgaattttactttttatttacttcgtgaataaaaaacattgccttttctaagttattttgttaaaattgttcaacaatcgaaatttcgcatcaaattatgcagcgcttgcaaattttctcaactttcttttcattttaaaatattaggcatttgctttggaaatagctcacatcaacaattggtttctttgatttcttacaaattttcaatttcaaacttcaatttctttgctaatgtgctatgaagaaagtattaattttttgaatgcttttgtcccatataaattttgggtttatttgggaataaatccaaaaatttcgacatttccgcttcgtagtccattttttggatatttggccatccatcatcatctttgtctaccatatcaaaaacttattgtaatttttcagataatttttatttaaaaactttttaatganattttttcagtaaatcacagccatgatcatttntctctttgatttacttgnnaaatcatttttaattct

SEQ ID NO: 17495 - DNA, 2458 bp, Heterodera glycines
gatggactctttgcaagtgaatggcggagtgccatttggacgaaaaatgtatgcgcccgaggcctgaaaataatcaaaataatttatttatttattatacgtgaccttttggcacttattaatagttttctacaatattgtttgagtctttgtccaaatttttgcagttttttgatagaattttcaaattttttcgttttttaaattttatttttggccaactttgaaaattcaaaaaatgtgcagtgtttatttatgcaaatgccataaaaggacatgtaaacaagaaactctataaatttaaaaatgttaaatgaaattatttaaaataattgaaaccaaaataaaaagtcaaaatgcctgtcttggtgttgcattattggacatgccatgatagtacaagaattgttgccgaagttgaacagtttggttccggcgtaaatctgccacactttgaagcagcccatcggtgccaaaagtcagtcggaaaaacttaataaattatataaattaaaaaacaaaaacattttttttattcgtacaatcaatgcgtggcattattgctttcccaaaacagctatggaaatcggaagttagctaaatttaaaaatcttgtgaaagaattttattcactaaataaatcctgagtggtaattcatccctttttttattctattttatgtatgattactgtattaactatatcatatttaataataatgcccggagtcggagcctgaatctggacagatttttccgggttccggattttaaattacactaattacaaaatttattaattattaaatgcccttctgaatttaattggcaaaaggacgcaaaaacaatgtgattaaaaaggtcaaagaaaatgacaaattgaataattaattaattacttcatttgaaattgttgtcaattcgtcaccaccatcattttgctgctgctgctggttttgttgttgttcattgttgtttcgtttgcttgtcctcagattgtttttctcactgggacaaataattttttttttataataaataatttaaatgtaaaaaatttataaattttttttaaaattattttttaattaaattattttatatcttttaaattaataacaaaaatatagtttaaacaataggaaatagttaattattttatatacaattaaaataaataatttttctttagcataattaagaaaatcttgacatttaaatttaaaaatggcattattaaaataaaatttaccgtttttggccatctccaaacacaaaatatgtgcgaaagccaagtggaggtacaataacaggaaaaacaagttcatatggggccgcatcgtgatgcgaagaatggggaaaaggttgccaaaatgattttatcaactgaataaaaatggcaaaaaaataaataattaaaaaaataataaaaaatttatcaatgaaaatctgtcattaaataatacgtaatatatttgaatatatttaactatagaaattgtgaaaaaaaaacatttttttaatgcaaaagatacatttaaatattattataaatatttaagtttagtttttaaataaaaaataataattaattaaataaataattaaaaataatgaaaataataattaattataaaaacatgatcgagaaaaactgtccaaatataataagtaatattttttgattatatttaactattgaaattatgaaaaaaatttaaaaatgcgtatagataaaaataaaatattaatataaatatatttatgtttaattttttttttaaataattaattaattaaataaaagtaaggaatggtgaaaaaaataaaaaataaatttaataagcaatattttttttataacttttgaagacaaaaaatttaaaaataaaataaattgtttaaatttaaatattttaatattttttctccttacttcagcattaatttctttttcctgatcatcaaacactgtgacacgtctgcgataaaatggcactcgaattattgtgtcaaattgttgactcgttctcattgaacagagtcagtgtaaaattggcaaaatttctggggaaatttcaaaatttttttaaaacatttaaaactattaaatttaaattatttaataattttttcgtctcatcaatcaaaaaaaatgttttttcttacatttgaataaaattagatttaaatttaatttaattattctataatttgcactttgtggcctcgcaaacagtttcattgctaagccggcaaaaatggaatggacggatttgaattggcaggcccattttttgtggctaaatggccaaaaggatgcgttgaggacactctgacacatttttaatttaaatttcataaaaataaaaatagaattcaaagtttgtaagacttcagcatcttgccagccattgagcagttgtcgatggtaatcttgggtcacaaattctttgct

SEQ ID NO: 17496 - DNA, 1526 bp, Heterodera glycines
  unsure (1)..(1526): unsure at all n locations
ctgacgtcacggcatcgtgatgtgtgcacaatgcttgagctgttccaaactttccaactgcttagaagcatttgacagaagggcaaatgatgcaaatttgcgtgaaagctgtcaaaaaaattataataaataaatagagaaatgaaaatttttttaaatttaattccattatgcttaaatacccattcttctaaaaatatttttgggtttcaaataaaaaataattaaatttacttaatattaaatagaatgtgagccagaaatagaaaacaataaaattgttataattcatggattttaaaattcaaattttgtgttcattttcgattttatcgtatttttcttattataaaaaaattatgaagcgcaaaatatgaaaaaaatatggacaaattaatctttttaaataattttatttaaaaaaaatcagaaatttgttatgacctgtaaaaatgcacttgaagctcgaatgagtcccttgatgcccggttttgaagttaaatagcctgtccaatctgaaaaatttattgaaagatatttttttagaaaatcgaaagatctaaaaatcacaagaatgattggcgcttgcatatgggaagaagtcatcagatttaatctgaaaattataattttaaatattttttaagtagtaagtttaaatgatcaaaaattatgaaaccttccaaaacactttaatttaaaaccaaaataattttatcaagaaatgaaagaaacatttgattaaaatttcgtttttcatggataatcaatccattattttatttcaaataattattattttttattttatagagcattattttactggtaattttggctgtgcttcattcaacgctttaacataacaagcaggggttgagtaaaaaacggtgatattatttgacagagtcttaaaaaataaagtttaaatattttatttcttaattaaaaattctggaaaagtttcggatttagtttaataaataaaatttttaaatatacatgtgtatattttaaggagtaaaataaattaatagatatttttaaatgaatatatttaattttttttttgaattttcatatttaattttttacctgtttatttgcggcagcaatcagtttgtccaattgtgtgaaccacatatttgaatttgtgtaatgaaaatcaccgcccattgttaacatcacatgcttaaattaatttttgtcaattttagaattaattttttcgcattttattaaatttaaatcattttttattcggaattaatgaaaactgagcaaagcacataattttcaatcaaataattaatttgttttactaatgcttttggttacaatagcgtagatgaaaaaataattcgttttcattgtggtgaaacccgggtaactgaagatatccaatttacacttacaaattattctgaaattttctacaattctaagcttaaaaatgacaaaaaaaatttgaaattaaatttcaatatttttggaccganttttttaaaggaattatagggagacaa

SEQ ID NO: 17497 - DNA, 2788 bp, Heterodera glycines
  unsure (1)..(2788): unsure at all n locations
caaattnntgcgttcacttcttacaaaatcaagaaacatcggttgaatcagaccaaatagtgcaattttgaattttaatttccttttcaaattcgattttcacaaaatttaagtattttccgcatagcattgttgcatgtaattctaaatttggaatttttcttttgccttttggcatattagcaggcaccactagactttttgcaaaaattaaattacaataaatttgatggtcattttcaattcgaagataaatggctgcgccaaaggcttttgaacatgcatcagtaaaagcgtgtaattgaaatttggtatgttctgaaagattattttgaaataatttccgtggatatttgatctctttattttcccatgtaagcattagttctttccatttttgttcttctgaatcggataacttactgtcccattttaggttttttccattttcgatttcttgacgaaaaagtttagcagctaaaataattggagatgtcatcccacatgggtcaaatgttttagctatttgagatagtacttttcttcttgtttattatttggttcgaattttggcatttttataaaatattcgtcatttttgacattccaccaaattcccaacaatttgacagtttctttttcgattcggtcttcctttgggagtttttgaagctcacttaattcattcgacacaaactcacgcacattcattcctgctttagcaaacacctttttaattaattcataaaccatttgaaaatcctttttgtgattaattcccactagtaaattatcaacgtaaatattttgagccaattgcttaataatggggtggttatatttttctaaatgcaatttaatggttaatgccaattgggcagggctacaaatgacaccaaaagtcactcttttaaaccgataatgaattaatggactgtttgggtcgaatggatcctccacccacaaaaaacgtacacaatttcggtcttcaggtgctaattcaatttgatgaaatgctttagcaatatcagaaccaatcaaaatatttttttaaccgcgtgcgtaattgtatgccggttaaatcattgtattcattggtgcctttttctatgcattcatttaaggctgggtttttaccgcttttagcacttgcattgtaaacaatccttaatttagtgtgttcactagtttctttcactacgccatgatggggtaaataatgaattttttgtcctttttggtttgggtccaccaacggattagttatttccactgatccttggtcattaatctgttccaaaattgttttatgatataattggagtaattttgggtttgtgcgtaaccgttttaaatttgattttaattgactgtaagccattgcaaaattcgtgggcaatttttcggcctcttcttctatccaaagtaactttgattggtaccttttgccattgaatgaaatattttttatcattttttctctcatattttcttccttttctgataaatctccgaatcccacgctatttaaactgtcgtgttgtctaaccaatttaatcaattccttgtttttgtccaattccacttgatcagttatttcagtttcacattgtattgcacttgagtttatggctgatacgttatattcgtcctttgtattcacatttttgtcatttaaatttgtccaggtcacttttccatcaccactcaaaattttaccgattttagaattgctgatccaaaaaccagaatttaaatgtttaataggtctaatgtcaaaataattgtaaaaatcgctcccgatggtaatttttggttcatcgagtaaatatggaactgaaattttatttttctttaattcatgattatttatttcctgataatccaaaagggaatttcttttaaaacttttttaattgctcttccaatcattaacatattaaaatctcttgcttttaagccaaattcaactactgggctttcgaattttcccaaatttgctccacctaaaccagaaagttctaatttttgtcttccaatcactgttaatttaaggcttcttgctaattcttcttcaatataagtttttcgactgccatcgtcgaaaaatgctaaaaccctttttctaagtttttatttaatggattataaattgtgacatatcgacattttaacactgatattttatttggttgggtaattaagtatgatgctgcattaatactttcaattattttttcagccgtctgatatgttttgtaaaatactggtgagtgaatctgttcacaaaagtgacaaggaaatttaggagaacttttatttgaataatttgaaccattagagttatttgagctattcgaaaatttgtttttgggtatgttcttccctctttcccatctttcttgtggtcttgaaaatatttaattgttatgatccactgaatattctggagaggagctaaatctccgtctttgatcatttttgtttccaaaatttttgtgtttttgttcattttgaacttttttccattcctctctaaattttactgcaaaattcattgttgcctctgactcgtatttgttgtaatttacttttttgactcgtactgaccttttgtctcacttcttgtctgtttttaatttgctcaattgctctcgatagagcatttctaaatttggtagtattccaattttgattatcttcggcatcatttataacgaaatacttgtccaaaactaaaggtgataatttcccttcaagcgataaataatgaggggataaatccatg

SEQ ID NO: 17498 - DNA, 2160 bp, Heterodera glycines
  unsure (1)..(2160): unsure at all n locations
ctctgtctccttaatctgccagtatctaattatctccccctttctaagggtgttgataaataatatacccgggcatataattagagaaaatacggtatgtacataagggatggcattccgccgaggctccaaaaatatgcgaaatgaatgtttttgggttagtaggcgaaatgtcaataggcgatatgtcggtaggcgagatgtcgagtaggcaaaatgtccgtacacacagcggcccaattttgtgctctcagtgcaaataggtttattatttatttagtaatcagaacgccaaaactttgcaaaacttaaaattttttggggattttcccttgtaaaaatagaagagccgatctcgagttaaaaactagacagctaaaacattaactgtttttacgacacttaaactgaaaaaaaaatttcattatgaaaaattgtaacacgccaccttttattcgaattcggaacccggattaaatagttgatccgtagcgattcgatggtcccaaaaactccaagaaacatgttttaacgactattttttccaaaaatgagggggaatatcaacagtagtacagggaaaatcttaattctttatttttgtttaaaatttttgttaaaaagatttcattttttatggccaaagctgagaatcgaaagctcaaaaatggcattgaaaaaatgcaggaaaaatttgataagaaagaggagcaattggagaagaatttggaggaattacagaaaaagttggtcgaaatggatcatcagcagaaagaacaacagaaaagcattgatcagatggaaaaggtgggaaaatgtgaaaaaaggaaaatgaagcaaattgatcagcacattttgaatgtgattttcttttttgctaaaatgccgtaaaagatgctacagacgaacgctgatgccgaaaaggagaatgatgacaacatgaaaaatgatcacaatgaaatggagaagaaaaatggacaaaatggagaaaaaattagacgcggtggggtcaaattataaatcacttacaaaaacacaaaaataaaaaatttttggcactaatattttaatgttttagaaaatagattgctttttgcaaaaagaaaaatctgttaatttcagcagatggcatttcaagaaaagcttgagaaaaatgtcatggcacaaattgatgtgaaagtgcagacgaaggaagttactgtcaaatagttaagggaaatgagcaatggttaattactgtacctaccgtaacattattattataattactgtcaaatattaataggatttgttccaatttaagttattactgaaaaggcaattttgattgaatcggtgaattgaagggacaacaaaaacaccaaaagcagcaaggggagaaggagacaaaaggcgagttgtaattacaaaattttattaagaaaaaacttcataatttcgaccttttcgcaattttcatgtataacttttttggtaattgtctaatcgcgaagtgatacatagaattagattcgaaacatgttaagctttcgaatgataccaacaatcttggatttggatgacaaagaaaaaagttatagcgaaaaacataaaaaattttgaaaatctgcccacagataacacacaagtacccaaaattgttacaccgccagatttttattttattttttatttttcagtttcgtcatttgagtcctaatgactaagaaatttcagttccgtctctaagattggcttatttttcggaattttcatcacaaaaagtcaaattttgccttaaaaagtgtaaaaagtcatgaaaaagtcacaaaaacgcaaaaaagtcataaaaatcccaaaaaagggtaaaaaagtcaaaaaaagtcacaaaaaatgtatgttagaagtagagtgccacgggaccgggaccgggccgggaattcccggtcatccgaggtcccggttcccggtcccgggttttgaaaagctcaggtcccggtcccggtagggcaaccgggaaccgggaaaaacagcactggtaagaatggggggtctgagtgaaaattagtgaagaaattggagtcaagggaaaataaaaaatataattatatattcttnaaagtaaactcctaagtgtgcaatggcctagtgctagtctcctgactgtcccttcttctttcc

SEQ ID NO: 17499 - DNA, 2812 bp, Heterodera glycines
  unsure (1)..(2812): unsure at all n locations
agaaaccatcgccgccgtctcgccaactgaaagagaaaaaaagtaaaacgcgttcgacagccaagtccggttgaacttgccggtctcccattccgccttttgttcgtcggcaatgtccattctgccagaagtgtccccactttcgtctgcttcttcgccgtccccctcaaattaattggattatttgactctttccgccttctctcacttcctttttgctgaccacttcctcttccaaaatggaccttcttatctcctccagttctgccctttcttcgtgtcggtcctttgcgtccgcctccctttcgcgttcgtaatttcgttttctttggaacagtgctgagcccctgaacgattgtttgtcattttcctttcaattggtccgttttggcagtctcccacctgtaatacttcgggtcgtcccgttcgtccacgtaatcctccagaaactgtcgcagtttcttcgcctccttttgcagcgttttctgcctctgtttttcctcctctctctctttgtcgtataatttggccattctcttctccctctcctcccacttcttcagcctcgcctggtacgactcctccttctctttcacctctttcttcagctttcgcttctcttccgcttcatctgagtcctccgccgaactcaaacttttccttttggcgtttttcttccgtttgattctcctcgactctgtagaagatgtgctggaataagacgacgcatcggatgaactcgaagaatagtgacgggacctgcaatgggcgaattagaaatgcccacccattggccaactttttgcgatttggtgatttttgtgaacgttttttcttgtgtcgatgactggcgaccgaagaagaacgggactgacggccctccttgttcgaggcctgaaaacagaaaaataaaaatgcaggaaaatgccaaattcaaaggcgagtgaaattcaacttttctcaattgaaaaaggattttatgttaaaaagaaagacaacattggcatttgtttcactttcactcgcccttattttgttttggcttcccgaaaatgaatttcaattaatgaggaaaaggaaaaagaaagaataataaatgcaaattgagaagtaaaagaaaatagggcataagtaatgagatgtttggcatttttgcgcctacttacgaatcctcatcgtagcagcgcagcctcaacttttggtgaacctataatacttcggccaatagagaaattactgtgtggtaaattatacgaatgggtttggaatattcgtttaaatatgtcacatattcatgtgtcaaaaaataaattttaggagcgaggaatgaatgcaaaaaccctctaataaatccaaaattctgactattgaaagtatgtaaacaaaatataattctaaaaaaacgaaggaaatcaaaaaaaaagtttataaaggggagttgatgaccaaaatttaaacttaccaccaattgcccaaagaagacaaaaagatccaaaacacggtgcctaagaatgtttttatgcaaaagaatgagtgagaagggagggagagagtgatttaagaaggacggactcggaaagagcaaagtttaaataatgaaagaagctaaaaaccttagtgcttccttcggccgggcttttttctttggattcgcctgaattgtttggtcacaattcgccttccctcaccgaaaaccttcgtccgtcggcatgtccaccaggtcggccgcctcgtcctccaaaaactttcggatcgaagctctgacggcgtcgtcgctctcctcgttggcggcgatgagcttattcttggagaattcatccagcagtttctccgtttgttcgtccgcctgaaaatggccactatttcgctgactttgagcaccaaactcactttaacattcagacgtttgtcgccgatggggaagtccttgaggacactcagtgctttctttgctccgtctgggtacataaagtcgcaaaatccaaacgctttaaattttccgcctgagtcttggagacgtttccaattgcacacggaaccgcacttcttaagtaataaaggttttaagagaattaatttttacgaaaaacaagacctttagaacttcctgtatgattcggtccggacatttatcggaaatgttcccaataaaaactgttgtggtcgttggtggcccggtgggtcttgccaatggattgggtggccgcagttcctaaaatgaaaattacaaatgctatttatcatccttttagtatggtcttacactattttagcgagaataaatgaaccaaaagaaatttaggcggttttataataataatttatcgaattcaatccctatgtagacatataaaaagcacaaacccttggaataaaattcggacgaaaacgtggacggagcagcggaatcccgggcagaatactttgacgttgtggagaaaagaagccaaacttctgtccagggaattgaactaaaaaagaaacattctgacgaaatggaattttatttgcttttttacccgactgattcggaaggcgaggaagcaatggattcggaaaaggaggcggaaaagccatttccaatgttggattatacttcagtaacaagctgaacacaaagacttgtttgttaggtatttattgtttacaaacgccagaaatacagtaatttattaatcgtaagtgataaacgaacaatataaacagctactgacaaattggcgagtgattntctgttagtaccacgtaaatatggcggagcctagagatatgaaacagggagaaacagcgcagaggcagagagagggacagt

SEQ ID NO: 17500 - DNA, 1948 bp, Heterodera glycines
ataattatggctgttaatacttaatattcatcattatcgtgttaaaaaaacaaaaaaaaatttttccaaaaaaaagtgaaaaaattttcaaaatagtgctctttgcaagtagcgcccaaattttctaatttagcatttttggttcaaaaacagcataaatgatctcttatgcagtattgatggcttatagtttgtttccgtgtattaaaccgatttttaagaaaaaatctaatttcgaaattttgacttttcgattttttgttcgagttcgggtccggggttggaaattgagaacgattttcttatagaagtttagtcctatattacaatactaatgccatagaaatttattttaaaatatttgtatcactgacgcattttccactgaccgattttccggtcacgaatcaaatgcaatcaatcaataattagtcaatcgtttaatgaacaattaagtagctcgatcacctccttgaaagtgttgatccatgttatttcacaaaaataagcacagcaatacaattcattcgcttttccatttttgctcggcgtgtgcaaccatttggacaacgcttggccggcagttgcttttggcccatcgtcagaaattccatcgggtaaaagaccaccagaatcaatgaaattcaattgatcaagatcagtgagaagtgtcggcgatgtgcgacgacgcaaattgtccaaatgattggcattaggaaagcacaaatggcgaatgcttttcgcaaaaataggccaaatttcgcgggtaaaaacatcccaaattggttggacatccgtataaattgaatgcacaaacacttccaatttggtgccccttctgtcaaagaatcgcttcttggagcggagaaatttgatcacggaatggtcaatgtagctgaagaaagataaaaatgctttagcgtacacaaaagttaagactgactcaatccaaaggttcttaaagcaaattttgttgggcatctgacgaacagacaacggaaaatccacaaaactgccatcgattcgtataaacattttcggttttggcccttcctccttttcaatttcgattgctctccaaattgtgaattcgcttttgccatcaaaatgtgcgtccaccaaaacatcgaaacggtcggaaagcaatgccattttgaggccgagtttggcatagttaaaagatgggagaattgtccatccacacgtcgttacaaagccaactgagattcgtaaaaaaatgtatgggtaaatgaaaattttgtaatttaaaaaaaattccttaccgtcgattcatttttgtggctcaattttccctttttccaattgattggtgtgtcaaaaaaggcaaggcaaaactctgttgttatgtaacttaaaaagagagagttgggaaaaatgagagagcaaaaagaacgcaaaaacaattttgaaacagaaataaattcatcacattttttacgtgcttattaaaaaaaaattttgaatgtggacccaaacttaaagagtacccactttggcgccaaacgctataacatttttatttatcattcgaattaaaaaattttgatgtgattttaaagcgcttgatagtcgctaatagcctgcaaaatttcaaaaaatctagttgagatacaaaaaagtttggccaaaaacctaaaaaactgactttttctggccattttggcgcagcacgccatatcttttgttaaaacgaatatatttttctagcatcttgcaggctattagagaacacttagacctattttgcggcgccaaaatgtcccgcgccaaagtgaccccgacccctttgctttttgaaaaaaattaacgtcaattttttgttttgttttttattgctttttcataataatgtttctgttgaaaagcagaaatatttaaaagttttttaaaaatttcacaagtcataataattgtttaaaagtcgctc

SEQ ID NO: 17501 - DNA, 1876 bp, Heterodera glycines
cgcccggcacaagctctgcagcattgccatgccattgttgatgaattcataatcataattattggtgtttctttggtgccattgttttggtccgtgccaactttgggtggccttttctctatttcataacataattcttccatttatacgcgaaacattcttcttctcagcaatctgtttggtgaagaataccaattgcaccatcttctcatctctctcggattaattttaacatgttgcaattttatatgaaataaaaaaatagtcaaaaatatttttaaaattaaaaaaaaacaaattactaaaatttttggacttcagaattttcgcaattttttattaggcttgttctgctttaggcttatctaaatatattttgaaatatatatttaaaattttaacaattcattaattcggcttttggatttcgaaaaccataaattaaaatcaaaatttaaaatccaatttaaacgaattgttggattgaaatggcacaaatttaaacacttggattccttagatttgcgtttaaatttaatttccttcaaatccatcagttcctgactttggctcatcattagttttccatgttggcataatcagaaaaatttgcataagcaaccgttaaaagaaaaaaattttggattcatttttgttcaggttttaaaagtttaagtgatacttattcattttaagaaaacattcttttaaatgcttttagaatggtttaataaaatgatgaatttttatttgtttctaaattatttttgtatttaatttatttttatcccttttaattttatccctcataaaagcttcttcttttttgacccaagtccaaaaaagggaattgttttgtttttgtgctgccgtccattgacttgaattattcacacactcttctccctcccaatgcttttgccctcccccggcttttccttttcccctcccatttgtccctcctccgtccgtcgtccattcttcggccctttcgtcgacgatttattccccccggggattgtttgttgtggccactgttgatgaaacaaaaaaacattgctttcattggctatatcaaactttgtagattttcttttattctcagtcttggcttttttattgcaacaaattttttatccaaaattttaaattgtttaggccttaattccctttcatttttgctataaattttttttttgttcgatagtcaatgactttctcgagtcaagaattcttccacttcacgaagtgtcggtctcgaggccaattctctttgccgagtcttggagtcaattttcgtctcttggttctcgagaaacggtatttctcgtgttttttgtgtttcgcagtctcaacagcacaaatctcgagagtattcgccatcactgtcttgattttcgaactccttgaaaaatttcgactctcgaccagtcttgtgtattttaaaacagaaaagtcccggtctcggttttttatcaaaattcccagtcccgctcagctctagtcttatgccctctcattccttcctttatctctgctactcattttcatcttctctcgaactaagcttttctctccctctctcggaatttcgcagaaattcccgaccatcgcggtggccttcgcttcctttccagcattattctttcctctctctgctgatcattgcttccgatcaccgccccgcttctccgtcgtccaattgtttctctgggcaagaaagcttcggcccactgctttacccccgcctcccacaattcggccactttcatgcccaataaattttttatatctccgatgcacttccagaagaacaaacggatggagccgcggggataacgtcaatataatccaaaaaacaacacattttggagga

SEQ ID NO: 17502 - DNA, 1162 bp, Heterodera glycines
  unsure (1)..(1162): unsure at all n locations
tgccctccccccccccaattcccacaaattgtgtctcaaattccaatgcaaaaagtcttgggatagggcagcgatttaagccttcatttctttatgtgaaaatgattcacacaaatattgcttcctccggcaaaactttcctttatttataaaaaagattctcctaagtttaaattaccatttaatgaatccctttcgttacattttattttattataaaatagttcctttctaattttgtttaaatcaaattttatatttttataaattttcttttttctttattttattttaatttttcttttacccaattaattccctcatggtgtttgtgcattttttacaacactttctttaattgcactgtcctttatttataaaaatattctcctaatgcttaatttgccatttaatgaattattttagttttttttttattttattataaaatattttcatatctaattgtgttttatcaatttttattttatttttaataaattttcttttaattttctttttctttttttacccaattaattccctcatttattttctggtgtttatgcattttttttcaacactttttttaattgcaagatctcctaatgtttaaattaccatttaaagatttcttttcgttacattttttattttcattattttcctttccaattttgttttaaatcaaatttttttctgatatatttttaataaatttttatttttttgttttctttacccaattaattccctcatttatttgttggtgtttatgcattttttcagcactttttgttaattgcttcccattctctctcctcccaaaactctgttccccattttctcttctcccgctgagattccctcttcttctcctgtaaatctctcctcccattcttcgtcgatatgcttcttctcagtgtttagctattcctccatttcttttggtgatttcgtggaataaaacagtgcgacaaattaactttggcatttgccaaagtctgccaaatgaaaaaaggtggcaaatccacgcaaaaaaaaaacgccgccgcttattctctgttctcattagcaccaccgacaatcaataattttaataaatgtaaatttctttttaattatattgcatttaaaccanaatgcttgaaaatactttttt

SEQ ID NO: 17503 - DNA, 2620 bp, Heterodera glycines
  unsure (1)..(2620): unsure at all n locations
cccccccccccccctagatacgcccttggaaaatatactatttttttgttggggtttgcaaaacgcacaatttccggcccccgttggagtggtgacgagcgaggcaattgccaacgcaccggtggaggacaaccctaaaggaacaaagggtacaacagcactttacancatgctaaaattgttcactaaagctatttggaagtttgtgataaaaggaaacaaacaatatgcgccaaagaccaattttttgacattttatgccgattaatggacgagggagaggggaaataccatcgttttgattggtattggtgagatatttaccggaggaataagatgccaaattcaaattgccatggtggctgttaagggcccattttttgggacgaatggtggtcacctgccccgtacactgcgcaattggagcgcgtccggtccgccatgtcatgcactttgccgtaattgagttgcggaatttcttcatgcaacaactgttcatcgtattcgtcgccaccggcggacgacggcccatcggagggcacttaaaaaatgggaaataaattggaaaaatgtgccgaaattaaaatgcgccacaccggcggatgagcatgaagcagatgaggctgagaaattgcagtgaaaattgggaaaatgaggtcggcgttgaacaatggaagaaacggagggaaagagacgctgagggaaatgcatttttatcagcaatggaaatggacgggaaacgtgtcaaagctgaaatataacctgtttttggggggaaaaaaatttaaagttgcttttcgttttcgtttcgtacgaaaacggttaccgttatttatttttatgtttcattttcgtccaacaaaattttttcttttcgtttggtgtagatcgttttgtaaaaaatgccattatgatggcaattttttcaggattttggtcataatttttatcaaagttttacgagtttttcttggaaatgtttccggttttaaaatttctatttttgtttcattttcatgaaatattttcttttcattttcaaagttattttctgttttcgcgcaactctactggggattgacggccaaaaatcgctgcttttatacacttttacattgcatttgcctacatttacagaagagtggctgctgcaaaaaatcctgtcttttacagaccgagttgatttgtgtttaaatatgccaaaattcagcaacaccttcattttctcattttttgtctccaacttctcgatgattctcgttcctaattgctacgctccaacccaactcatccattcatttaaagctttgttttctctcccaaggaaatcattgttttaattaaccaagtcacaaagtgacatttgctccctcgatcttttgcgtttcgaacatttgtgcccaaaataattacgcctaattgttttcggctcaaatgttcggactcaaatgtccgagttgctaatgtacgcacattctcgccacactcatcacaactcttttccttctcccactcacagttttccttccttctcttcacattcccaattttctcctcccctcccattcgtcgattaacgattaacctacattttgctttctctcctttccacatgtgttagacatcgctgcatctctgccttaacatttattcagcgcttattctcctctaaatttcatttctaattttctgggtctttccaattccatcacttttctttcccaatgtaattgtaatgtcatcattttcatagtaaccgtaatatacataacatttgaattatcttttagcgatcgaattcaacacccattcaatttggctatcatgcaaatcttcgtcaaaactctcaccgggaagaccatcacccttgaggtcgaggcgagcgacaccatcgagaacgtgaaagcgaagatccaggacaaggagggcatcccgccggaccagcagcgccttatcttcgctggtacatcgacttttcatattcctcaacttcttaaactaaacatcccttcatttcagggaaacagctcgaggacggacggaccttggccgactacaacattcagaaggagtcgacgcttcatctcgtcttgcgccttcgtggagggatgcagatcttcgtcaagacgctcaccgggaagaccatcacccttgaggtcgaggcgagcgacaccatcgagaacgtgaaagcgaagatccaggacaaggagggcattccgccagaccagcagcgccttatcttcgctggtacatcgacttttcatattccgcaacttaatcataatcccttgttttcagggaaacagctcgaggacggacgcaccttggccgactacaacatccagaaggaatcgacacttcatctcgtcctgcgccttcgtggtggaaagaactagaacgacgaacggaggagatgattgatccgtatcgatccatatattatgtaacttgagaccgtcctgtattgtgttccgttttattcatcatcatgaaatgtatttcaatgatcacggaacgataaacccatcaaaactgtcttatcttctcccgtcggaaaattaaatttggtattttctgtgcaaaaaatgctgggttatgagtttacaaagtaattggtaga

SEQ ID NO: 17504 - DNA, 3083 bp, Heterodera glycines
  unsure (1)..(3083): unsure at all n locations
actttgcgcgaattgttcgtttttggtaagcctttgttgcgcacccattctgtcagctcttcgttcggcgagtataagttcgtaatgaagaaaatcgagtggcacatctttcccgtgttgtttaccaatttcgtgttgtttaccaattccgtggtgtttaccaatttccctttgttttccaatttcgttttgttggcattgcattcgctgctctcgtcgcaattctcgcaaacgccttcccactttttccccatttttttgcaaatgctgtccaatttggcgctgcaattctttcccttctcggcacatgcgttcaccacaaattggtcgttgccatcctctgcaatttaagcattttgaaatgcattagtaatttgcatttttaattttcgtgcattttctaggacccggacaggggcgaggctcccttgggactttaatttttggggaaaattgcggcacggggaccagaaaaactgggctttcttgaagcgtgccaccgtttcgcactcattttttaaaccttttggctctgatactgtacttttaccatttttgcatcggtacgtctgacagccgacacttccgccctcgcacacttttgcctttggctccctttccattttcaatcgcttaagcagtgccgtaagctttttggtcatatttgtgttggcagtgaaggcatatacgcaagcgaattcaactcaattaaaaaataaatcgattaaaatattacaattgtttgtatttatattttttatttttccccctacccttttaaagcgcttgataatctctattttaaacatagcataacaaaattcaaaaaatttgaataaagcacaaaaaatgttatggctgtgttacggttttaatgtgttacaaaaatctccaaaaatattataaatattggcactaatgtatcacccctaatcaacagcaaagtgccaaaataagttctaaaaactgaacgaaaaatgtcagttttttattcttttaaatcattaaaataaagatattagttaatttttagaataggcccgtcgtcgaattgagcatttaaccacattttgcggttttagtgaggccaaatccaatctctcaccgtttgtctttccgatttgattttttgctttggtttagtgttttgcttttctgatcattcattccctgctcttccgtttgctgatcagtttgctcatttgtcactgatcagtgagcaatcactcacctttcttcggcccctccaacttcattctgtctgggtcgaggcactcccttttacgacacgttttacagtccggtttcccatccaggcaaaaggggtcaaaatctctgtggctacattggagccccgtcagatcgtccggcgttgcgcacgcagtgaccaaaaagaaatcgtggccatcttttcctgaaaaatggccaaaaataatgcatgctattattttatatataagagaaaccagattatatggacaaaaattcagaaacttgaatttaatattgaagaaaaaatcgagaactctgaattatggaaaaattgaaaatccaataagcttcaaccaagctcaaatagtaccaaataagcttctaaaaatggaagttcaaaaacccggactctaaagatagatttctaacaaatctgttgaatttttaaattttaattggcattttcttaccgtctttgcaacggtaagtttggcacgccacaccttcttgacagggttttatacgccgcttttcttcaactccccatttctgcaaaaatgacacgaggctgcctttggtggactccgacaaatcgttggaataattcgccgagtaaatgcacctctgatctgaacaatttcataaggagccgatcaaacgaaaaaccgctttaagtgaattattttttgggtttttaataaaatattttttgtctttaaattactcagttttaaatgggatgcgatttcttatgctttttcttaaaaagtcttggctatacttatgttagtgcgcggaattcttgttggttttcgaaatggatcagaacggagcgggcaaaatccgtatgggaggctaagttgagcagatacaaatttaaattttatttctcatttatttgagtctgtactcactcggcttgctgcggtgaaatgccaaaacgacgaggagaaagaggcggacaaatttgggcacagagaaaaaggccaaatttagcgggaatttgtgcaccattttgacgggcgagcgattcagctaatgagcaaaaaaaaaggagataaaaagtcaatttgaccaaagggttttttaagacatacgagaaattgcattttagaaatcaaacagacttagagcaacaaaaaaaagaaaatgttataatgccctaaatgtttttgaagccgcaaaaatggcagtgccaaaaatgactcaaaaatataagaattcgtttaagaatttatgagcgatttcgaaaatttattttattttttacattttagaacctactaaaatttatgatgtattaaattcaaaaattatttattacgatttgaataaaaattgaatgatagtaagtaaaaataaatagcaaatgggacggatggacgggcaaaaataaagcgacgaagccaaaaaatggaaatggcaatggatggaatgaaagagtgaatcattcattcattcacatttatctgctgatcagataaataaatatgaataattaattaatattccaaatttattatacaattgttaatgttaaatagtcaatgaaaaaattattataattaaaattaattattaaaaatatttagggattccattttaggtaaatgttcgggttgtgcaccgtccgtcagttcttagccaggaatatcgaacggcattcgactcggctgattttagactcctcggatttcggtttcgttacattgttaagaaacgcgtcagcatgctacgaaagggacggttaaaaattgcttttatgcattaaattttcctttgctcngacattttagtctatatacaacagggctgggcgtaactggattttaattanggaatctgtaattacggcgatttcctaaattaaa

SEQ ID NO: 17505 - DNA, 1683 bp, Heterodera glycines
aaaaaatttttaaaacagcaaaaattaataatatataaaaaaatttcatgtcttaatatctgccggattaaaatgaatgaagaaaattttaaaaataaatctccattcatagccaatattattttgtgtttgtaattcattttggccggagtttggtcgatatttggcattatggtgattcctttgatcggattagagtcaaaaacctgaaaaatttattttaattaataaattaaattttgaatttaaacataagggtgaagattttaaaaagtagtttaagaaaaaattaaaagttatatataataaaattaaaattaaatcacgcaatttattattaatcccaaggaactcattaaacttgtctctataaaagaatggatacttacatcgtttttaatttaatttcaattatatgtatgagttctgccaaaatgaaagaaattaagacgaaaaataaaacaaaagactgaagaaaataatataaaaaaacaaataaatttaatgaactgaataattaacaaaatatataatgattaacataagcagctttattttggtaatacttcaaaacttgtttaacatattcgattcatttaaaaacaaaaaaaaatagaaaaaaagaattgcataacatgaactcagaggcatactgggtatggagcaagaagtaaaattaattatttcgagtcatgctcgtgttttgttgaattttaaaaaattaaattttaaaaaaatttcgagggacaagaacttaattgacaccctaattaagacacagatttttttaatgtgtttgataaattaataaaatcagataagtctaagttaaattataaataaatatgagaaaagcgtccgttttgtataatggaacaattttataaaattattatttaaaatttcacatggtactaaacaaatgggagatttttaaaatgtcgttcaatgaaaggcagactaatgacacaaaaatttgaataaatacacaattgatgatattaagaggtgtaaaattaaagaaaattgatgcttaataatattattcatttatgaatttaaaaaagttagtaacataaaaataaaacttaggaattataaaaattttatttgtattatcttttgatattttaattaacaatatcacccatcaattcaaaagaaacaaatgaataaatagcctgcggaccaaagacaaattgacgagcactcgtgttcagggccataccctggcaaaaaggacgatgaaaaggcaccgaagtggtacctggtcgcccaaattgttgcaaatggcgtggttgcagcacgtgcacagctggcagagcaatggtctgccctaatttgggtggacaacgacattgcccaaaagacttggcccttggaagtcggcgattcggtcaaagtggtcagcgttgaatggacacagacggcaacgggatgggcaagcgccggagattggctgatcatggtcaacaagcgcttgaatcaccaagccgtggccaaggaggtaagtgagtctttccagggacctttcagctcggcggcgtgggagcagttcgaattccttcgggaaggagcattggaagccgttgagcttcgtcccatggtctcaacgcgtgcactgagagaacgagcgaacttctgaccaaaaaccgctgctccatcatcaccaaggaccatgga

SEQ ID NO: 17506 - DNA, 1516 bp, Heterodera glycines
cttcgaaatgagatctttgtattttccacaactattatttaccactcttacatagacagctactttttcatatattttttttattaatcttatttatatgattccaaaatatttatttgctttgcaaatatgaataaggacaatagcaattataatattttttaaaaaatctgttgtatttttcttattgctattttgtaatattttccttgtatacgatttttacaacttatgataaaaaataataaatttatctcatatcattttttaaatttaattttttattttttatacatacaataaaaatttaattagattttaatttgagacggttccattatctcacccaaattataatgtgtagatttttttctattttttcaaaatatatgattgatgtaaaatttattttatttaaataataatggttttcaataaaataatgttcgatcccactttgaacgagatgttgtttgagattatcattttagtgtctataaaattcgtcttattacattatagcatattcatttaaataaatataaattttgaggaataaatgctagtagtagatttatttaaaagattcaattaaattttgtacctggtttcatagcgaactgcttttttataattattattacatacaattttcaaaataaaattttgtgaaatatttcattttcagttttatttgactatttttattattatttgaaatttttttatttttggctatattattatttttattttattctttgacttcaaaaagtagtgtcgctttttgtatgggagcatttttaaacgattaaattatttttgaacatttttaaatgaaattgcttcctaataagcgtcacaccattctcaatttttattttaaatccattttttaaagtttattggtgataagtaatttaataatggagcttttacatttttattgtgatatatatttttgcaattcgatatttattataattcacccatttttatttcatttattagtgaaaatacattgattacaattaatacactctaagtttagcgtaagacaaattgggcatctttcgactccatgaaaccaactcttacacacttaaaaatgaaaaatatttatttttttattgatctgttttttaaatatttacattatatttgctttaatttaattttattttttatgttttaacatgaaactctcaaacaagtttaatacattattttaataatataacttgattttaatatttttttcctaaaaatacttggttaattttcaactgattatatgttgtcatatctacttcggcttggagaatatgttcaccgacggatcggtagttgtcttctttttcgatcagaattaggtcggtatctgatctccttagatcttttaacttttgttgttgattaaaggtgtcattctttacacattcttttattgtagtccgtcttgtttcggtccaagaatttcacttctctagtatcgatttgaatgtcccctgtttgt

SEQ ID NO: 17507 - DNA, 2401 bp, Heterodera glycines
agggtaattggtcagctaattaattaatgatggaaacgatcagagggaaagaagggaattttggagggaacggcaccggctatcaattatggaattaatggccaaaatgacaaacgaatggcgcaggtgttgtgcatggactgggcgcaggacaaacggcacttggtcagctcctcccaggacggcaaagtgatcgtctgggacgggttcaccaccaacaaagagcacgccctgacaatgcccaccacttgggtgaattcggcacttttccgcccgccattagtctatttctttcccaggtgatggcttgtgcctatgcgccgagtggtcaaatgatcgcctgcggcggtttggacaacaaatgttccgttgtgccgttggacccccaggaggacattctgcagaaaaagcgttctgtcgccactcacacttcgtacatgtcctgttgcactttcatccgttcggacaatttggtaattgctgggtaattaactaatggttgctaattaattgcccatttgtattagcttctgacgggcagcggcgattcaacttgtgcaatggtcggcttttgttgcggtccgaataaaataaaattattttggcattcagtgggacgtggagagcggtcaaatgatccaaaatttccatggccatcttggcgacgtttttgccattgacatccccaagtcggacaccggcaacattttcatttcaggcgtaagaatttggctatttttttgccaagactttcaaaaactcacagggtgccgatcgacatgccctcgtctgggacattcgaaccggacagtgcgtgcagagcttcgagggccatgaggcggacattaacacaattcgcttccaccccaacggcgacgccttcgccacgggctctgacgacgcgtcggtaagcaaaaaagccaaaatttaattgcatttttaatccctttcaaagtgccgtctctacgacctccgagcggaccgccaagtttgcgtttacgagaaagagtccattctgttcccggtaggcttttattggccgatcatttctcgacttctctccctaaggtcaacggagtcgacttttccgttagcggtacggttttagggttttcctttccttttaattccttcctttcgcaggtcgcattttgttcgccggttatggcgattatcgcgtcggcgtttgggacacgttgaaatgtgttcggcaattgattttgtacgggcacgagaatcgcatttcctgtcttcggtgcaggtcgaaaacattgccaattacttatacgaattcgcactaattaattcgctgtgttttcagtccggacggaacggccatttgcacggcgagttggcacgtgaccggaaaacagctattcctttcggacaaatcacttaacatttccgatttgcaatttattggaaatgccaaggacgaaaatgcagttgaaattgaccaatcactttttgaggttacaaaatcagtgattaacaatcatagaaagctgttaaaatttattaaagggcgacatcgattttgacgacgatgatgaggattacaaccccgaggctgatgtcggatcagaagatgaaagcaaataaagttatacactatttatttttgacaattgttataaaaacggacaacacaagcgtaaagaaccaaaatcgtaatgtacacatttttttttggcattgaatcaacggtgaaatccattctgctcttatgttctttcggttaagatactttgcacttgaaaatcataggttcccctttggtctgataaagcatagcattgagaagaaagaccgcatcatccaacacataataagcacggctcaagtcgccctcgcacaaatagggaagctgagaaatatgtaaacccacttttaatcatttttgggttttaaatgggtacttttgtccaccgaatcacttcgaacccattgggctccaatttggataatcgaattcacttgggcttcgaaggtcgttccttccgttggaatgtctgaagctaaattaaaacttcaaagcatgtaaaaatgtaatgggaacacatggaaaatcaaaattcacccggaagttttcttccagcggagacaattttatcgtcgaattcgacaaattgtcgaatagggagcacgacagaaagtaaaatgggacaattgtgctcgatggccaattcgtgcaaagaattcagcaatttttttgggtccgaaaaacgtggtaaataaatgaaagtttggattcaaaaacatttacatggtgtcggtcgagcagattcagtgccgttatcaacgaatatggtccactccgttgccacttgtccatcggcagaacggtgaaagcgcgcctggccaaccgccactccatcacctgtacaaaaggggggggggg

SEQ ID NO: 17508 - DNA, 999 bp, Heterodera glycines
  unsure (1)..(999): unsure at all n locations
aaaaagtgattttcttcatgttgataagataacacagaaaaacagtagaacaacagcagaataaatcaaataaaacaaatgatttgaaaattaattttctttaatcaaataataaataccatctgaaaaatgaagaaaagatgagaaatatttccaattttactattttacaacagtcaaaatagtttcatatttttaaattggaatttcaaactacagcagcaccaaatacaattagtgagtgattaattatagtttgaaaaacaaagaggggaaaggcggaaaagataaaagagagagagagagcagcagcaattgactttgttgtggtggatttaatttgaaattagtgggacgaaattcccgttaatgacaaaccgagagcacaaattgagttctcgaaactctcgaacagtccaatagaataagtgagttcaaaaaagtgattttcttcatgttgataagataacacagaaaaacaatagaacaacagcagaataaatcaaataaaacaaatgatttgaaaattaattttctttaatcaaataataaataccatctgaaaaatgaagaaaagatgagaaatatttccaattttactattttacaacagtcaaaatagtttcatatttttaaattggaatttcaaactacagcagcaccaaatacaattagtgagtgattaattatagtttgaaaaacaaagaggggaaaggcggaaaagataaaagagagagagagagagcagcaattgactttgttgtggtggatttaatttgaaattagtgggacgaaattcccgttaatgacaaaccgagagcacaaattgagttctcgaaactctcgaacagtccaatagaataagtgagttcaaaaaagtgattttcttcatgttgataagataacacagaaaaacagtagaacaacagcagaataaatcaaataaaacaaatgatttgaaaattaattttctttaatcnaataataaataccatctga

SEQ ID NO: 17509 - DNA, 930 bp, Heterodera glycines
taagctttagacgagacttaggcttaggcttgctgtggtttaggcttaggcataagcgtaggctttattttataattttttatcgtacggctgagttgtccatcagccgaattgtctcatcagctgagttgttctcggctgagttgtcatcagctgactagtccagaagccgtgcaacatgcaaccaacttagcctaaattttattacgcgcttttctggaagttttgacaatattttgtttcttttcgtgtgttggttgagaaaaaccccatttattgttcgagtgttttaatttgtaaaatggatgccatatccgttattcagcgaccgtgaaactccctaaaaattgttatttttttaaaatatttatttaaatatatatatccagattttgtgaatatattccccttccttttcaacgtcgtacttttttgggttttgggatgggaaggggcggggtcagcagaaccgagtgaatttcgattaatttcggaaggaaatagggatggtcagcaggtaattacaaatccagaaacataattacgaggtcgaaataaatgaaagtctttacacaatctgttcaaaaacacataaaattgcgttttcgccaatgccttatttatttatttgcaaataaaagaaaacattatttactctgacgcataaaacatgattaaaattaatcacttaaactttttttttctagtttttagtgcttttattctaattggtgtcacttgtgctaggccgatgcaaaaaaaaaaactcagtgattgctaaaaaaaatcacgaaatgtgattggtcattttccggaagcctatcgcaccactttcggggcaccaaaagtgcctgatccggaacgcagtccggcccggtcaagaacaatttttgttcagtttttcacgggctatctcacaggccgggtccg

SEQ ID NO: 17510 - DNA, 2615 bp, Heterodera glycines
ctcaatgcttttgcgtttttaaagttcaccttctgccggacacattccaatgctcgaatttggcgagtggttaattgcgcaaacaatgtcttgcacaatatctatccacttgtacgtgttccgcgccgtaaagtagcggtaaaggcgctctttgatgctacgattcgcacgtcggccattccggcatgaaattggggtgaagtgagcatacaaaagtgttcaacgtcttttgtgcggaagaactgctgtactgcgcgggcagtgaattcctttccctgatctgttaacaccttccacgggatatattttgatcttttgaatatacgatcaaaggcaatgatcatgttagcgctcgtcttggtctttacgggctcaacaaacacctgtcgactaagggtatcaatacagactaacaagtatttgtagccacggttttgtttaccaagtcggtcaaaaatagccaaatcggcctgccattcagtgtgtaagccaagtgccaatgttggcaatcgacggtagcgccgcttggcctgacgatgtagtgtgtatgtacgttgggtggctaaataattttggacatcagtccgattaatttggttggcttttccgcgcctctcagcagcggttcaacgctcgtgaatgatacaggcaaacttaggtccttgtacaaaaactcgagctgaagtttctttaaatccataatgatggcttaaacttaattggggtgtttttataatttcctttgccggattgaccttcgggaaataaatgcctactcaagagcggattctgccgtgccctttcaacaaattctttgaattcagttggctctttgttttggccacgcttgtccttgttcaacaggtgactaacaatgtcatcaacactgctggttataaatggccgcccaccggccctcaaaacttgcccttcctccgacacccctagagattgggcgtttttataaattaattttaagatttccgtttgggtgggttgtcgtttaattgaactcgatggccatggtatttcatcatcatcttcttctaattgttcaacattttcttttcgcgcacgcccaaccttgagatggcgacgcgtagcaacaacaattggtcttttaatgttgattggttttggcatggcgtcaaccacatcattcaaattttctaatttaacaccgacgggacgttcatcctcgtcctttgcgagcttgttgagacgcttaagttcctgctcatatttgactgccctttctgcatcatttatggcgtcatcgtttttgatttgtttaattctgttacggaccagcccaattggtgtaccgtctgacggtggcggtgctgccaaactctgataaatatcttcggggacaagcaaatagcgctttgtatgctgcattttttatttattttttactttgttacaccttatttataattttcaatgacatccgcaatcagcggaagagcaattgatgcaatgagcccaacaatagctgggaggccatctccgtgctgtagcaaatcctttttggcagagcgcgagcaacgtgtacgggcgagacgacgaagcacctgtgcatgagctttcagcttattcaaatgccggggacgcaaagggactcggccctttagaatgtataggcagatttcgactagacataaaagttgctcatcggacgcatctcgaataagggcattcgcctttttggcattacacaatgtctccaaaaagcatttatttattgttattatttgtgaccctttcattttggtaggtaaactatttgtttttgttcatatatatttgttctaaggcggatctcttccggactctctgggtgcatgtccatgagaaggtatccaaaattttttgcgcatgcgtcccggtaggcctcaataaaatgggcagtccttgacgggaaaaggtgggtggcgatggtgcgtatctgcaaagaacccgcaggatttcgcacaacgcaaaaatttggcccgtttgtccgctttcatcgtgtctggtgagtaaaactcccgtgctggaagaccctcaagacgttgcagcagatgttgtcgctgaatgtagaggtaggggaagaagggcttaaccgtcgcctgatggtggggcaggtcaaagctcttctcaccaacgcatccaattcacagaagaaataattgatgaagtctttgaaggtgactcgtcgttggttacgtcccgacagacgcatggagtaaatcttgagccccgttgtgcacaggcgctttggtggcatatttcggcgatgtaatgcctcaaggattagatggaagtcgtacttgccaccgttgtgcgcgacgcacaccgtgtgggccttttttggcccatgatgagtcaaaaaatccaaaaattggtccactgggtcgttgccgtcgttgtcgaatgagtggaagtagaagcggcgctggttgaatgtcggcgcctccactggcacagctgtgttgtctctgggtgcgttggcaaacggtggtgaagaccactgacgcaactgttgtcccctcaccatccctgtcatacagacgcatccagtggctcttcttccaaggccatcgttaacgctgatgcctgcctggatacaa

SEQ ID NO: 17511 - DNA, 1545 bp, Heterodera glycines
tttcgtttactttttgtggtaatttggtgcccaattcttttttccatcttagaaatgttgcttcagaaatacttaatcctttcgcaaattctttctgtttgccttggccatataattctttaaattcatcaaatcgttcaatgaattctctctttttctcatcatataattgttttttcattttctttttatttaaattcaattcatttttccatttttgtattaattttcgatttgttcctaataattttgcaattttcctctcaattttgctttgatcttttcttttgtatttacctttttcacgtaatttttctttaattgcattaaattttttgacaatttctctcttttgctgatcatttatattctgatcacttttaaaaaggttctgatccgtgtaatttcccatttgatcatttcggtcatttcccatttcttcacccatttgatcaactgctgctgattgtgagttctcatttcgttcatttagttcaatttttatcactttttcttctcttcttttttgtcccatccatcgccaaatatttcttcaaaattcggacggattttgccggattcaatacaaaaatattaaaaaatataataaataccacaaattcatttttacatataatgcaaaatatttagaataattactttcatcgaatattgcccatttttttctaatgttactggtattaataaaaatcgttaaatgtactgatttttctgatatgttctgatgaataggcgaacaatttcagcaaacaaattaaaaaatattattaatttaatgataataaattaaaaatacattttaaatatatttaaaaatatattttttaaattctgctttgaaacacactgcttggggaataataggctaacattggcttttttccaggattttcatttttatagtgaatgagtggcgagtgtaatttgtaatgtaatgcaatgtttttgccgcccgcaggcggggcaaatgaccgctaattagattatttcaaacaccgcccccccatatgtaaataaatggcaaaaatgtcaaaatatggacataaatttttcaaaattgaatgtaaaatttcttcaaatttattggttgaaatggctctaatgcagtttacgcgtcgcatcttaaaggagcacataataaatggaaacatgcataaatgagaatttaattgatttattaaattaatttcgatataattaatcgcattagaattcgactaaatgttacttaattattaattaatatattaaataaacgttattattttcaatttacaattttatttcttttgtcccactattctttctacagaaaaacctcaaacatcttcctcacatttacatcaaatataaactaaattacaatatataaaacaataaattggattattatgaattattttcactacacgtataaaaaaaaacgaatggaaatttattataacaccgacagaacttatgaccataaaaaagattcccttttagagtaaccaaaaaaaaataattaattttcccactcacttt

SEQ ID NO: 17512 - DNA, 2309 bp, Heterodera glycines
ttgatcctcaaaaattctgatcaaaactttcttagaaccagcaaaattaagaaaatttaatattattcggtagccctaagtattttcaagttgcctgcaaaaatttaaaaaaattcggccaagcttcaaaaaagctttggacgaaaatgtctgaaaacctgccactttggtacttttggctttaactttgttcaaagttgatgaaatttttttgaaatttggttatctaatagaaaacttttagggatatcgaatgataccaagaatgtttaatttagttgacttagaaaaagttgtgggctgtttttgttgaaaattttcatttgatggttttttatataacgcccttattgatggttttaacatattacgacatagcaccccctcaagcaatcctgtaaaaattcataaaatttagttaattttcaaaaagtgatgaggaaaaggttaaaaaacctagttttttgagtgcgtctgactatgcataagtagcctaagccgaggctaggcctaggccaaatatgctgagatttgatattttactattttaaagcttacatatttctttttacattttaatcgccgaacattttaggacttttaatgaaaaaatatcaatatatataaaatcattattaacataaatgaataaagaaagatccagaccattaacattaaaaaatcgaaatatttaatattaaaaaggggggaaagaaaaagatccggaccaaaaataaagaaaaatgaaaaaatcattaaagaagaaaaataccaacactattaataacgaataaaaaaaatcgactacatgttaaatgattattaacataaaagaataaggaaagatccaaaccattattaacataatagaaaaccgaaatatttattattttataaaatatttttatttattaaaattaaaatgaattccttcgaaagcaatgaaatggaaaaaggagcaattaaaaaagaaatacaaaaagagcccaaaaactgcgcaagaatgcaaagtctgtggaagagttgcgcgtttcaagtattacaaaatacagagctgtgatggtaagcgaaaatgtaaattaataattatttatttaaatttaaaattacaattaaaaatttacagaaatttattagtaaataacttttttagcctgtaagcagttttttcggcgtacaattgttgatcagcgaacattcatttgcacgaaatcaaattcatgtgtcataaataaaggttgcttttgcacatttttggcattttgagtaatttttaaaaaatagtaaaaatttttattcgtttgacccaaatgactttcgaacctcctcctaccccgtaaaaattcaatgaaataaaaattaaaataaattaaaatttcggctaagaaatgacgagtggtcgtgcgtgccgtcttgacaagtgttgtttgaaggcatgacccaacaatgtggaagctgaacaaagtgcggaattaagccaatcatccaatcgctttacgaacgccgtgcatttcttcagcagcagctgaaggagaatgaagaaaaattctgtcccatggatacagtaagatttaagcaaatacagtaacattttggattacttattatttgattttaggaaacggtaattgaaaatggcacattcgatcagagaaatgaaggtaagtcagaaccactggaaaatttattttaatttaatttaccagtaattcggcttttaataatgatataattttacggttttaatattaaattaaactcttttaatctaattaaatttttaaatcttttttttaagaagatgtgatcctcgttcgtatagaacgactcgaaaaattgctcgagggtcagggaatcctacccttatcccaatcctcgaacgggtcgaaaaattggtggaacgactcgtggagggtgagaatcggtatggacatcgatttggtgacgcccaccacacctccatcacttcggcccccaccgccaacaacggcatccaatggggtcaaccgcagccttttgctgggacggacgccgtgtcgcagatgattaccgaggcaatcatcaattccaaatagcattttgtaatttttaattgatcaattttatttgtttgttttcttcttggcaccatgtaaaaatttttttcatatacttagggtgtaacataagttctgtcggccttaattattttaaaattaaaaaattcataactccgtaatttctacatttattttaataattctttttttattttgttcgtcatagtgtcctattgcaattcttaccatggtttcactttttctttgctt

SEQ ID NO: 17513 - DNA, 1148 bp, Heterodera glycines
  unsure (1)..(1148): unsure at all n locations
aaattcttttggtttattttttgtctttattaataatgagtttttttgtcttattacccgacctctctggagaagtgcgcaataaattggcacagattggcaaatgattttttaaaatataaagtgatgggcaatatatttaatgaatatttaaggaaataattattctagccaattttttgtttcttttaaaaagaggccgaaaagtggttctcaaattggaaaattgtgggatggccccgaaccctattcctgatattttttatttaagtcagtagaaataatgatctgatccagtttttccatttatttaggtttgccctaaatttcaggtcatttttcaggatagtttcacaatgatatcaatggccaacgttactttgtcatcatttttgtcgtaaaagcgattgctcgggtccattaattccttaattgcccataattaggcgccaattaaggaatgccattttccgcaagtgcaatgaaagaaggcaatccccagcccttaagatgaattgctaaaaattgcattgaatttttcagtccgtttttcgccccactcattcgcgagacaatttggaacgatgtcgaacaaacacagctccaatacggatcgtaaatttgaaataattgttttttaataaatttaaatgatttattttattttcacaccttccgccgttgaatgggtttatacaataaaaggcaaagtgatacacatttcttatcaccattatcagtgccatctctgctcgtatttattcaatttttcatgacagtctttttatgttcaatgtttcgctgtatcgacgactctccacttgttcaagcgattatttccaaattttttcaatgtcaattgaagagtcccaaattctgaaattcgttaacaattcgaaaattgcagtgggtacagtatgcggtcggacggatggtaatggtacttttccatgccgatcacttcttccgccattaaaaccctcaacggaacagtaaaaaaaatccagtttcttgacctttttgaaaatggcaaataaggaaattactccaaattttcagacaanatttgaactatcacacaatgaaaattcaaccaaatgatttttctattntaatattaccaattttcttcgaaaatttattttttt

SEQ ID NO: 17514 - DNA, 613 bp, Heterodera glycines
gagaaaaagaagttttcccagcatcgaggctgatgaaccctttgattatttaaaaagctgtagttaagtcagtgatttttcttctttcttccaatgtgagtaaacccgtgatttttaatctttccccatatttttgtacacaaaaccacattttgtaagtgcttttcttgtaaaaaatttttgtacccgctcaattttgtgtatatctttttttaaattagggttccaaacttcggtagcgtattctaattgaggtcgtacaaaagttttataggctgctgttagagtttttatttccctgcttttcaacactctcaaaatttagaaaattctaagatatgcgtttcgtataattttgcttatgtgttctgaaaaattcagtttcgagtcaattataattcccaagtcacgaacattatccgattctgaaatcctttgtgagttaataaaatattcttttttcatattatttttccctaaatataaaacaaaacatttttcagttgaaatttctaacccatttatttttgaccatttttccatagcctcaattgctttatccaactgattcaaagggtcatcgttttcatgtgtataatataatttaacatca

SEQ ID NO: 17515 - DNA, 3090 bp, Heterodera glycines
aataatgacggaggggggggggggaggtcccgcaccattgaccacaaaaataatcacccaaccaacacaaaagggatttatttttgtgtttttccctgtttacatgaagaaaattttgtcagcgcgatttttggttctttgattttttaatatttaaattttaaatggcaattaaatggagaataattaattttttgtcttactaagagtttcaaaaactccaaaaaatgtcgataaattggggacacaatgaaagttttttgtgcattcgaccgtagggtctagtcgaaattttgttttaagaatacggtatgtgcgcccaattaccatagacacggacagatgccgtttaaatgaggcatttttttggcagctaattacttaataatcctgcggataaaatatgtccggacttggatatatgaaatgcaaaaagtataaagcatcacaatatagcataggcacatgggcttggtctttcataagccatctgttgctgttgtggtttttttttcgacgtcatcatcactctctgtgaaaatgatcggcttttaaaaatatttgatcgccattttcttgaaaaagcatcgaaaatgatcaataaagaacacataatttatttatttattttataaattattttctataatttaatttttgggaattaatagctacatacaacagatatgtatatttaagaattaaaaccgtaaaacaatgaaaattaaaaaaattactaatatcaaaaattaaaaattccattttatgcaaaaatataaaaataaaaactcatattaaaatgcaaaaaataatcaccatttttaatggaaaaacattaacctgtgagaacaatttatttgttgaccatctgccaaccctcaattttgcagaaaatttcaattgcccatttttagaaacttttgtaaaaaactaaattaaatttggtatacaaaattttacaaaaaatctacaaatcccccataaatgaaaaaaattccaaaatggggacgggagaagaaaatgtacaaataaatcgcaaatttgtggacgggaagaatgggtgtgaatgaatgtttcggaaggaacaggaaattcatttggggaaggacgagaacgatgggttggggttcttcaacgacgacgacgaggaaaatgtttcaaattgttgagggacggaaggatgacgagggaaaatcaaatcaaatcaatcgagattctcgagaaaatgaatgaatcgtcgagaatgggacaaggacgaacaaaattttcaaattttttcaaaatttaattacactaatttgaacaacagatggttttcgtggcactggcctgtttattgcgcaactttttttcacctttttacacattgggaattataattgaaaatttaagcaaatttttaatttatggcagccaaaagttttcaaaaaaataacaaatattttcaatttgtaaaaatggaatgaaaaaatgataatatgtatgaatcgtcgagaatgggagggaagggatgaacaaaattttcgggttttttcaaaatttaatcacactgatttgaacgacagatgggtttggtggtgaaaccggcctctggccggtttattgcgaaagatttttatttttaatttaaaaaaataaaaaatcggaaaattgaaattttgaattatggaagccaaaagcttttttcaagaaaaactcaaccattttcaatttgtaaaaacgaaatgaaaaaaaatgataataagaagtggatttaaaaaatcccaaaataagtgcgaaaaatgtttaattcttggaattgaaatgaattatattttatatttcttgaattaaatgcaaaaaaaaagtttttttttccgtgggttcaaatttaagaatgcggtaatgctgaaaattgaaaaagtcaaagacgatatttgtggattcactcttctgggataccaattttcagttatttaaattattcaaaaattacccaatttaaattttatttatttgatttatttcttatttattatcacagactcactgacttttacccaaacattaaaaaaattatggaaataatttccaaaaattcgtaataattaaaattgagaatctttaaattgaaaaaatttatagaaaatacgaataaatcaatcgctaaaatgaggcgcataaattacgagacaacaaaaatgaggacaaattggtgcctgtccagcagtatacaataaaaaaattaacaaattgggcacctaaatcacctgaaaaattagatttactcaatttttagtggtgcacaatttttcgggactgatccgtccgtccgcgtgccgctttttaatccctcacaaataattaatcaattttattttatccaccacagcactgcgccccgggcgccacttttgcagctgcaccactccaattccaagctgtctacaaaagttttgttaaaatcaccgaataaaaattggcccattaaatatagcacccaaaaatggcaccatatccccacaaggattttctgatggatcggaacataatgatcgaatcccggttttgccaacaacggttccggacaatccgtcagtgaaggacaatccgtcaatggagtcaggatttttttttcttgcgcaatgatcaaaaattttgcgaaaataattgttcattttaaattgaaaaacaattaagatggattttacaaacatttttaattacttaataattcaagtaactttatgattcttttgaaatattttattttttttaaattactttttttcactttataaaataatagtaaaaaaaagtattatttgtttttttttttttttgtaatttaaatcattttctttcattatttactgacggattgtctgtgtattgacggtgctatgtcgttagtcaaaaaaccatcaaaataaaaaaaaaagatttttgggcgttagtaaaaaaaccatcaaaataattatacactatacgattatggcctatatgcatgcaacactcaattaatgccaaccacttccaaaatatttgccgcactgattattaattaatgcaaagctatcatcaataaaacaaaaccaaaatattacgcaa

SEQ ID NO: 17516 - DNA, 919 bp, Heterodera glycines
  unsure (1)..(919): unsure at all n locations
tatactcatggcgctttcctatcgacaaaatatgattcctcatagttttttntaattgtattttatcattttttaaagaaaatccgtaaaaattgagcctagtaatcccaaaaaccagccttttttgttgaaaatctgttaacaaatctcactcaaattttgacccctcttctttcctccctaaaagttttttggaaaaagcgcgccgaaaagtgatgttaaaagcaaatctgaatttctattaatattcgatcatttggtccaaaaatgattaattgtttgaaataattgaagtaaattcgatttgaaaattttaattaatttaaacttagctttaacttttggattttattaaataaatagcaaaataaaaaattaattttgtattatttttacttgaaataaatttaattttttttaatttttaaaatttcccggttggtcccggttcccggtcccggacaaaaatcgaggtcccggcttctcaggtcccggcaagtcccggtcccggttttgctcaaaattcccggtcccgctctactctagttaaaacatttcttgcactccatttggtttttgataagtccatgataagccagaaattgtagaatttcctcagaagtctgcttgtaaatccaacgtaaattgatttggttcaaagaaggtggccgaatcggcagattgtcgtaatcaattattaaaaagcgtgaaatgcgtaccatctggtaaaaaaacaaattctgcattaaaaataaaagagttttggaacgaaattttgagggtggaagagcaacagtgggctcttaagaaaaatacaaagacaaaatggtataaaaacaattaatctttaacaaatcattcagtagtccttggaagacatcaacggtataaaatttcggtacttatgtgttatctgtgg

SEQ ID NO: 17517 - DNA, 1515 bp, Heterodera glycines
ttttcacccagtggaatcttaataagagcaaaagtggcattaccatttgtttcgtgggattggctttgactggcacaacgcttccttcgcccttcacctgtgccggcgttgaagtggcaccgccggtgccaccccaattttgccgttgtttggtttgtcgttgccattccgccgtcgttggcatttgcatcgattgcgtcctaacggcgccgctggcacttttcgacggatgaggtcgccttaagtcacgccttcaatcaatggaaatgcgacattaattggcaaaaatgcaaattattagtaaaagggggaggggacaatcgcttggccataaatgcgaaaataattctgccatctgaaacaaactacactcacaaatcaggtcgtagattcgaactttccccttttattggccattctccgcgttccttcggtcatttccccccccccccccccgtacactttgacttttgttttgccgtacccaaaaacaattggccattgggacagaccgccgtaagagccgccgatttgactgttcaaagggccgtaagggcccaacggactgacaatgctttcgctggtgccgtaatggcccacaaaaaggcccgccttcagcccgtagtctttggattcggcgttattaaagcccattgctttgggatttgctaccgtattcacctaccatattttgtgttcgactgtaccaccggaatttgtccattttgaattcgtcgtcggctgttcccttcctccgaatttctctgctgttcaccgttttctgctgctgctgttccctcgaggggcgtgtccaagtctttggcaattagcgcttaattagttggctttgatattggccctgcctttttccgctttcgcttcgtgccgtggcactgttccaccgattccctccgctacgcccatttccctttccgtcaaaatttgtgccaaagagcggacaatggaaagggacaattgggcgatcagttcattcagtccaatcggctgattgtgccgcggctgaggtggtggggaccaaatgggcaaatttcggtaaggcgacggcgcgggggcaaaagcaccggcggcagagttttgggggtctgaaaatgggctgatcagcattttgtgatggagtcagatcgatcagcaaattttggttatacaaacactgataggcaatggaagggtccgcaaaagacgagccaaacgacgacggaaatggccacaaacttttggcgtaaaggacagggcgaggagggccaaattctgaaaatgaaaagggacaaatgggcgatggacggacgcaaggaacggaagggcacctgggccaacggatgatggcaaagcgaagggcggggcataaaagttgacattatgcaattgacaaaaggcattagaaagaaaagcgaagtgagcgatgaatggaaaacaaaaaaagcgcataattaagaggctaaaaaatgggaaatgccccagaaatgggggaaatgccaatgatcagccaatccaatg

SEQ ID NO: 17518 - DNA, 3006 bp, Heterodera glycines
  unsure (1)..(3006): unsure at all n locations
tcagatcatcactgatagcgctatgcaaattcgttgccatttcaaatctgcgcaatgactcctgtcaaactgtgccatntaaaaagttaataatattccttttttattgttttataaattttcgtgctgccttagctaactaaaaaagcttgatctttaattgaacgactgattggtagccaattaaaaaataataataattttttattatttttcatacttcgctttcccaacaaatttttatgggttttgcgacacgtgggcacagtctgttgagaatgggttcagacagtgcccagaaacgttggcaagtcatttggacgtgttggtgtaagtcagagaatggcacaaatttgaacacctcgtcccaagtttcgctgggaagccaactgcaatggataacttttttcggcatcctagattttttctggacctggattttcagggatttttatccaggatatccagatccatgtcaaatatgaaaaaagcttgatttcctgggcaaagttttagaatttttatttcatctgaccgatgtatttttaagtttttcaaaaaattattaaaaaatttaaaaacaaaatgttattttcaattaaatatttttatatgttccaaagcaattaattgattttttttaacatttgtttgctttttcaaaaaaatttttaaaaaatcaggtccatgcctcgaaaagcctggatttttcctggacctggcgtttccagggtttttgtccaggaaatctaggtccaggtccaacatggaatccagatataggctgccaaaaaatttgacattctacccaaaattctgtacaaattcgtgaaaaataaattttaattttacattgttttctttggttcaagtgttaggtggccagactcaaaccaactgaaccaattgtgtgccgtttcaatgtcaacaacatttggtccttcgacggcacaaattttgcgcactgtctcctcggcattggtgcccttcttccaataatgacgcaaaagtgcgcgaattgcataaatttcggaaagttgctccattttcaggttaatttaattgaaatctattattgtaaaatgcgtcgcgtatatatcataaaataattttaagatttacaataaacgcctaagaagtaaaaaagttttccaagaaattgatcctctaaatttagaaattttttcttgataaaattttttatttaaaaattggccttattcaaaaaaaagttgaaatatttaaattactttcatttgcaataaaatatagacaaaataaaaatttttatttgcctatttttgtgcctatttaatgcatattttgcgttttttgtgcctaaaaaaggaatccctattaattaatgaatgcatataaatttaatttataaattttaaaaataaatgattaaaaatgttttttttaatttaaaattacggaaaaacaaaggaatattgtcgagaagaaaaatgtgaatgaaaatcaatatgtggtatgtatgtacgcgagcaaatgttggcgaagtgaagttgaaggaaatgggaacgggtcgtttcggcgccgccgattcggcgccgccgattcggcgccgccgtttcggcgccagggtcgtttcggcgccaaaaatcaaaaacgcagaaatagtaatttttttttgttttgtttcagaagatgaagtcaataaaataatagtctatattaaatttaatttcttcattttcactttcatcttttgtgatcttgcataattttgtcggtaatagttagggcggggatttatatggacataaaatcgcaaaatatggccataaaatatggaccaaaaatcgcgaaatatggacataaaatggcaaaaatatggacataaatttttccaaattggggtgtaaattttaaaaatttcttcaaattcgctcaatgtaaggtaaaactttcaaaaatagctaaatatggtattaaaataccatttttgaagaaaaaacacgatacaccttaaaatttactaatttagcaaaaaaatcaacctgaaaagcgaaattttcgcttttttgtttattttgacataaattaaccaatttttaagaaaatttataattcatcaatattttcgtgaaaattttgctaattaaatgattttttgaaaatttttccggtttttgttgtccaaaaggtcaatttagctgctaggggccgttctaatagaggttttttggaaaaatgcaaaaatatggacataaatatggaaaaaatcccaaaatatggacaaatatggatatagaaatccatcctagaagaacagatcaagctaaaaacatatttttcgtgcgtttcggcccaaaaaaaatggtatccaccagttaattgactcgcaaatgacttttgtcaagactacagtggaagcattgaaacaactccagacctcttttacctccgaccaaatgccaatttttaataccctaattaccactttgtcctctcaaattgacctgcttaatggatcgatttcccaactccgctccactgctctctccactgaaggcatgccaatttcagcggaggaattggaaagacagagaagtgtcgtcattattggcatgccagagcacaacgacagttcaccagcaaagcgggcagagatggaccggtcaaaaatcaattgcttattcgattcgctggggatcgaatgcggtaccattgcctatcgcatgggtcgttcctttaacccagcccaaaaaagtcctcgcccattgaaaattctcttgccttcccgtggcttccaaaaacaggctctcgctggggcaagattggattgtgtatgctgggaacgttattttgagagatgaagtgcacatcttccggagtcagtcaattcgtgaatcaaatttttaaattttacaccaaatcacaaaaaaaaacaaaacacttttacaaaaagagtagattacactttccggtcggaagaagaaaattcttaccaaaantataaataattctaattcactacca

SEQ ID NO: 17519 - DNA, 1820 bp, Heterodera glycines
ccaattgtaaattcgggaaaaaaaattctcgatccaatttaagaatccggggaccggataaaactggtaaaatagacaaaacaacattttaaaaattttttacttcggcttgtaaaaaagtatgaatggtcattgttttgaagctttgcacggttctttttttgttagaagtatttccattttcttctctacaacagtaaacataaatatattgtcttataatgcatgagaaacatcaaaatgttgaaaatccccttctatttttgaaattttgccgaaaaaatttttggtacgaaaatggcctatggcatggaaatgggtcgatcccctatgccaatattcatgttacaaaatgtgtcacttaaacatcaattaagcttcaggaattcctttgttttcgttctttcttttcatttgcactgtccgacggattggaaaatgatcaccgatatgcaattgggtattcattcatcctttggcatttgcttgttcctttcattttttgctgcttaggtatcatggccaatgttctcggcgtctccattttcattttggtcattttctaccattacatcgtcgccaaccaaaagaaacagtcgccgcagtgagcgaaagaagcgaagaaaacgccgaagaaagtcaaatgatttgatgggttatgattaattaattaatttatgtattaattgagagggacggcgcataaatttgtaattgattcattgtaaagagaaaacaaagttaattacacaaatgaccaacaacagaaatgccatattcttaaaaattcccaaaatggcaaaaaaaattttgaccaaagaaaaaaccttcggattacccctcctgaatttttttctagctacggtagcccataagccttttagtcccgatgtcggtactatttacttagaagtgaatattttgttgattgattccaagtcagtcagcacccacaaaaactcaaatcactttatcatagacggcagatgtagcctcgacttgaaacagaactttatcaatccgaattttgagcggactagaaagcacaatgggtatacaaataatgaatgtcatttacaattcagatcgaacaatgccctaaaagggtcaaattagggagagagtcagtgaaagagttataagatattataaggccggatgaacaaaaatcagtgggaaaataagagatgaaatggataattaacggagagaaattggggaaggaatgagcgaaaggtcaaaattttatttacaaaaggaaatggcaggcaaattcagaaaaaatccaaagaatccttgaagaaagcaacaccaaaagtacggttgtcgtgcccataactttaactgctgctgattgtgtgtgtcattcatttgatgccggaaatgcttctcctcaggacttttgccgcgtgtttgcacgccgcactttccaccgcttgttggtaatgtttggccaagcccttttgccagaataaaatcacaggcgagtcctaaacagagaaaaattggccgagtttttctatgttttacaaataaggtctctattgttagtgcattattttttgaaaacaaatcaatgcatttattagtttcttggtcctttgttcaactgcattttttgttaaatgggggggggggcaccaacgaaaacattatgcgccttattaaacttttgctgcaggttaaggcctttcatactcactttgggctgacatttgatgatgccgatcactctgttcagatcaatcgcattccgttgcttctttagttgaaatatcaatttggctttgttcagccaatcgttccgcgtgctttgaatg

SEQ ID NO: 17520 - DNA, 786 bp, Heterodera glycines
aaaacatcggagagatttcacgacggaattcgcacggaaagagaacagccaacaaagttatgtctgactttttagaagtcaaactcagaataataataatataagaaactcactcatgtgggaaagtgtaatgcttggaattcatggccattcggacgcacccgacggggaccaattggacgagagaaagcagaaaaagacaacgggcagtccgagaagcacttctggccaaaacctagaaagaaccggagaatattgggaagagaaaaaattgtcggcattaaatgtgccagacctgtcctccaattacaacgtgccaaatgagtgtcgacagttcgcaatttaaccgatcgacgattattcgcaaattggccaaatgaatcagcgattggcgaggcgacagttgggcgatgagttccctctcttccgatgagtccgattgttccatttccattgcctcaaataaacggtcattttccactgggacaatgagttttcaattcaattgctcacagtcagcatgtcctgagttggacaaccctcgagaacaatgtctttgtctaaggagaaagtttgtaattatgaaattttagccaacggaaaaaaccaaaaaaccccaccgagaccctttaacgtcttcagaaggtcgagcattttgctaaagaggaagaaaatgaatcaaaatgagagggaatcgctaacgcaataaacgatacaaaactctccaaaaatggaaattatttctaaatgataggagaccataaaaaatcttaaagtgacacttat

SEQ ID NO: 17521 - DNA, 2232 bp, Heterodera glycines
aaaaaaaaaacatgggttttatctagaagtcccttcccggtgattgatccaaaaaagtgacacacggcgacccggtaaaaacacactgggcccgatccgattcaattattagaaggcacatggaacgtaataccttgcgaaacttggacattttggaattgtcgtcgctttgtccgccgccaaggttcaaaattttgatggcctcctccagatggttgacaagaaactctttgggcacatgtccaacacagttggtgcgcaaaaactccgcgaaaagggcagtaagatcggatgtctaaaataaaatgagcgattttaataaagtcgaaaagaaagattaaaaattacactgcgattcaataaaaacaagacggccataaaatggctgggcccgggtccaaaacaaattcaaaattatccattgttcaacagataaacatttttacactttacaaaggctgttttcaaaattgaaaatttttctaaaattttgcaattgaggaaactgctgttgactcaccggcaccgactcggtgacaacgggcagaggacgagggtccgaatcggccgatgttgagggaacagtgggcagcacctaaaataaacacaatttatcaaaaatgcaataaaagaaaaataaatttgctattaattgagaacatttaaaaagcaactaaagataagagagatatcaattacatttgttgatcggtgcgattgcaaagcagccatggttttgatgaaacgcagagggcggtcgtcccaaggcggatcgtaaatcgattcttcctaaaattgttagggttttacattttttcagtaactgctattgactcaccggcaccgactcggtgacaacgggcagaggacgaaggtccgaatcggccgaactggtctgatcagttggcaccgcctaaagtaaacgcaatttagcaaaagtggagaagaataagtgggttcaaaatttgcgtaaacctcgtggtcactttgctgctggtgttgcgaatgttcgggtgacaaatcaaagacctataaattagttggagaatgcaaagaataatcgggtcaaataatgcgcataccaaagcgaagaatgagctgagctcatcaagaaattgctgaacggtgcgagaagtggtggttttgagatacttccaggcaattgtttcttcacaatggtagaagaacttgaccagtaataggaatcggtcggacaattccttaaatcaatttatggacatttacattatttctacacccctaactgaccttctcttcttccacggttggtcgatttgaaatggggtaattctgaattttgttgaaaaattggttaaatatttggtaaagtgtaccaatcaatacttacgaggtattcttcaagataaaaaaggaagttgtcgatagtctgtttttgtttttctggcccagttgatgacacgatacagagccaaattggctcttgtcttgcaccattatacaatcgttcgagttcattccggcgctgaataaatcggatataaatgggtcagaatttgaccaaaacccttttctatttctaatatgtaacgcacttttttaaatatttccttgcgtttagtgacatggggaatcagaaattccctgagtaaccaggaagaagaaaaaatgttcggaaaatttttgtttgggtacaatatgtaaagggtcatttcactcaaaagttcgggcggcaaatttttcatagcaattgaatttcagggacaattttagggtttggatgaagggccaatatggaattttgaaataggtatgtgtataaaatccgagagatttcacattttcggataagacactatgccaacatttactctcatttttaatttaaatggaaatgcgagcggaccggctcagttgggcccggcacgtttggaccccagcgggttttccgctataacttttttctttgtcaaccaaatccaacattcttggtatcattcgaaagccctaagtgtcctctattagcctgcaaaattgcgaaacatttcgttaaagttcaaaaaagttatggtcagaagaattcaaaaagccaaattttccaacttttttggccataaatttgttcaaaattgacaaaattttttggaattttgcaggctattaaagcatctgaagagctctcaaatgatactaagattgttagatttggttcacagtgaaaaagttatagtccaaaaacatgctggggcccaa

SEQ ID NO: 17522 - DNA, 2408 bp, Heterodera glycines
  unsure (1)..(2408): unsure at all n locations
tgattggtgctgctgttgctgcccctcgtcctcgcgactttgcctctgcaacattccgatcagtgccgccggctgctgttgttgttgctgttgtgaatggtggaagggcagtacttgttgttgttgttgttgatgtgttgctgattccatgggaaatgaaagttgctgaccaaatgcaaatccaatgccaaccaattgctgctgttgttgctgaagcatttgctgctgattttccaccgctgctgctgctgtcgacgaatgggtgaacaaaaatttcaacttttcacgcatcgaatcctttaaaagggtaattaaaacaatagttattgaggaaattcaccactttctcaccggaaaatttagaatgaaaatctcggtttgttctttgagcgtatagccgacaaacatatatttgaactggtaaagcaagtcgcaaatggtgtcctcgtagtgaagttggccgaccttctttaccaaatcgccaagaactttgtaaatggaaatgatctgaagaaacccaaacaatcaaacgcaaggaaaaggacaagcgaagtgaaggcaattaaatctaataaaacaatttaattattaacatagggagtagctgaaatttgcagctgccctaatcgaacattgtgcccatgggacacctcgggcatgtgtttgttccgctccttttcgtgaattctctgcaaatacggcaccacaatgcgaaggaaatagaccagctgcgcctcattgtccactttgtgggcaagtcggtttatcacgaaatcgggaataatcgaaagcgaattctaaaatgatttgatttcaaaatattttgcttgtttccgaacattgccgccatgttgacaaaaggaatggattagggccagcatcgagagaatgcgactttccgagtggaggtaaacttcgtggctaagcgactcgaacaattgcgaaggatcagcgtcgacagaagcaatttggggccagtcgaaggactcctcaattcgatccaagaagaaggcttggaaggaggaaggaagcccagtcagcaacagacccaacgcattcagagtgtcctggaaaatagtccttatttaatttattttgttcattgccaaagacttgtggacgaaatatcggtcgacggatggccaaatcgacgagggcatcgacaatagccgcgggagtgtgctggctggcaagcagttccacccatgcactggtcaaggcttgtccggcaggctgaagacgtacaataatatgaaaaatgttgcagaaagctggatggagggggaggggctgaccggatattcagcaaatcgccagtctctgtgaacaaattgcggcggttgatgagtgtatgtgctcgcctgcacaattcgctccaccaacacacgacagaaacgaattgggggcatctgaattcaaaacggtagtgatcaatttatgaatatggggattacattatgatggtgaagtacaaattcgggggtcaaaagtttgctgtggtacccggcaccggcacgagtgctgtgagtgccctcctcctgctccaatttcagcacaatattcaccacaaatttccgaattgtttgacgtccaatgggcgagtcgcggttaaacgagtccaaagtgtgcagcgtttcgtataaaaaagtcattggctgcgctaaattcaaattaagttgggtaattactattatttcagtgatttatacggtggaggcggtagagagggccgaaattgcgtagaaaagagtccaacactttcgggccaatatccacctccaaggcacgttggaaaatgacatcaattagctaaaaacttttccatcacttcgatgcacatttcgcatttggacaactgaccggaaggatccgatcggccaaatggccgtaataaatgggcaaattcataaggtccctttgttgtcccggggactgttgaaaagtcgagtccattgttttttgatacatctcagtgtacgaatattctgggtatttctgcaaaaaataaagtagaaattcctatgacaaacaatcactttgctaaagtcggcgatttggataaagaattcctcggagtttgcgctcgttgtgttcgaatgggcgggcgcaaaggaatgacacgcgtgcagtcgatcatagaaagaggagagtttgttgtcgaggagggcggccaacagaaagagcgaagtgcgaatggacgagtcatcggaggggtggagggctaacgagagaaggaaacgctccacggagacgaactgatggacgaaaagcatgtcgttgagcacaccaaccatctgttgacggaatggaaaaacaatgcgattaaatgccaaattaaataacatcatcaacaacattacgtaccctcaagtcaagtgctgcagtgaaagtgnctcgtcggtgacatt

SEQ ID NO: 17523 - DNA, 2372 bp, Heterodera glycines
ttattgtaattccacattttctagtgtacaattgcacgtaaaagggaaatatgaattgtaatttcacgtttacaactgcacgcaaaaggaaaatattattgtaattccaggaagtatgaatttttaattccacgttttttgtgtacaattgcacgcgaaagggaaatattattgtgattccacgttttcttgtgtacaattgcacgcgaaaaagaaatatgaattataatttcacgtttacaactgcacgcaaaagggaaatattattgtgattccacgttttcttgtgtacaattgcacgcgaaaaagaaatatgaattataatttcacgtttacaactgcacgcaaaagggaaatattattgtaattccacgttttctagtgtacaattgcatgcaaaagtgaaatctttttatggcataaaatgaatcgtaattctcgttttcttgtgtacaattgcacgcaaaagggaaatattattgtaattccacgttttctagtgtacaattgcacgcaaaaggaaaatatgaattgtaatttcacgtttacaattgcacgcaaaatttacaacgacagctttttgataaaattgtattaaaaatgaaaaaacaataaataaagtattgattgtgtcattcataagatgaaataaatagtttggcttaccttttactaaattaattatgtaaaacattttatattatacaaattatttttcattttaattttaaaataatgaaaatattattgctattaaaaagaatcaaacggacattagcaaaataaagcaacaaataatttttgataaaatatttggccaaggatggggcagaagaaaattcatgcccaattggtcaaataattcacggacaaattgctgtcataataagcattttgatcataatggtcaataaatgatttaatttttgatgaacatttggaagtgatataatcgcttacagaaaagacaggtgtgatttaaaaacgagtttttgtttcgtttccattgataataatcataattttatgaaatcatacatgtatgtatgatgaaattttaaatttgttttcaaaattttctaatgtaaaaatcgatgcacacgacgtgaggaaaagggcgaactttgcagctgcactcggcaacatataaagccattgtcttggcctgtgtacagacatgcagaattctctgggcaggccttaaaaattcaaaaattcttgatttaaaaacgcgttaaaataatgtgaagaaaataaataagaagaaaggaatcactgacctgtggggtaccggacctggcgtatggattacaggtacggtagttaccggccaattcaacgggaacaagatttgctggttgaggcggacatacatctgaaaattcactatgcattcaatttaaaatacttaatgagacagctttttttaatttttcgcgcattatttgcgccgcaggcatggacatttgcattgccaagcataatcaacatttgtaccaaacaatttacaggtaatttgaaaatattaagctttccaagaatacagcatatttttaaaaacaaaattaaaatttctggtgacaacttgtttcagaaaaaaaagatgtcctttcactagagatttctgttaaatttaaaaaattttaagtagaattttaaagagaatcattcatttcccattttttttcttaattttctgtttattagtaaaaaaaattgggtcgctttacaaaaaagttatggccaaaaaagctcaaaaaattgattttacttggctttttggcgccgcatgtcataactttttttagtcttataagtcatcaaagaaaaaagttatggtttcctaaaagcggaaaccgaattgccccccaccgataaaccccccccggctacttggtagtcggacatcgctctcaagtccgcaacaaatgtagcgttcgagtgttgttgagtattggcaatgtctgtttataccgcatccctttttcaaatatgtattattatatgtgattattctattaaaaatacaatttaaacattaaaaaaatactattataaatataatatgtcccggacctgaatgccatcgttaattggtgccgacggagagcaatatctgtagggtatagcgccttcgccaggcaccggcacaagttgtggaggacaatctaagttaattgtttcctaatatttactgaaaatgaaataattttcataatttcataatgaaaatgaatgtatggcactataaatgttttttttcaattatgatattaaaaagaaacggtataaccgatttctttaaaaaaaatttctatttaaaaaattaaggaaaatgaattaagggatttgaaattggtaataattctaaa

SEQ ID NO: 17524 - DNA, 894 bp, Heterodera glycines
atcaattaaaatgggacaagcgaagaaggagtgcgcgcatttgttgttgtttttctgttgaattataatatttttaaaatcactccaattaatttaaacaatttgctttcataaatcattgttgggatggcacacattaattaatgttaattacttttcaatttcaatgagcaaattttgtcaataatcgatattaaagtcgaaaagaggaaaatggttggaacagtttcaagttttggtattaaaatttaaaaattagtttccgtttgcttttctcctaaattcggattttctgtccattttgagtgtgttttgcgattactttgtgttattttccggttgttctcagtcgtaaaattgtggccagtcggacggacggatggacagaaagaacgaccaatgaatggaatgaatgattgaataataataataataataataatgggtaagtcccccattattattttattttattatgtccacacggagaaatgcaaaataatggtcagaaaatggaaaaagaaacgccggagggaaaattggggggggggggattttggagggatttacatgaaaagagaaaagcaaatgatttaaatttaattttagaaatttaaatcagtgattggtggcggtggttaaagactcgcagaaacaaataataaaaaagcggagcgacgaatgccccgaggcgaaggctaattaattaatggccaaattaggtggaattggtaaagattggaactaatgaataaaagaaagaaagagagagaatgaatgaatgaaagaatgcacttttggattatacaacaaaaaatgggccgaaaggtttcatttggctatacaaataaaataaaaaaaggagaaaaacaatttgaaacaataaccaaaaac

SEQ ID NO: 17525 - DNA, 1922 bp, Heterodera glycines
gaggcaaagcgaagaagaccttgagaaaatattcaccttcggctggcaaaatgcccttgggcgacgaaaattgattgtaagggacgacggaatggacgccgcgggggaatgaagaaaatgacaccgaaaaatcggaaaatgaagcgaaggatggggggggggagaggggaagggggaagagggtggtcacttgggggtgacgcggggggggcaaaaaaaaaaaacctgtttatacgccatttgaatgagtgtcaaaatgatgaatccacccaaaaatgatgggattaaattccatttgagctgtgtgtgggttgggtggcagcggaatgagcggtgaatgacttaggcctaaatcggaatttgggcggaaaatttcacgaaatcgcggtaatcaatcgacaaaggtttttattttaaggttataaatgcctttttgatcagctgatttgtgtcattcccataatcattcattcacttcaaatttcgccttcctttggcggtctttcttcacttttcgctaaatgggccaatctctaaacaatgttcagcaaagtttcattttggcttcgatcggtcacatttttcaaaattaattgtcaatcactttttcgccctctcttttcggcaatttgtccgaatgatcacttgaaaaatgaatgattcattcattaaatggacgaataatgagcatggaatttctgtttctcaataaggtcaatttcagtttaataaactgtttctttgggcgaatgaatgaaattgactaaattctcaaatatacgataattaatctccaaaaataggggcaaatatttttaaaaaggcggaaaatgaacaattagaaaatgtaaatttctttaaaaaaaggtcaaaattgcttacagtaaatgataaaacacaaaaaaaaaatcttttaggtagaacaagcagtgattgtattgtatgtattacaagagaacactccgaaatgcctgtaattctgaaaacgcacataaaatttgttatctttggaaagggcgggtcatttcgcttgtaaattttgaatattttgggttttagcggtgtctttttttgtgtattttcggcacaaaaatcgaagcgcggtcggccattgattgtcccatcttcggcttccaattttatcccatttatttggtagtgcgattttgtaaccaccgacaaataaatacgggtttttggttttttgggggttataccgcaattttggcgcagcttttgatcgcttcgagcagcagactttattcactgctgtgctgtgctacgtgggacaaaagtctttttcggtgggctaatcacagggcaaaaagaggggggaggggcgaagaagctttgttaatgaaagggacaaataaaagcatttgaatgggggcaattagtaattgcaccaattagggagggcagagggagcgggtggaagaggaaacgccaaaggaaaagccgagggaaaagcgaaggaaaagccaggggaaaagcataaaaagtaagaagaaaaggacaaagacaacaaatgcattcgctgatctgttgatgaaagtaatttcttagaaactttttcgggcgcactgaagaaaaggtaaagaaatgagtggtaatatattcggacaattacaataataaagggcaagaaaagtgtgtaaagcaaattaatgaaagcgaatgagacaattttgtgttgtaaaaagggcgagagaaaagaaacccggggaaaggcgggggaaaagcggggggacggggaaagtttgggagggaatggcgcgggggaggggtaaaagtgcagcacactctcttcactttctctctttttctccgcttttcttcactttctctctttttctccgcttttcttcactttctctcttttactccgcttttcttcactttctttcccctctttttcctcc

SEQ ID NO: 17526 - DNA, 1046 bp, Heterodera glycines
ttttggaacaataaagaaattattaaaacagattattacttagcttaaaataaagttaaacttcttaccgaactaaaaaatatcggaaaagtgaattctctataaataattttttacgcggtgatttggtttctactgatcaatttacctcattcttatatttagttttgttattcactcccttttgtgtgcttttttcttttttgcataaaaaataaagcgattaactccctaatgcagagaaaagtcttgtactatctcgtcatttctttttttgtaattttactcgttttggtatacaattgttaaaaatatgaatttaaaaaataattaatttctcttgtgattgtatcggcagggaaactttgctgatctgaactgatcactccatgtctgtgctgctgcttctgctgctgttttgtgccccgcccccttctcgccccgcctcctcctccgttggaattggcatatctgttgatcgtcgtcgtccttccactttttggtcactttcttcgtcttccgttttgcagtggctaccgtccccctccaggatggctgtacggtaccgtctcaacacattcatatggtatttcttcagatggctcctcagcgcgttggtcggcttccccggcacatcggcccatcgccggtaggcacagtgccggcattcgatcagatccgggccgaatcgataaaactgcgagtagtcaattctctgaacgtagtaaactttattatggtgtcgaaataagtgccatttttagctaaaaatttgccacatttatctgaaaactacagtgcatcgacatgtaatttaattttgttccttcaattggcccttctgcacacattttgtcaaaaaatagataaaatatttacccgttctttgttcgtatacgacttcatcagagtggcaatccgtcgttcatttttgttccctgttttgcattctcggcagcccgacagaaaggtgataatgctttcgaccgtaatgttggcatactgtaaaaaatttaaatttatttatttaatttaaataatatttt

SEQ ID NO: 17527 - DNA, 856 bp, Heterodera glycines
ttttcttctttaccttcactttttccattagacttttgtacttttgctctgtcaacagatttcgcggctgagttcgcttctgtcccaacacttttttcatgtcctccaaatatttgtcgtgccattctctcatgtaaacacttttttgtgtcttaaatgaatgaagtttaactttttttccacatatttttggccaataaattaaaaattgtacctaaaaatttctttcaaattttgtgggcttaaaattggttaaaaagggaacattttttgcatttctttcatttttatgaagaaattcagacaaaatgccaaggttacggtcgaaaaacccgatccctattcatcatttttattggatttttacttttttctgcgctccaacaccaatattttccaggaaatttaattctaattcatttggttcattttctttttttgaattgttttcttgactttttctccccgttttgttggccatcaccacaaaattcgtgcatttattgcttatttctacgttgttcattctgctgctcggctgtatcgcattcattttttgttcccttcatttaaatttttatttatttttaatttttttttgttttttatttttaaattatatatttccatttttacctcgcttttttttcttttccaatggcattttgcagttgcgtcaaagtgtccaaaattgggtttctcagtttttcgtgcattattctgagcccattatcgtggtaaagaggcaaaagaggtaacagaaaataattttgcatcataaataggaaatttgactaaaatttgctggaattgaaaattgctttaaatttcctaaatttaccgttttttaaaaggt

SEQ ID NO: 17528 - DNA, 1400 bp, Heterodera glycines
atttaatagaaataattttatatagcatagaaacacaaatagtttacttctacgcttcttctatttataaatggtaatatttctgctggaacatttgctcaaaagtaaccaaatttttgaatatttgctcataggtaactatttttttttctttgttgaaataatagttcaagaaatgaaatgtaaagaaaatcttaaaatataaaataatcattcttagttatggtttgcaatttcaatattttttattttttaataattttaaacacttcaagagctccatataatttatgaaaaattacgctcagagagaactagattattatcatatagatttttatcttcataaaaagacctaccattattcatacatgtttgaaaatttgtattggttaataagaatcaaagatttcatttttgattataatctattttatttaaataatagcctgatttaaacgtatatccagatagtataataaatatttcatagaaaaaatatttaatattttttcgtgaagtacatcaattggttgcaatgctaaaataatataaaatttattttcaaagtaaataaaaaacataatgctattaatcgaacaaataaaaaagaattatagaaaaagatattaccctaaaagatacaaaattaatattaattgaaatatttaaaatcatcgtttatattattaaaaaattataaactattaaaacacttgtgaatgatgtaatatttaataactaaaaaaaattccaaggaataaatgtttctttaattcagtggaacagaattaaaataaagctggccttaaaatgcgagagattaacaaaataatgaattaatttataaaagtgataaaataatcgaaatagacccaataaataatgcccaaaaaagataataatatagtcgatagaataaaattaagcgaaaaaatcgatctaaaattaaccttttattttgatatcgaaaaagatcttgataaaagtcaaattctaaaaatcaaaattaaaaaattcacctcgttaatctcaattcaataaagaattttattaaatgcattttaattaataataaggcacatcaaacgaatttaaaactatttatttaaaaaataatttcgcaacggatgaataaacaaacacaaacaaaaattacataaaactaattattaatagaaagaatattttaaaaaacaatatttttttacttttaagaataatttacatttttaccgatgttaaagattattatttaaaacattaaaacaatgcgtgctattgttgttgaaaaaaacagaatcaattaaactaagagacaaagattctagttcataaggaaaaatatgatcacttttggagaaaaaaataaacgttaaatggtatgatataattttgat

SEQ ID NO: 17529 - DNA, 1394 bp, Heterodera glycines
aatcaaaattaaaaaattcacctcgttaatctcaattcaataaagaattttattaaatgtattttaattaataataaggcacatcaaacgaatttaaaactatttatttaaaaaataatttcgcaacggatgaataaacaaacacaaaaaaaaattacataaaactaattattaatagaaagaatatttaaaaaacaatatgtttttacttttaagcataatttacatttttaccgatgttagagattattatttaaaacattaaaacaatgcgtgctattgttgttgaaaaaaacagaatcaattaaactaagacacaaagattctagttcataaggaaaaatatgatcacttttcaagaaaaaaaataaacattaaatggtatgatataattttgataaatattaattttttttaatgctatttgttaaaattaacattacattattttctttaaagattatattaacattttttggtaaaaaataaataaaacctaaagataagtatgtaataaattatattaattagaataaaataatttctctacgaataaagtcagccaaaacaatattttgaaagtaataattatttctaaaataaatacttaaatcttattaataaatatttcaattgtgaattaaattactaaatagtttaatgatttttccaataatgacagttaaaccaaaaatttttatcaagaaaaataaataaaattttaggaatcataaataagaacgaagactgaaattcaaaataaaaaaattatgtaaaaaaggaatcgaaattagagaaacgcgatgaagccattgcgtttcctgaccattaatatgcaaatcaaaatgaattttaatggaaataaatattgaaataagatctgaataaatcttaaaataatatatttaattggatttaaaaagaatcaaatttattacaaaaattatactgtaatgtcttgataatataatttttaattaaatacagtcaggtgcaaaagtatatgaaaaaaaattttttttctaaacccggttttccatgagatgcgtgattggatggaaatcatttctatgcaaaaacaaacccccaattttactcgtaaaaaactgcaaaaggcctttccgatcacgcaacccatcaaaaagttacgggtgcccaaacaaattgacccaatttttggcggtgcaaaagtatatgaacaaaatagttaatcgccaaaatttcaattccaagtcggcaaaaaattctgaaaaatttctgctaagctaacttttgatactgatcaaaaaagtctcttacaccaacttgatcaaatcactccttcatggtgatctgaaaagccaaaaatggctaaagatcggggaaattttcgaaaaaaattccaagggggttag

SEQ ID NO: 17530 - DNA, 1564 bp, Heterodera glycines
aacaattaatcattttttggactaagtgatcgaatattattagaaattcagatttacgtttcacataaattttttcggcgcgttttttccaaaaaatttttgaggaagaaaggggtccggcactgccgataggcgccgccgggggaaattttgaaaatttgagtgtaatttgttaacagattttcaacaaaaaaaggttggtttttgcgattattaagctcaattggtaggattttcatttaaaaaatgataaatatatgtcaattaaaataaaactatgagaaattatattttgtcgataggaaagacatgagtatacaaaaagaaaattcaaaatatgttagtttctgtagagggattgaaccaggggaaggaagaagggaaagccaaggagactagccactaggtcacccacatacttgtatagctattgaaaagttttgcctactaactctttatccaccacaagtttttttcttcgccgcacaattgtcgtagttatttttaaagaatatattaatatatttttttaaatttttcctttaactccaattttcatcactaattttccactcagacccccattcttacaagtgcttgtttttcccgattcccggttgccctaccgggaccgggacctgagcttttcaaaatccgggaccgggaaccgggacctcggatgaccgggaattcccggcctggtccttgtcccggtcccgtggcactctattaataactcttgaaaatttaaaagagcattttttgaaatttatgagagattaaattcttcgaagcaaaccccaacaaaaaaataaataataataattgaatcccatccttattggtcacagtaattgagttttgaaaaattttaaaaatcagcaaaactttttatttaaaaaaaagattattaatttttcattgtcactttaatcaaaagaaacatttttcaattgaagtccgatcatttcccatctcagcgcaactgatcaattttgccttcatgacagaaagaatcgcgttttgtttttaattttgccgtgacagattgggcattccttgcgaccattcattattttttcggcacaattgtcacatgcacaagcgtgtccacatgggccaaacacaacactgatctacagtaaatttgaatactatactaattttttttttgattttttttctcgtactgatttgtccagacaaactttgcaaacagtgcgatcctccacctcagtgctagtcgaatttgtaccagcgttggcatttgacccccgggaatggaataacgcgttcacggcatttctaaaagtaatattaaatggttccattgaccgattaaatgtttaatttttgatttcatctttttctaaaacatttaaactgaaaattttaatttattatataagttttgttaaaacttccaaatttttctccatcgccgccttttggcaccgccggacgacaaaattccgctaattaaaaaaaataagatctcaaaaatgtacaaaattggtcattttggcgagaaaatgttcaaaaatattcttttattgcccttaag

SEQ ID NO: 17531 - DNA, 2587 bp, Heterodera glycines
  unsure (1)..(2587): unsure at all n locations
ataataaaaattgttagtttgaaattaccactaatatttataaatattttaaattgtaggttgtttaaaaaaaatacaaaaaatatatatatatttcttttcaaccgatgaattattgttttgtgtgattatttttcgatttgctgggttttgcttgtccgtttggccaagcataggtcggatattggatgacggacgaattgataaaatgtaattaatgcattttatttttcccgtcagcggggggggggggggagatatggcgaagataatgaaaaaaatttcacttggcaaaggtaggagataaagggataaaagagaagcgacttcgtaaaatcgaaaagaattttaaatattaaaaaagattttcaaattagtgaaataatgagttgaaacaaacaaaattttcttaacaaatttgatttaaattaatttccttattaaaatttttttgaaagttttaaatatatttcaaattcagaatcaattttcattttggttaatttctttctaattaatttcttaattttggtactgattgtttcccaaaataattaaacaaaaatttattctgttatttttttagaaaaatttcgctcttaaacgtcactaattacggcaatataatattcccgcccttacattagcatcaaacagcaaatagaatggtgctgtgtacatggtgacattaatttatgccaaggaaggtacagaaaaagtgtctggctgctccatttttgtaggaaaaaacgacagccctaaaattgaacaaattaatgcagtggctaatagtgggcgggtgggggggggggcaatttgtccccaatggagggttaattaaattctttaccatgccaaccccgcaaaatgctccttaaaattcccgcggcccacccacacctttcgcggggggctataaatttgcagacaatgttctcggtgatcaacatcatcatccatccattattgtcatntagggcatcgaattatatgcacatgtctgtcaattttggcatttttcaaaaaaaaaccctctcgattaaagcagctctttggaccctaatgagcgaacaattaaaaaaaaaaaatttaatttcatgtaattttctcaataatattagtaaaaaatttgcctttctaaaaaataggcaaaatataccaaaaaaaaagtccaaaaatgaaaaaaattcgattttttttatacacaatctcttatattaaaaatttttagctttatttttttattttcatctaaataatatcacaccaactattttcgatttttgtattttcttacattaacgaatttaaagtttggccgtcaatttggaaaatttatatgcatattttttactttttatatgcatatttggcaatttttcatgcatataattgtgtgtcctaattatcattatccatatttccggaggccaaaaaatagtgaattcgtaaagaaaaaatctgcccaacctggaagccagaatttcagacaaaaaaacgcaccgggaccaaccgaaatcctccgcaatactgaaccacccctggatatatttaggccatttcttttcaccttaccccctagaaaatttcaaaagcacaattttttggctacccaaccctcccagggatgtcatttattttacagcgcggaaccctatggaattttccggatttttttttggccggggggaggggaggcgagggtttggctagaaattcatcagcatccaacaaataaatttgcaaaaaaatcccgggccgcaggtatatatttttccaaaaatggtctttcggctcggcctcctcctcgtccttctcatttgccttgtccacatggccagctcaaaaattgccgaggacgactattgtggagtggaagataatgtaaaataatcaattaaatttaagaaataagaaaaatttcgaaaaaatctttttaattttttttaccgtattccgagagggggggggggggggttcgaaaattgagccttatggtgtcatattagaagaagaatactgtatttaaaaaatcaacaacaaaaaaaaactttcaaaaaacaattagagaaaaccttttgaaaggtttatatgtatttgaattacttaaaaaagattttccaaattttttaatcaaaaaatttgaaatatttttggtataaaaataggttttttaatttttaaataaaaatatttttttggctcttgaatgaaaaagatttataaaaaaatttaatgaaataatttggaaattattttttgatttaaaaccattttttaattatttttttaatgaaaaattgggttttgaattaagtaactttcaagaaaaaaaaaattaggatttgactaaaaatttcatacatctgtgtaaccgttttaaaattagctttcgatcaaatatttagccgtatgacaatttgccaaaaaatgtgtcgatgggatgcaaaacggtggattggcgccgctacaaattcatccatgaatattatgccgtgttgcgcttctttgtcaactgctactacatgctggtggacgccatctttgaactgatcaactggtttgagccaatgcaaactgtcggatg

SEQ ID NO: 17532 - DNA, 1375 bp, Heterodera glycines
  unsure (1)..(1375): unsure at all n locations
ttcaacaatgccaagaatgagcatacacttgtggatcttctaaggacgagnnnaaatgattaaatnnaattggnacacccttagagattaaaaagttaaaagnatttaaaattnaaaaangnaaaggttattatttatttatttanttatttatttttattgtnagtggagggaaatnaatggaaaaagaggaagnnaagaangattnngnttnatnttttgnanttttnnntttgnggaangaaaagttnaaaagaaatgaaanagngncgaagggaattaattttatttgatgaaaaangaagaggaagaggaaaaggaagagaaggagnttagaaanaaagaagaagaaaaatagagagaaagggagagagagagagagagagaaagagagagagagagagagagagagaaagagagagagagagagagagagagagaaagagagagagagagagagagaaagagagagagagagagagagagagagaaagagagagagagagagaaagagtgagggggagagaaggaaagagacgcaaaagcttttccgaaagtatttcaaagcgaacgaccaaaagcgggtaaaacggatgagagatgaaaataaaacagaaagagagaacaagagaagcaaccgactgtcactcatctctctgtttctctaattgctcctcgcgctgtttcgccgcatttcccctcactgtctgcggctctctccgtccttctcaaccattgcacacattagaaaaaaagatttattatcggccgaaaaatgaacggacatacaaatgttctcatatgtccgcagttattcggtcaagaatctcgagagagagaaagggacattttggtaagtgatcagaagagggaaccaaagaccgggggggggggaataaaaacaaaagggaggatgcgatgcggtgattgctgatgatcactgatgaactgattaggatgattaaaaatggtgggcaaatcggcgcgatggaaagggcctcgccattcattcattcattccctttggtacgaattccaaagattgtcctttttaaatttttaaatttcttcctccatttttctaatgtcacttttcgttaaatcaaactgattttattcagagtttagcaaattctaattcatttttcattccccccccccctttttcgtttacttttttccaacgcaacgcacgcccccgggggggggggggggaagagggcgaacttatgagtaaagctgaaagaagcgaacgagaaaaaagcagcgacaacaaacagggcttatttacgtgtacttttaacggtaaggagagagagaaagagagaaggcagagaggggacaaaatgagagaaaggagtgatgagtgagaaaa

SEQ ID NO: 17533 - DNA, 1939 bp, Heterodera glycines
  unsure (1)..(1939): unsure at all n locations
aagaggaaagagaagagaaagagtaagcgcatcctgnatcattcactatcatcattggcattgttttttttccctccncgcgtccattggcatttccacttccgctgaattattcattattttttattcctattccctcacttccttttccaatttctctcgtgccatcctcagatttatggaaagggaatgtcggcactttgttgtcatggaaattgcatattctcccatttctgcgcaaaggcgaaaagacaaatatttaccattaaatatttaaaaaaaccatagaacgcatttgataatgatgagtgaatgacaagaaaggaatgccagtgccatccccacacccaaaaaataggcaaataggcactgatgttcgtttcggagtcttaggacggcacgggaaaatgggaaagagaatgaaatgttttttagcgaattaattaaagggtgcctgctgttgtttggatctgttttaatagttcaattacagtaaatgctgcacaaacaattaattaattagtcgcaaaagaaatgaactgaataagtgaaaaacaattattgaaaaacaattgaaaagtgacagagcaatcgatggaagtgccaaaattcacaaaaaaaggaaatgcgttttgtgccgttttgtcagtcgattaaaagaaaggccgctcgcagcttcatcttcatcagcttgctcaggttcttcacctccacccgaattcgcatatccttttccaccggcacggcgccctcttccgccagcatcggcgtgctcatgcgaaagtgcggcagcaaataatcgccattttctgaggacggacttttcattgggtgggggggggactgaccattttcgactgtaatttcgaagttgcgattggcaaagtattcgtaaacgagcatttgaccagctttggccctcagttcgcgtgtccaactgtcgcccactccgacgacgctttgctcataattcactttgcccactccaaatctctcccacaccattccatccgtctgtgataaatggcaaaattagcaccgacgaatgccatttttagggcggctttattgaattgtaacttccgtccagcaccactcaccagatagtcccctttgccgtactccgtcggtctgttgcaccccgtcggaaggtcggctccttccaccactctcttcccgccatatccgatcggaatcgcttccggcgctatccatttttcaacttcgtgcagcgattgggcaatgtgaaaacggctaaggatttttccggggaccaaaatggacataatctgacaaaaagaaaagaaaatggtggacaaattgccgaaggaattcaatcaaactttgagaaggatgttgaggagacgcggcggattgacaatgacaacgctggacaacacttccatgtaataggccatgaagacgccaatacgagcctaattaaggaaagcgtgagaaagagagagagggagagagagagagagaaaagagagagagagagaaagagagagaaaagagagagagagagagaaaaaagagagagagaggggggagagaaaagagagagagagagagcgggggggggggaatcgatcaaaaaatgaaatcacttcgaatattttgttgatcggagcgagtggattggcatattggatgatggacatgtgctgaaaaagttttatccatctttaccccacaatgttggcattttgactacctgcatgtcaaaaatgcaaaaggcgtacgacctgcgcccactgcgcctctcttggccaaggatcagttgcaaaaagtattcgcagtggacaaaaaactcgcggaggaagtcgccggtgcgggtcactcgcgccgccatgttcggatcggcgacgcccgtctcgacgaaaacaattgcgttgtaatgcgcattcacccaatcctttcgaagcctcaaaagaag

SEQ ID NO: 17534 - DNA, 1700 bp, Heterodera glycines
  unsure (1)..(1700): unsure at all n locations
gtgatcagcnaacataaaagttgcatttttttgccattgttagcacctgttgctgacaaaagtccaaaagcgcgtccctggcctgcaattcgccctcatataaacacaacagctcgagcaaaagcattttctaatcataattaactaagaatccaaaaaaaatttgagtgaaaaagtgaaattcgatagaactgtttaaaacttcacaaggaatttgtgaaagccactccaacttatagaactctgtgttttcataaaaaatcttttattttctgtccacattcataattcctcctaattctttatcgccaatttaaattatttggcgttttattttaaagtttttgttggtttatgtttactacacactaccaaaaaaaaattcctttttaattagtgatgtacatccgagagttagaatctccagatgagcactccctggttttattcaatccgcttcgttcttgctttcgtcctactagagatgttcgagaataatgaaatttgattttttaggctaaaagattgttatagttgaggaagaaataattttaaatttttaactacatacttagtttcggataatgggtttggacatcaatgaaatcagaaaaatctaggaattgttttcggcaattgcctgtcagcgacgctctatcgcccgtctggacactgaaagggcccgattccgtcgtttgaacggagctcagttccgtgtggttgtgcgattgtcaggttatttttaaaacgatatccaattttagcagtttaatggtgaacaaaccgcgcgcattgtcagctcaccctttgttttcattgtttgaaaattaaacaaaaagattaaaccagggggtcgtcggggcttctgatcacgaatatgaatatcggatttgcaattatttatttaccatagtttatatcatatatttagaaattttgacaaatctaattaattattgaccctaaatctatgcttttcaaaatcactgattttcaaatcaatgttattagtgcgtgatcagaagccccgaaatccccagcagcggggttggtctttatcgataacagaaaattatttttatcgagcccatatccattatgccttaaaaagtagttaaatttatatcttacggaaaattcctcgatttaggaggcttcttgccaaactttgctgctgttatgccacagcaacagaacggtgggttgtcatttcccttcgttttaccaatctgctcatttttggcacattttagtggtcaatgttgctgctgttctcgccaatgccaatcccaatggacagaattataacgtatgtttttatttcttaccttattaaagaaacagcggggaataaaggcggaccgggaacccattagttcttaatcgcgttctcggctaatttagacagggtcccgattccggcgtaataacaattttttaaaagtttctggtttgggaaatttggattctccaatacaaagaaagttcagcaaatcctatttattttttcttttacaacccatgtaaaccagctgaaatttagcgcttgcagcgtttgcatgcggaattatcggagaccatcgcccgtttaactgtagaaatttctcagttgggatacatgtatgagcaattgaccgagcgtcttgaacatctcacgggttatttcaaatcggataccaaaaccaaaaataatttatgag

SEQ ID NO: 17535 - DNA, 2550 bp, Heterodera glycines
  unsure (1)..(2550): unsure at all n locations
ttcattgtcgttggcacataaattgccgaaacaaactgcaaattgcgtccaaaaatgtgaaaagtgcgggcaataagaacagggaatggacggcgcacaaaacaatgcacacgcagagaacccgcacacagaccttgaaaaaaaatttttggaaattttaaaaaattttccggaaaaacggacctgagcagtgtaaattttgacaaacgcgagactcaatacgcaaatgcaagtgcctggatgggaaaaattgaaaattttcatttatttagcaactaaatggaatgtatagccccccccccctccctcaggcctacccgcaaaattttggaaaaaaactacgaaaaatgtaaaattttgacagacgtcagcggaaaaaattcgcgtttttttgttgagatctgttgggaaattaataaaaaaaatatcaaccttttcattttccaagattttggaaaatttttaataataattttgcccctaaaatttggcaaatttttcttggggctaatttattttattggcccaaaaagaataatttccatgccgcatatatcccgagggcaaattttccggccatccaacaatctgcttacaaatggatgcttgaaaggccgggaagccgacagaggtgaaggcatgccgaattttgtgttcaacactttggtcggcaatgccgtgcacatttttgccacttgccacccaaagtgccggcccatttggcggcatggaaatgatacgaaacatgggcctaaaaagtagagccggcaattattgatcggctggccaaaaattgatcggttattgtgatcagctggggaggcaaataggttactgatttgttggaaatcggtcattatcaattaactggcaagggatcggttattgattgttttggaaaatggacacttttattgatcacttgaaaaaccgatcgttgttcattaaaatggctggctgatcaacatcctccataaaaacactcaccggcatgtccacgctgaagccgatggaaatggtcacggccgccatcaccaccgggtccatggtcatgtccatcagtgccatgatgcncaaggtttcttagaaatggcacaaaatttcagagaaaaaaatatttggcgttttaaattgaatgttgattctttagaaatcgattggtttattgattttttgggaaaaaccgttcgttatcgatttactgaaagggatcatttattgatttacttgaaaggtacataagtcgattattgattgccttaaatttgattgattgttgattttttggaaaagcgatcaattattgttaatttttgaaatcgatcattattaattagcttgggaagagatcggttattgattttagaaaatggatgccacttaatgattgcttgaaaaaccgatcgattgatcgtggaaattaggaacgcgtcatcaacgcctggaaataagttaaattcaacaggaatttatatacaataaaatagtactttaattaccaataaagataaaaattattataaaataaatttcaacaatttgaaattcatttattttttcatacaaattaaattcataattatttaattagtcaattagttaattgaataattaattaattgacaggcctagtgccaagatcagaaagggagtgaccaccaaaattgaactggccgaacgctggcaaagaacagaatgccaagcgcagtgccgctggccatgaacgggcacagacaggcgaaaacggcgacgggcaacttcacacggcaaaaaaaaacatttagacaaattaatttagtcaattaattggccaatcattactttaccgtattcattatacggtgtaatgataattgtaaatgcaccctagcgattaatttattcctaaatcgaaatcttataaaaattttctcataaaaatgctcagttttgagtcgaggagcccggattttactttttaaaattgggtatctcaatactctttagctcaattttattaattttgaataaaactttgtcatattacacctcctaaatttgtaaattttagcaattattcccctttttatcacctaaaaatatcatcaatagtcatttaatggactcagctaaaattcttttttttaatatatattttgctttttccaattttttatgcttattttgcattttcgtgctttttatgcataggtattttggaaaaatttgatactttttccggtgatttttatgatgacatccgctgcatttgtttctacgccgcacaagcattggagatcgaacggttggtggcccagcaggaaataccggacattttagtgacaacggccgacgcaccgcaggacacaaatcgtcacttgccgttatcgtcacaacatgctccgtttacgacagtggggccgactcgcagcctttctgggctgatgccgccagggtggacgtcgccatctcccgcgcgagccatggaatgatcaaaatcggcgacttgcttctgctcaacaggacggagccaggggaacgctacttggaccaagcgacggcggagacgac

SEQ ID NO: 17536 - DNA, 3442 bp, Heterodera glycines
  unsure (1)..(3442): unsure at all n locations
accgaccggtccgatctctagtttttagcacctattttgcacttttttagcacctaaaaatccgggctctaactatcattgatacttttttatatttgacctagcatcaattaacctacattaagtgttacctacttactacacattagtttcaattaaaaataaaatcaattacgcaaaaagactaattgataatactcattttaaaatattttgtggacaatttcttatccgcttaaattgttgtcaggttatttgatgggctgaatgaggaaccatatggattattgcctctcgttaatttgatgggaaaaggcgggccaacatcagtaaaatcagtgcaaagaataggtgttttttaacaaactaataaataaattttttaataaatttaaattatattgaaaataaattgattaaagcaaaatttaaatatttaaaaaaaaggttcttatcaatggcgacttgaggacgatgagccggttattcttgtgcccgggatgccattggagtcattttactgggcgggtgggagactgaagcaggacggtaagccaaataaacgaatttcacatgtgccagatgttttcggcacagtgtactgattttgacaaaaaataaaataaaatttattgcgatttgctaaaaaatttcggggagtcgaatcaagaaaacgaagttcgactcgagaacattaaacaaaaccgaccgagacactacagccattttttttattggccaaagattatcggcaaaatccatacattaaattattttaaggcatggtaaagtacatacattaaatttgcaattaattggttgtataaaaatcaaagacaattaaaaatagagttgctatttgtgtcaattttgaattttcaggtggcgttgtgatttacaatgtgaaccatttaaaggtgcgcgatggtcagttggactcggcaatacttgcggcaaaattgtttggcaccaaagcaaaaaaggaagtgggtaatttttgcttttagagtaattggagagctatgaatttatatttgtggagggatttttgaattttttaaaattaaagtttttcaaactaccgaatttcttgaaatagagccccgggggctttgtttttaaccctcctcaaaaaggggggctttattacagggaggctctattttcataaaaaatccgggtaataattattttttcacaaaaaacaaatgcacagactactggattttataattgttactttttatataatatattttatttctttgtattaaatttaaaattatttgtagattaattttgacgagttcgatatcatcacaggtattattatgcagaaacaaatataattttcgaaaaatatactatactgcttcgcatatattatatgtgtccattcagatgcgataaatttgcaaaagatttttgcgtttgcccaagaagtaagtgatgggtgacaacggccgaaggaataaatttttcattgaaaaatattaaaattataatttaatattcaatatatcaaatgttatttaatataattatacatcgagagtgttcatattcatttatcgtgaaatatttattaaattctatttcgacataatttatgaagagtataaacaatgaaaattggggcccaatttccaaaaatttctccgttttatttgaataaataattttgttaaatttcaattttaggctggcgaaggactcttccgcattgattgcgaacgtgtcagtatttaaaaaaaaacattttaagggaatatatttattttttcccctaaaggtaggtaaaacaatgctgatgtcaagaatggaagcgtcggacctgatggaagtgagttgattggttggtctacagcgtgtccatgcattgctgctcgagattctcggcttagagaaatctcggtacttatccgttatgccgcaccccgcgcaaaaaaagtcattgttctgacatgtcaaaacaatttttctagtgtagttttaggcgctgaacaaaaattttattatacatttgactaccagatttttgattagcgcttacaaattagaacaaccacagaaaattgttttcatttgtcgggattatggcacttttttggggggggggggagggcataacgaaaagtaccgaaatttctttgtttttgagctctcaacacgttggttaagtctcaagagcagccagcccattatttaatcaatcaatagtaatgggcgagatctctggttagcgattttcgtgaaattctgatttttttgagttttctcctcacttcccaggggtcattattatattccggtccaagttccatgaaatatttctgactatagcatactgtatttgtagattggccacatgacctttgatcagggattaaaggcaaaaatggcgaaaccccgttccaagcactgtacaggaccgttctttcaacttgtcaggcaaaatttttttacagaattgtttaaaataattaaattatttattattttttagttttcaatttggccaattcaaaattttagtgagttttttaataattctaaaattccgtctcctttttaaggcccgttatgaagttgattgtgcagattttgcagccgcaaaagcgtaaaaaaattatcattttcatattctgaatataaatttttttggtaaaacagggaaccattccaagaaagtgaagaattgccacaaaaacaacaatttgaaggtagaaaatatattaaatttaatcggattaaaatttgactaaattagaaaaaaattattttggttccagaaaattcctcaattggttacatcgagtttggacaggttccgtcaaatttgccactccaattggtcaccacatacccacaaggagccggattcccgtttgtcattgttataaattataatttaaataattcaaaaaagatttttttttgacataatttgaaaaataattaaattaaaaaaaaattatttttttaacaaaatttaaataataattaaattgtaaacaattttagattctttacttggggacagatgtgagtttttaacaaatgccataactcatttttcactaattgtgcctattttgaaggttttttacaagtgctgaccaagaagtggtcggctttttcaaaggcaatggagacttcagcaaaccagccttttacgggctaaacgacatctccaaattggtagcaaaaaaattaggattgtgtaggcccattcagactcacgccctcccgaatttcaaattaaaaattatgtttttaataatccaattanatttacaaattttccccgcagcgcctgtctgcatagccggacgacaaaatttcattanatttttcaaaatttgatccaatatacaggggcggcgaggggggggggggctgagaaacagtactcccgtgagtgacatttgttatttaggga

SEQ ID NO: 17537 - DNA, 2406 bp, Heterodera glycines
ccattgcttaattctgcatgcatgttcactccttaattatgcacttttctacctaaaaacgacaagttcgttcacttttaaaaattgtatcttcctctccttaataatttacaaattgtgtcttctttctcttaattctgcatttttctacctaaaaatgacgttcccaaatgcttaataatttacaaattgtgtcttccattgcttaattatacatgtatttttattaaaaacgcaaataaaatgacaaaattacacaatttttggtataaaacatgaaaaacaaaggtggtacatgtgtgggtacgtgtgtatggggtgtgtgtgtgtgagagtgatacaatgaatgatgaacgataaatttacaaagtgtgtccaaaattgagaacatcataattagggcccactatccctttgcctacatatgggcgataacatttttggagggggcctgaagtgacgtgtccgccacccctaatgtcgggtctcaaaaagtttgggtacatcacatttattggctcatactctccggtttgggcataccgcaacacttcttctttgaatgtgtcgtagcatagggactggttctgcatcacgtcgtagttcagtgtgatgcccctaagcttcagcacaaattcgtcctgcccattacgccggagtttgagtccatactgaaatgataaagtataaattattatgcactaaataaacggtaaattaacctgcttcgctccgccactacaatactccacaatttcatgcttggggtattcatcggtgaattgtcccaagtgtggtcctgtctccaacgggttcatgccgatcgggtggacgaaaatcagcgagtcggtgtcagtgtagagcaaccgacatccaggcgttctcaccaccttctgcatcgctttcaacagcagaaggcgggcctttgatgttgtccagagtgagatgactgaaaaatcccaaaattatacaaaaattattgaaaaaatctcaccaatgttggagcactcgtgctcctccacccactccttcttctggacgtagctgatcaattgatgtttttcgtccagctcatcaatggaaatgatgtcgattgaactgttttccacgtattcagtcaacaccgaagggtcgtcggtgatcaacgtctgggcaaggccaaagtttcgcaatgagaagcgcccccacagattgttgagacacagctttgccaacgaccgcttgcccttgttcactttcatgttgtccttgtcgattgaaattccgaatttctccgcacattctgtgatgaactgctgctccaactcttcatttcccttgatgctggcgtcaaatccggaagcttcaattttctgcgacatgaactcggcgatgtatgggcggaatagcttgtcgtcgccatgcctgtacttcagcacccggaacactttggtcacgcggtagccctcttcaagtgctgcgtccaattcaattgatgtgcatgttgtcacccatccgcgttgttggtcgtcgtgttcacattggtagtcaaaatcaacgcctccctttgggtagtctagacaacactgcatgcacaacggaaaacagagccgtttgttgactttgacgggtagtactggcacatcacactttcgcggcggaatcacccaaaccttgagcaacgacaatttgtaggggttgtcgcgtgcgcttgtccactccacattttcattcaagatgagcacttttgggtgttcaatcgggtaagtggtggagaaactggaaataaaaaattataaattgtgaataatgatcgaaacaaaactcactttacgtacgggtagagggacgtaaagtcatagtacgagattttctcgccctctcccgccttgtggtacagcttcagtggtcctgttcttccacccatgaacgcctcgcgaatgtccaacgggccatcatccacataatcaccaaaactttcgcgcatgtccgggtcacggttcagcattcttttaatttggcattcccagtatacgtccactcgtgacacttgactttcgatgaattccagccgcttctcatcccgctctcgcacctctccagccgtttttccatttggcatcaacatgttgtcattggggaagcattcattgcagccgtgccacacgcatccattcacttcaatggcccttctttcttcctccacccagccatccacggaatattggccaattttcttctctccgccagccgaatgcgccgtctgcaccacaacaccatgctcctccgcataccaatgaaagaagcgaagtgccagcaacgactggttttgggcgttgtcgtagccgcgttccgggacgatagccaagtgtttcttcggcagatggttggtgcgaaaatgcttcatacatgcgccggcgatcgtca

SEQ ID NO: 17538 - DNA, 1033 bp, Heterodera glycines
  unsure (1)..(1033): unsure at all n locations
tttccaaatatctgactgtatgttagaaacggtagactaatggctaaatatatagtgaagaaaggacttgtaaaacgaataaatgaagagtgaatagaacatatgaggatattgtagtgcgtcattgaatggacggatgattaattgtggaagtaagaaatagtgaaaaaaatgtcagaaaaggatagaggaatggtataaaaatcagagatagttgaagagagacaattttagatagagagaatttagtgtaaggagtgattgagaatagaagatttggttggaaggtggacattagaaatgagttaacgaaaaatgatatttagacatatagaagacggtttgggataatagagaacaacagtgagaaataaccagatatagaaagagtagaaaaatattaagaaataggaaaataattcaaataaacttaaccctgataaatatgccaaaagctaaatactagattttgtaacgaaaaccaaggaaggtagctttcttcctatgttacctttcaaaggaatcgatttataggataagggatgccgtgacctcacccccctctctccttctcaaattatttggttacactcttcctcatctttgcccttcctctccaacatattctcattcttactccttaccggcgcaaactcactctacccgttcccgttttcagcttcttcctttaacaattcaatgggaaatgtgtttttactaaaaactctatgaaaaaatcgaattgtttgccagcacaaccataccttgtgggacattggttactggagggacaagcctaatcaccttgtgaggtattggttactggatgctcaagacttacgatgtattggttactgtagagacgaatcttgtaaagtattgtctgcccgagagccgaaccttaggatgtttggctaccaaaaaaccacacgttatatatatgtttctgttttttatgcatatctatgactattataatgaattaattnaatttataaaaaaaagtttacaccccccanatctgcattctttt

SEQ ID NO: 17539 - DNA, 2199 bp, Heterodera glycines
ataggaaaggtatatttattctcatataattttagaccacgaggatactaatttgcataaaaatgaaaattcatagtcaaaagaatgaagttttcagtgttcggtgtcagagccttgcgaggtattggtgaccggagggccagagggccaagcttaattaggtattggctaccggagagctgagccttgtgaggtattggttactggcgggccaagtttaattgatattggctaccggagtgccgaaccttacgaggtattggttactggcgggccaagcttaattaggtattggctaccggactgccgaaccttaggaggtattggttactggcgggccaagtttaattaggtattggctaccggagatccgagccttgtgaggtattggtgaccggatgctcaagacttacgatgtattggttactgtagagacgaatcttgtaaggtattgtctgcccgagagccgaaccttaggatgttggctaccaaaaaaccacacattatatatatgtttctgtttttatgcatatctatgactattataatgaattaattaatttaataaaaaaaaaagtttacacccccaaaatctgcattctttttctgataatttagaattaattgtcatgttcatcattcataccgtaacggagttaaatctgtaaacaaaatgtcataatcatttattattcgtcacttccttttgtcttattcactctacaatatttttgctagttattttttatgacttatacactcccttccttaattaatcataatttataaatttcactctactgaaacatatgtaaatctgttgaagttgatgactatattctcagattccaatattatgcttcatagatataatttcattataacccttctttctgcataaaatcttcaattagtaaaaaattaaggaacaattaggtctaaaattacaattaatacagataccatacatacactaccagaaaatcttagtaatttaaccatactaaataattgtaaaagcatctcaccaaacattgttccgcctttgaatgattaattgatttttagctatattacacaaaataatttacgactcattattaattaacattcttttacaactaataaaaatattacaagtcattctcggtaatttgaaataattaatcacataagttttaaaaacatcacacatactataaaaaaatccctatataaaacacttcaatcaaaaataattggttcataaattgtcacaacaattagcccccatatcatacatcactacaaacattctttgtaatttgtcataattaattaataagatttctaaccctcgtcataaattcctctgtaaaaaaacatattggtcaaagaattgtcattttcctacatttagtgattattgtttcttaattaacattacacaaaaaacttgcaataattagacatacagatatttaacgaatacattacaacacttttatacactaattaatttattatcaaagtacattaacccatatatatataattaaactatcacccacctcggtaacttgtaaaatttccatctattgtaataatttttaataatctcgacattagatggtcaataaaaataatatttcgaataaacatttttctagaatataaaaattaatttaatttaatgaatattataaatttagaatttaaacaaaatagtgatggtaaaaaaaaattgattttaagaaaaaattctttattttatgcagttgaaaaagacaataaaattagtagttactaccccctcccccctcccggtccctttaacctagtagcggtcagtcattagcgctcaaattatcacaaccgtgcgctcaaatggcccctgcgggcgctcatgtggtacgcgcgagtgctcaaatgacccggcgtcgcttccctcccgacagctgacgccctttcccttctccattaggctttggttttgcgaattatttattttatttttaatttaaattatttttaatcaataaaaacccttcaataggtttaggttcacccccgcacccatccaataggtttaggttcactcccgcacccatccaataggttttggtttaaaccaataggttttagttttgggattgtttatttattttattatttatttattttttaattttatttaaatttattattaatcaataaaaa

SEQ ID NO: 17540 - DNA, 2058 bp, Heterodera glycines
  unsure (1)..(2058): unsure at all n locations
tcgttcactttttggttttgtttaggcggtccgagggatgaacgtttggaggcggaattatttaccggtgtcaactctggcatcaattttgacaaatatgaggaaatcccggtcgaggcgaccggcgttgaatgtccaccgccgatccaaagcgttcaaatttagtttttcttttctttgcattatgcgataaagttcagtttgcggacaccaatctgaatttacacccgtggattgaggaaaacattcgaaagagcggctacgacagaccgacgccggtgcaggtaaaagacgcgacactttggcattaattttgctttgcattcagaagtattccatcccaactcttgccgcgaaggtcactacctcaaatggacaaagcttttatcttattttacctttctgaatggcttttacagcgagatttgatgtcgtgtgctcagaccgggagtgggaaaacagcagcctttttggtgccggtggtcaacacccttttagaggaaggccagaaatggatgaagccggtagggaaaggattaactggcatagaatttatagttttttttatcagaaaagcactgggccaaatggacgcacatgccaataccctctcgtgactatccctttttagctatgctgttttaagatttacaatttaggcactaattatttcgccgacccgggaactcagtctccaaatatacaatgagtcacgcaaatttgcttaccgcactccgattgtttcaggcactttgtttgcccaacaaatatatttttccgttcaatttagcacttctatacggaggccgtgaaaattatcgtgatcagatcaacaaacttcgggtaattgaaattaattattaagaagcattcttttctttagttgggtgtgcacatgcttatcgcaacaccaggtcgtctgatcgatgtcatccaaaatgggctgattggcatggaggcgtgccgctttttggtgttggacgaggcggacaggtgcaaaagggataatttcaaagcaacattcatcctctagaatgcttgacatgggctttgagccgcagattcgtcagattgtgcaaatgtcctgcatgcctcaaaagggagagcgtattaccgcgatgttttctgcgacctttccaagagacattcaaattctcgcacaagacttcctcatgcctgaatatgtgtttttggctgttggaagagttgggtccacctctgagaacatcagtcaaaaagttgtttgggttgaagaggtataaacagttaaaacaaagaccacaaatagtgcatatttcgagttttgccttcgttttagcacaacaaacgccatttcctgatggatttactcgatgccagtgagcccgaggcactaacactgattttcgttgaaaccaaacgcggctgtggagatgtaaaatgcattccatgaaatctcacaatttggccttttaagctgagttacatgctccagcaagaaggctaccattgcgtagcaatccatggcgatttgaagcaaatggaacgcgagcgtcatttggagaacttccgcaacggaacggcacccattttggtggcaacagcagttgccgcccgtgggttggacattccgaatgtcaagcacgtgatcaattatgacctaccggtgggtgaattttaatctgttttatgccattttaaataaagaatgacatcgatgaatacgtgcaccgaattggcagaaccggccgtgtgggcaacattggtccgttcccattttagttaaggtttgtaaatggtatatttaggaatggccactagctttttcaacgacaaaaaccggaacatttctcatgaactcactagtctgattgtggaagcaaaccaggaattgcccgattggctcgaagaaatggcacgcgattcaggccgacacggaggcggtggggggacggtcgcaccttggcgccgggtcgaagcgtggaggtggcggaaatcgtttncgaggaaaggcaacattttactcacattaattatctatgggatattttattgtcagagaccatcgtgttcaaaccc

SEQ ID NO: 17541 - DNA, 1384 bp, Heterodera glycines
ttttcatttattttctcgtgctccgttttgttaaacccccccctctaacaactattattctcctgtttaaaaaacttaacttttaactatctaacggatcaacgctgactgtcatgtgttttaaccaggcgtagggacatttacgatttattttgcagcatttgtttgtttaaataaactgaagggaagatggattcgcatttggattgtggttaaatttcatgaaaacttgggaacctttgtgagaataaatacatcttgattttttcggaacaatgaattttatttttttaagtttttcgacctcttttggggctgttaccgtgaatcaactacaaaagtgccaaatgattcaacgtttgacaagcagctccaacacacatccttacccccccccccctccacgatagttaaaatggaaaaacattggcagaacattttacagtgtcattcctaaacgtaacataaaataaatgtgcatgtttttttcttgtcgttcgctgttcgctcgacacgcagttatttcacgtcccaggcgtagtgtttgttgtgagcggtagtagggtagtagtcggactgacggttggtttggaaacgagcgggatattcctggagggacaatttaaaaatgaaacaaaagatgcagaacctcaggaagacgccatttgagaaccaatggatcatcgggacgacgcacctcgaaaaactgacgatagaagggtttttctgaaattggaatggtgaaatgcgcaaagttggtttttcaccctcaaaaaaggtgttaatggtgttcaaaaatttagaattcaatgagtaaattcaaaaaataaaaaaggactgttgaaatttacaaaaaacaaacaaataatattgatgactcaggcatatccatagagaaaaccttaccgttccagcccatgccgaagttgtttggatacccgccaaaatagaaccttgttccgagacaaataatgaccgatggaaccagcatataccagcccgcagaaaattctggataatatttgagccagaaacgaggctttgccttgataactgtccatgctcggcgccaacgactgacgtaaggtcgatagacaataaccattttcgtaggatatcctgacttggatttacctttaatatatcatatatagtaatgcatagcccaggtacagaccaagatacacggctttttcaagcccagaaaaccctgacccgaattaccgaaaacttcttaaaatatatttttgtgacttttgaaaacaaaaaatttggcgctactgtaaaagtggtcccttttgaaaatttttttcataatggatttctgggctctactgcagtttacgcgtcgaatcgacttttacgcgaccaatcacaggtggcg

SEQ ID NO: 17542 - DNA, 2789 bp, Heterodera glycines
  unsure (1)..(2789): unsure at all n locations
tgatatatgatacagacatatcaacgaaatacatatatgacaattcaaatgatcaatcggataaatgtcaatttcttatccttcttctgttgttgtgcatgatgctaatccaacgccacatccgcggttgtcgctggagtagtcgcagcgggcgcctcagtattggtcgccgcattcgtcgtcggagtagtcgccgctccggttgcatcagtgttagtcgccgccgctccatccgcggttgtcgtcggagcagtcgcagcggtcacctcagtattggtcgtcgcagccgtcgtcgtcgtagtcgcaccgggttcgttggcgttggtcaccgtcgctccgtccgcggtcgtcgttgtcgctggagtagtcgcagtggtcgccgcgtccgttgtcacagtcgccgctccggttgcgtcagtgttggtggctgcatcggccgtcgtcctctgctgctgggcagcgctcttcccccgtcgggcacggccttttttcacggtcttcggacgtccacggccacgcttttgtccagcagtgcgcggcgctgccctcgatttacgctatcccttcggtcgtccaaggagcggtttgagcttgagcggacgacgcattgccgagccgcgcttcttcctcgtcctggtcgcgttgccgtcgttgttgttcccctgccgacgtgacgcgcggcgcaccgctgcactcacacgcgctcgggcgctgcttcgaccacgcactggcgcggtccgtctgttgttggttgaggcgccctgctgtcgtcgacgagctctctgaacaatggcggggagggcgtaaaatgagacacggaaatagttgcagcaaaaaagagggactgaagcgggtgccaactgagcttgagaaacttttcagaagccatctttttcggcacttttgctgtttaagggggtcccgaaaaagaacgacagagaatttcattttcacacactatttgcacaattctctttctctgtttccactgtccccttgttatgagaggagagacgcagttttaaaaaaaatgttgcttttgctttacttataaaagtatgcgtctctaccgctcataacaaggggcagtggaagcagagaaagagaaacacgaaaatagcgcgtgtaagactttttctgtcttttcgggattcaccaaacagcaaaagtgccgaaaaatgtgatggcttcttaaagttgtctcattagacgcagttgaccgaccactagcgccagggacggctcaccgaacgcgctgctgttgacgcgcgacggcgtgaagcagtcctcctcgtccttgtcctagtcgctgtttgggtggtgcccggcgtgacgatgtccacagtcatttcggccaaattgtagacggattggtatacagaagacagaagcagggatacggagctaaaatgtaatggagaattgatatatggtaaatgcaaagacattaattgtgaaaaagtcgggaagttatacaaaaaattttcgtttttttacatggggtgaaaaaagtaagttcgggaaaacccaaaaaatgtcattagaaagtttttcacaaaactggcattccatttaggccaatctcgaaccccgggcccgaactcgaacaaacagtcgaaaactcaaatatttagaatcgcgtgtttttggtctcaaaaatggtctaacaatttttttttcattgatgacttttgtttgtttctttgtttttaagccgttgttttgaaaacaaaaatgcgaaactcgaaaaatttgaagttttcaaactttttgttcgaattcacgcccgggggttcgagtttagtcgaaatggatgtgccctattcgtgatcagcgcgaaaccgaaaatacattgggagaaacatttttccatgagttttgaaaacaaaaaaaaaaaattttttttcgctgtttttgttaattggtggggaaaatgtttttttgagagtttacctacataacttaaaaatcccgaaggaactaatcaaattaagttgaaatttgaaatacttactaattcaaaaaacggagtggcgacaaaatataacgaaggaaggcaaaggtgttgggcatcagccgacggaaggcggaaatatgaaaaatgaattgtgtgtgtgggaattggccctaaatttcgttccttttatactgccaaatttcgttggaaacgcggagagagtcgggggtcactttgacgcgggacattttggcgccgccaattttgaagttttctaatttttttttattttgcaaccaaataaattattttgatatcaaacgataagccaaagtgttctttataagcctgcaaaatttgaaaaaattatattagattaaaaaaagggacgaaacccaactcgtactgtttttcgagaaaaaaaattgtcataacttttgttaaaaccaacaaaattaaacattcttggtagggtgaagcgggaccgggaattttgggcaagaccgggaccgggaatgttatagcgtttaatggtgaatatttgagtccatatgcagtacaatgagtttcgtatttttttaaagaattttaattaagacagtttttttcaaattttgataaaattcattccgatttttttgagaaaaaaaattccgttttaatttaaaattcttaaaaaaatttgcacgaaattccatgtgtaacaaaattctccaaataatgaattaaaaagtggcaaaaaaaaatgcagaaataatggcaaaaatgtagcgcaaaaaatgatgaaatttgtgtttttttttcttangaaaaatgtacagcaagaagtgaa

SEQ ID NO: 17543 - DNA, 912 bp, Heterodera glycines
caacaaaataatcaaatcggcgactgatcatcgcaattcctaggccaagctgagagggtgccagcaaatcgaacacctccaaccaacagtcggcagagatgaagctgaaaatggaaaagcaaaatgattagcatagaaattaaattgaaataaattatttacatcgctttttccatttctttatttgcttctttctgattgtccgacatttttttgaattggtaagcacagaaaatttaaaagaaatgaactgaaaaaacaaaatttatcaaacaaatggaatgaaagggaagaaggatatgactggaaagggatttggtcggctttatatactcggatacacttgaggaacgggggatggaataatggacatcagaagaaatagtaattaaaaattcttggcgctttgcttccctttcatcgattatttttctttttgacaaattaataaataaattgcgccttttttatcttcctaaataattgttgcaagttaaaacaggcattttcctctcattttttaaatttggggggtgtaaatgaaaagtatcttatggtgtttttgtgttccttttgctctctcatttttccaatttgtctccttttttaagtttaacaacagatttttgctcttttgagacacaccaatcaaccgggaaagggaaaagtgtgctaattgcagcaacaaaaatgaacagacggtaagcaattaatttaaaaaaaaattacaatttttagtttttctaattttttttccatgtttcagttggatttgtactgatgtttggatggacattttcccatcttttgaccgtcccaaacttggtctccaaatggcattgctttcttatcgttttgatgttttttgatggacaaacattttgatggaaaaagcgaattgacaatttggag

SEQ ID NO: 17544 - DNA, 1921 bp, Heterodera glycines
  unsure (1)..(1921): unsure at all n locations
atcgctgacgatgggccgaatgcaactgctggccaagcggtgtccaaatggtgcacactccgacgaaaaatggacagccgaagcgattgctataccatattctttcacaaaatctcgaatgggtcaagttcttcaaggaggtgatccgccacatttaaattgtttttatttttctcaattttgtttagacatttctccgtgccaccaccactttcgtctgttacgaaaggtcggcgccgaaacgcagtggacccgttacgaaattcgttttgcaatttgcatgaaaacaacgccaactgaaccatttgaatgggtgaacgaacggaccaatgagaagctgacactaataaaggatggaaatattttttggctgttgaaacggtgcccaagtattggggagacggcgacgacggatcagaaacaacagaagaatgaagaaaattcggaccatttgaaccgagtcaacttctttcttcatggaaattgcattgggtgagcggaaagaaggcttacttttgtaacggagtacagtacagtatcctctgcacggtactttcacagattcttggcagggccagcaggggttcctgttaaaacgggacttcattccttgacttaaaactgggtccgtcagtgttctaagccaatttaaatttcgttaatttaggccgttgtctccgccaacatatcaaagcgacgaaaaagtgttctcttttcccgggccaagtgatcagcggaagaagtgatcatttgagaaattaccgatcatattgcgttttgatcaatttgtgttgattgatgctatttgtttgctctttggactgaccattttggcgctgagtataaaataggaatttgaattgggttaaaaaaaattggaaaattcggcataaaaacttggattttccaattttcaatgttatttcattcttttttagaaaatttcgtccctcataatttttgaaaagtgatcagaagcgcaccacatttttccatcaataagacaaggaaacgcacatctatgatgctggctcccgtattctgaattttaaattttttacttatgcttattattttagaggggtccggcggcgccgataggcgccatcttaaaaaatttgtaatttttaatgcaaaacaaataccatttttttttcttctctttttggcgtaccttaaaaaagtacttatattagagttcgttaaaaaaaatttccgggaatgggaggggaaagagaaaaagctggactggaacgggattcccgcctttttaccgctaaaatcccgtcaaatttccctgttgccgacccggtgtaattactttttactttttatctgttttatacacttttacacaagcaattcaaaaaacaaatttttaaaaagttcatttattttttctaatgcatccaattgttttgcatttgctttaaaaaagctttctcatcaacagccttcgaatgttattaatctctccccttttaatggctaaatttaaatattgatttgttctttaaatcttacttaatatattaaatgtggacttttttcagttcatttcttttaaattttctgtgcttaccaattcaaaaaaatgtcggacaatcagaaagaagcaaataaagaaatggaaaaagcgatgtaataatttatttcaatttaatttctatgctaatcattttgcttttccattttcagcttcatctctgccgactgttggttggaggtgttcgatttgctggcaccctctcagcttggcctcggcattgcgctgatcagtcgccgatttgattattttgttgacgaacacttcaaaacgcgcaaatggacattgggcgaaatgaaaattcgacgcaaaattgggcactnttgggcgttttggtatccccgatgctttcagnttttaggggtcccgcaaaaa

SEQ ID NO: 17545 - DNA, 2086 bp, Heterodera glycines
aagcgctttttcttaatcgtttagcaaaccaataatctttatcattttaaattagtttaaaatgttcaacaaaaaaacaaaaatataatttaattcaaaaaaacaaaaactcacgattattaataaaagggaatgaaaaatttaattaaaggcaccaaccaacgcttcacaatatctcaaggcgagcgaatgattgtaatgggcgttgaaaggcaaaaagtttccattaaaatgtccttgaatatgggcgtaatatgtaaattagcatgccaacatttagatttttgctttcatttgaatttttgaatttggtttgcctaagtatttttttccttttggtttatttaatattttatccattgtaatttaatattttaaattttattttaaaaattattttctttggataatctcttgatttttattttaagttttttggttcgaaaactcagttatttttatgtaacaattctttattaaatatatacaatagcatattaaatcattaggcgtgtgtttttagtgaaattaaagagataaaaaaattttacttttaattttccaaatttttaaatttatttgtctagcaacccaatatctgtcttaagttaaaaatataaaataaaatttaaatgacaaaaattaactgtcaaatatttttaaaaaatttttcaaaaatatgatgccattgtatattagcaaagtcaataattgttaaagttaaaaattttaaaataaaatgaatttaattctgtttatttttaaaatatttctgaattcgaatttttataaagatttgaaacaaactttagtgtctattgttacagaataaccattatttgaaattttctattaataaaaatttttttatttaatatgaagaaaataaaataaatataagaaattaatttttgttatttttatggtaattttactaaattaataacgtctaattaaattaatttagatgaagtctaaaaaagaaacgcttatttaatagataatatttaaataatcaacaaaattcgaaattaatttattttctaatttttttattatattataaatttagtaaaagttagattttactttatttattttactaatttttaatgtgttccgattttaattaattcttagaatggccaattaaataaaattttaatatctttttttaaatttaaaagacttaacaataaattaaaaaaatatataattattttacaaatcaaaatgaataaattaaaaacttagaaattatcgaaaaattgagatgcgaaaatttaataaattaaatcttaacaaaaagaatgcatttcatttacttgcatttttattattctgattaaaatgctattaaataaattctctttataaataaatacaaaatttaggagaagtgactgagaactaaaaatgaaaacaactaaatgcaatttatataatctttaggaatatttaatcacaaaaacaaggttttattacaaaaaagatatatgcaaaccgattattttgcaataacaatgaccaattaaataaaattggttagttattcctttagaattttaaattttaaatgattttaaaaatttatatattaaaaaacaaaaagtttatttattttaaaaatcaaaatgaatcagtaagagcatataaattacagaaaaaaaaggaatttaagaggagtgactgaactggaatttgattgggtgccgacaatcggcaaagtgccattgtacaaatactcattttaaattaaaacatttgtgtccaaccttatttcaacactgaaactaccttgtgattttgattgcttgatcatttaaatattaaaattttaatttcatttgtccaaattaatgtctaatcacagaaaatataaaattatttgaaattcccttgcctaaagaattaatgagtttttaaaagttttcatctctttttacttgctataataatactaatttatgttttcaatttcaaaaaattattctattgtattcatatataacatttatttatttattttttcatttttaataattttgaaaaactatttttattttcattatttaattaataaatt

SEQ ID NO: 17546 - DNA, 3764 bp, Heterodera glycines
ggcccttttattttcaaaataaattttatttttaaaagatatttccaaaaaaatgggctatctctttttttgagaaattttctatgcaacaaacgctctcgaacatgaaacgaagtgcggtgcgccatggccattttatttttcaaataatttttatatttaatagatattccagaaaaatggctatctctttttttgagaaattttctatgcaacaaacgctctcgaacatgaaacgaagtgcggtgcgccatggccattttattttttaaataatttttatatttaatagatattccagaaaaatggctatctctttttttgagaaattttctatgcaaaaacgctctcgaacatgaaacgaagtgcggtgcgccatggccattttatttttcaaataatttttatatttaatagatattccagaaaaatggctatctctttttttgagaaattttctatgcaacaaacgctctcgaacatgaaacgaagtgcggtgcgccatggccattttattttttaaataatttttatatttaatagatattccagaaaaatggctatctctatttttgagaaattttctatgcaacaaacgctttcgaacatgaaacgaagtgcggtgcgccatggccattttatttttcaaataatttttatatttaatagatattccagaaaaatggctatctctatttttgagaaattttctatgcaacaaacgctctcgaacatgaaacgaagtgcggtgcgccatggccattttatttttcaaataatttttatatttaatagatattccagaaaaatggctatctctatttttgagaaattttctatgcaacaaacgctctcgaacatgaaacgaagtgcggtgcgccatggccattttatttttcaaataatttttatatttaatagatattccagaaaaatggctatctctatttttgagcactcacacacacacacacacacacacacacacacacacacacaggcgcaccctcgccctctcacacacacacacacacacacacacacacacacacacacacacacacacacacacacacacacacacacacacacacacacgcacacacacgcacacacacacacagacacgcacacacacacacacacacacacacacacacacacacacacacacacacacacacacacacacacacacacacacacacacacacacacacacacacacacacacacacacacacacacacacacacacacacacacacacacgcagggagaggggaagacgcgaataagaaagaaaaaagcaacaaaagaagacatagggagggaaaaagagggcagaaagaagagaaagaagacacaatttttgaaaaattaaggaatggaaaatgcaatttcaaattaatagatggaagtggtcattttaaggaagaaaaatgcataattagtgagcaaaaacaaaactaatataacggtacagtactctgtgagcattcattgcgtccgctgtcttcatccatgtctccctcaaatactaggcgcattgttgtgtcggataagtttgacgacgattgtttgtcgtcaatttcagtgaaaagacggcccagccaatgctcgttgttgttgttgatgtccatgtccatgttgtcatcaatcagctcaagaagttccattgggtagtgccgatcctcccctccccccgaaaagcgttcaattatgcacggtgcatacgggaagtgaagctttatgcggtgccgtgcataaaaatgcgccgccacattgatgttgaacgggttgcgcaattgcccatatgcgggaagaaatgcggcgccttgtgccgaaattccagtgacgaagaaagttttggtcaatccattacggtcgttgtaggtggtgcggactttgcgtccaatgatgtgtttcagcacaagcgcccgatcctctgggtggttgagccggtcgcgcaatgacttgacagggcagttgagaagctgagcgcaaaatgtgcttacaagaaccatggcaggagaatgaaattggaatgaggttgaaaaattttacttttatatgcgcaaaagtgtggccacgcctacaccatttgaaaagagtcacggttttagacacgcccactaaaagccaaaacattttgcctgccaaaaacccagaatcattttaccaatttttgtcaaaatgaaaagacgcgttgctcctcttactactgctactgctcctgctgagcaacatcaaataattggtcccgagtcgcccaagccacatgaagagacgcccaaaaatgttgagccgaaggatgagttggcaacgaagaaacacaaagtggacgaccgagagttgtggaaattggcaaaaggcaaatttttgctgaccacttatttgtgccatggtaataattaataacaatttcatcaaattttaatttgaatccataaattttgagatgattggaatcgtctgtacaacaaccagcagaaagtgaagcgcctggagggggaccgttttgccttcggctttgagatgtgtgaggaatgcgtgtgggccaactgccgcgcaaccgaccttttggcgccaatgaagaaaaagtgaactttgaccaaaaaacaataatggattttgatgatgcaatccataatttgaattaatattaattctgcataataaacaattttttttttgagacagtcctcaatttccttttttgtgtgttggttaagatgaaatgattaattggcttgccgaatttgaatctggcaaagacactgagggggggggggcacatggatagggataaagcgagtggaaggaccattcattgtcttattacacaaaccctctaaaaatataaaatgtcccgtcgcaaatcttcaattgctccatcacggtttggagctgcaatgcagatttaaaagaaagaaaaaatttttttgaaccaaattgttctgttgaaggatgcggcgagtgccattcggttcggtgcagggcgtgcgaaagtctgcgggagaggaacagagaaagaatgcgtatgggactaccccatgggcgcatcagcatggaatttgggccgatgaccagagaacagcagctcagtacaacggcagcgcgcaacccaatggaagccgcacttcaagctggtagcgaaacgaaagccgtatttcgttggggggacccgttggcacttgtccagttccccaccactttgttgtacccaaataaaagggggatgtgtttgtgtactgtagagatggcgcaattttttggggcctgtgggcacgtgggactgtgccgtcagtgtttgcttattcacttaaaaatttcacccagtcctgataaatgtccctattgtcgagtgtgcaccacattttacatgcagcattaaatatttgtcaattcttttttttccatatatattttgaataaatgtacgaaaaaatttatttttaaatgatgagaaatggtgaaattttattggtgaaattaaatggtgaaatttaaatggtgaaaatgttcaattcggccggccagtgcactcatcagctcatacactttgccacgaagcgtcgcagtttactcttcgccttaggaaatatataatttaaattaaaaagtgcatttgtgtgcttacatcctcaattatggttttgccctcggggctttccataagcccttttgcgaacaaattattatactgagttgtcctcaatatgaattcatcttcaatgtcatccaactttgccaacactaac

SEQ ID NO: 17547 - DNA, 980 bp, Heterodera glycines
attttacaaccaaaaaaaaatggttcgtcttattcaaaaccaattttggcggggaacgttgacgcagccgtggggtgtcaagatgttcaagtacatttggcgcaagcacagtcgttttttggtgaaaacggttatggtcagttttcgtttttatgacccatttaattatcaaaaaaaaaaaaaaaaattttcctcccattttaaggtccaagaaaacgacatcgacagcgcatttcatctgctgaacaggttattacacattctgtaattttgggtaatttctcaaaataaaaatgttgaaaattttcaaattgagcgtaaaattaaaaaaaaatttggacggacccaaattttcaaaatttcggggctattatggctaaaacaaaaaggatgggtgggaaccctccatttttctaaaagggtgccagtttcgtattcagagggaccccaaaaaccccggggaacaatttttaattggcattattttacaagaaaaattcaacaaattggttccctctttacagcctaatcacaaaaaatttttgttttttttagactcatggaacgtgaagggcttttgaagatcatccgcaacacccagcgctatcagaaaccgtttatgcaggtttttttttcatatttggaaaaaatttttgttgatcattggttccatgcaagcccaaggggtgtctcaggaaaaaaaatgtgaaaattttatcgaaatcgctccagggcttcgaaattggttgaatttacagagtctatttgagacgctgaaacccccaaaataattttgtttcgaattaaaaattttggatttattttttcgaaaagggagagagtgggcaccaccggcactattacccatttgtgtgctactattcacaccgcttttttcgcggcgcgctttttccaaaaatttctgtaggggaacagggtgaatgcctgcgtgcatagcaagacggggggggggggggggg

SEQ ID NO: 17548 - DNA, 1248 bp, Heterodera glycines
tttttcacgtaaaatttcacgtaactcacgtaaaacaagttatggctaaaataaacgatcagatcgtgatcagcgcttaaaattagcctagaaaaaattattaaaaaaatatttcagggggggggtggcaaaaccccataagtaccatccgtgggatgaactgttctcatcagttttaaccccaaaattccgttttcaaatggatgctcctccattcttaaaaaattggtgtttttttcagcgttcccaactgtccatcgaggcgtcgaaggcaattctggaggaggaccgggaccgcaagttcaagttcttggtgaggaagcatcgcgcggacgcgtacccggggcaactgacgatgtgatgggggcgggcggaacatttgtcattgtttttttcactcaaatttttttttattggtaaatattcatgtcttccaaaaaagcatgactttatcggcattcatcaagaattggtgtcccgacgaaaaaaaatagattttgtaaaatcattgattttatcaacgatttttcatcaactacttgatttttccaaatttttttatgaatttgggttaagaaatgcgcttatcacgcatttgaatttctaattttaaaaacaatatttttgtctatgatctctctcatcatttttttagtctattttccaaaagaataactgcttttttgtttaaaaacataaaatttttctttttttaatctaaaaaaaaccatttttttcatcatctctttcttcttctctttctttttttctttcattttattttctgtttcaattattttttgtttatataaaaaataatccgcagccaagcggattcgaaccctgtaccaccgcctcataagactcctaaccattaaatgcgaacagaaacaaaagggcaaaaattgaaggagaaattgcgaaaagtttagggattagtcgagacaaaatttaccaatggaagaagcaattaggtaattaaaaaaggaagccttaaatccgattcattaaaaattagagtgccacgggaccgggccgggaattcccggtcatccgaggtcccgggttttgaaaagctcaggtcccggtcccggtagggcaaccgggaaccgggaaaaacaagcactggtaagaatgggggtctgagtgaaaaattagtgaagaaaattggagtcaaagggaaaaataaaaaataataattaatataaacgataaaagtaacactgccccaagtgtgcaaatggccta

SEQ ID NO: 17549 - DNA, 3827 bp, Heterodera glycines
ttatttcttagcgttttatgtgtaattattagtcaccatgaggcctaaaaatttgcttatattttgtgaaaaataaaaaaattgtttaaaaattaaattttaaaattttaatccttcaaccccagaaatcaaacttttaatgggctggatgacatgataaaaatatactaaaactagtctagttattgaataaaaacgtaattaatgaacttaaggcggcgttctaaaattatacaaattaattgtataaaaaaatataataccaaaaaataattcaaaataaatacggcattatattcagaatatatttatacagaaaatttgttacatttggtcacaaaataaaaattcatttaattaatatacttattatgatattttcaatacttatttaaaaacttatatttaaaacacttgcaaaaggcaaaatatacatttttttaaattaaaaagcaacataaaagatatttaaaaaataatcattaaatcaatttatttagcatttattcaattaaattttttcttcgaaatacgataattattggaatgaaaatcataaaaaaatttcttttaatggacaacaaatcattaactaatagatcaggctttagatttataataagctaaaaaattgaaatttataattaaattattttacaaattagtgaaatgatatttaataaacaaataatgagaaaaccaattgctaaattaaaaataccggatttaaattaaattatagataaataaaaaaacaaaaaaaattttttaagacatttgattttataaaaatatataaatttaattcattttaataataaataaaataatttatgcaataacaactttaaaattttttaaatatgtacaaattaaatgtaaaataaattttgctttttttcaggtaatgatgatttctttgattaacgaccaatggaatacaaatgaaaaaaacttggttattttcccatttttctttttttatactaaatttggactcaagcatgtaatgtttggtctgtcggctgcgtaatgttcgaattgtactccagcggaaaagcaaattagttttgagagctggaattaagctggcagctttgcacctcccctctccccgcatttttttacagaaaatttcacgaaaaaataagaaaatttcagtgaacagtttttttcgttttagacttatataaaagaaattttttgagtttgtaggcctctagagaaaagtaaaaagagttaattttaaaatataaatcaaataaattatttttttaatatttaattactcatcagtggtttaaatgaacttatatattaattaattttagaatatattatgtgtcagtagcttgtatttttcagtccttctcgtcacccatagtgatattctgcgatacttgttttcactcttttaattattatcttttttaaatatactaataattcttatttattttttttttaattgttattcatttttatttcacttatttttaaaaattcaattaaataaatttactattttaaatattttttattcatcattagtcatgaattaaaatttttttaaatttttttattcttcttaatttgttttctttgtctaaattttaacaaaattatattttaaataatattttcagcatattgtgattaatttctcagttgtaaaattgcttttacataaaactgttgtatatctattaattactttataaaaatgtaataaccattgtaaaataatttttataggtttaatcgcttagaaataaactaaaataaagttgaatgtttaagcatcttcaaatttaaataaaaaattcatatttattttttatatcatattagaactgttaatttatataatttctataattattaactgtttttatattaaattaaatttttctttaggtgttttatttctttaataattttcctataaatgatatgatttgtaaattatttataacctttactaccgattccgtaaaaatctcgtccatattaacgggagtcccgggcgggagcgggagtaattcgaaaatttaattaaaaactcacaaaaatataggcattgctttttatttataaaatagttttaatgttagttatatttcaattactatattttactttttattgaataaaataaatatttggtgtatctatttctaaataattcttaattttaatttgtcagttcatcttgtatttttatggtcaaataaaattaataataataaaattttcaaatttcgaataatataattgcaataattttttctttttgctgcttatctcttcaaatcttataatcacaccacattttgaacaaaaataatgttgccaattaaatatttttttattattttgagctatttttgaataattttttatttattgatttatctctttttcaaatactgaatatatcaaattttacaaaaaaaaaaaacaataaaattctctaatgtctttaattattaataatattattaagaaagtaatctctagggctggcaaaaatatgtacaaaaagtggtcaaaatatgtacataaatattaaagaaaaatcccgaaatgtgtaagaaaaataccaaaatatgtaaaaaaattaaagtatatttttggaaaaaaattcttcgtatagggtaaaaagcacaaaatgccataaaaatgatccaaattggattagaatcacatttttatatgtttaaaattaacttttggtatttcttttttttgaaaaacccgatttttagaggtacattttcaaaaaaaaatttttgattttccaagaaatttttaatagaattatgtaaaatatgtaaataatctcaacttttgttcgcaaacccaaaaataaagtttttttctattatttagagcattaagaagcagggaaaaaaacaggtatttacataaaattgccagccctagtaatctcttaaaaattaataaaaatttatttttcttcgtaaattattttcataaataaaaggtattcaattttggaaaaaaattttcagaaaatttcacataaaaatgaattttttctggaatataaaaactttacatattttttattaatgaaattatttcgaggtgccggcgtttttcctaaaatcgcaattttaattaaaaataataaatgcgctagaatttatttatttatataaaaaaagttttttttatataattcaatcaattagttcgaattaagcacatttaagaaacacgcccaggacgattagtaaagtaaaatatataaataatatgtagatttatagaaattgttaatttttttaaatttaattctattaaataatttctgtttctcctataaaatgggtttttatttgaatttttctttggttttattttagtttaattgtttttgtttcttctattctttgtagtaccactctcttaaatccgggcgaggcttttaggtaaatgaattattgctataaaatattactatatgaaacttgtaaacaatattgtaataagtatagaaatatttacaaaatatttatcctgctctctattccttttaagctttaaggctggcataaatgtggacttacaattagtaaaaatttagaaaccctaaaaaatttaataatataaataaattgattccaatattttttgtttggctaaattttgcgtgaattttttgttcttcttatttcctttttaaattataagtaaatgattttttgtttactttttaattagaaataaataattaaattaaatttttcatttttttctttctaaaacatcggttcgtctcggttgacgtttctctttag

SEQ ID NO: 17550 - DNA, 2343 bp, Heterodera glycines
cgtcaataaactgaaagaaaaaagttaaaatttttgtttataaggcagcgtttgtgacaaaaccaacaaaaccattcattagtcaatcattgaaaagtcaacagattaattaattaacttgatgacgattatgtaatcgttaagtcatttcgaccatttaaaacgcacttttatcaccaattaattgttttattttctaaattaaattttaatttattttttttatttagtttattctttttattcctcctccttagttaatgagtttgttcttccgatttcgctatgccattctctttttggccactttttgcatggcttgcatttcgtccaatatgatcgcatttaatttcacccaaattgtgatgagaaggaccaattgggagaacgcgtcctttcccaagaattcgtccattttgctgaaggaaagtgacgtgcatttgaaggtaattagtggttggagtgatcaaacggggaaacaaactgatcaaacccaaaaactgatcaaaaaaattgaaaaatgaacacaaaagactgatcagccttgaaagtggaaaagattgatcagtaaaacatgagaaatagaatgagactgatcagagccaatgattggtcagtgccaaaaaaggaaaaaatgccaaactcttctgaaatgatatcccaaatttgccatcggtctgatcaacctccactctgttgtcaggaggacgtgctgcccgggctcgtgctgaacagcagccacgtggtgcctccgacggtgccctattcgtcgcgggaaaagtcggcgctgctttacgctgtcggcgcggccagcatcgtcagcacttttccgttcagtgccctgtacacgcgcttcggcgctcgtttcgtgttcttcggcgccggtgtcgccagtgccgtggccaccgcacttttgccgttggctaccgcccgcggcatggccgcctttctcctcgtccgcttcgtccaagtcacccccctccccaaatttcctatttatttcttcatttcataaagggcttttcctatggctctatctttgctgccattggtttcgtttgccatcgttgggcgactctccgcgagcacggcttattcttgttgattttataattcgttcttaataaataaatattcaaaccttttcaggtcctttatgacttgttttacgtcactttccgttgggatgactaattatttggctgcttttgtaaattgtttcaaattaccaataattaatttatggctcctttcgcttttagcttagctcaacgccttctttgggatggccttgggtttattacattttggctttgttcactttgctcccgttcgttttgtggctttttctgtactctgatcaaccggaaaagcaccgatttgttggtttgtccgaaaggaaggcaattctgagggacaaaacggaggctgagattgtccgcagttgcaatatgccatatttgttcgtttttttttttgcgtttattttttgccaattgtccctttccctttagcaaaattctgaccactaaaattgtcttcgtcatttggttcaatgccttcgctgacatcgtttccgctgtctttctgatcacttacctccccacttatgtgtccaaagtgctccattacggcgttcgcgagactggcatttggagttcgtttccggcggttgttcagctcccattacgggtccttttcggcattttagccgataaaatcgggtaatgtttgcttttatcagtgtgttaattgcccttaattattcctttttcattttgctaattaacttttctttcagttgtgctagtgaattgaacaaaatgcgcttgttcaattccattgccctcgttctttccgcctttttctttgtcctcgtcggttttgtccccgaaaatttgcctttcgttgccattctcattatgacgcttaatttggctgcggttgcgtgcaatactggtggcttctacaaatgtgccactttggtcactcggttggtttaaatcaatggcaataaatgacaaattcggtaacggatttttgagtgattggttaaacggtaaaattgcctatttttattgttgtcacagtgccgaacacacgcgaaagaatggggccggaagagggggaaaggaggggtgagggggcattccttgttttggattttgcccttaattatcagtcatgagtaatttcaagaagtttttgatttgtttagtcaatacgcccattttgtggttgccggcattcaattcgaaaagtctgtcactttgttcgtcgccccctttctctacgcccttttcatctccgatgagtcttcgctcgtccaatggcgcgccattt

SEQ ID NO: 17551 - DNA, 1284 bp, Heterodera glycines
ttacctccccacttatgtgtccaaagtgctccattaccgtgttcgcgagacgggcatttggagttcgtttccggcggctgttcagctcccattacgggtccttttcggcattttagccgataaaatcgggtaatgtttgcttttatcagtgtattaattgcctttaattactcttttttcattttgctaattaacttttctttcagttgtgctagtgaagtgaacaaaatgcgcttgttcaattccattgccctcgttctgtccgcctttttctttgtcctcgtcggttttgtccccgaaaatttgcctttcgttgccattctcattatgacgcttaatttggctgcggttgcgtgcaatactggtggcttctacaaatgtgccactttggtcactcggttggtttaaatcaatggcaataaatgacaaattcggtaacggatttttgagtgattggttaaacggtaaaattgcctatttttattgttgtcacagtgccatacacacgcgaaagaatggggccgaaagagggggaaaggaggggagagggggcattccttgttttggattttgcccttaattatcagtcatgagtaatttcaagaagtttttgatttgtttagtcaatacgcccattttgtggttgccggcattcaattcgaaaagtctgtcactttgttcgtcgccccctttctctacgcccttttcatctccgatgagtcttcgctcgtccaatggcgcgccattttcatcggaatggccgtcgttttactaattgtttgactatttaaatgattaatgcatgtgacctttattaacaaattgaaggcaaatgcttttttcgtcgtattggcaaccgatcagccggcagaatttacaaaagcgaaaaagaaaaaggacgacgaagagaaaggaggagaatgggaggaagagaaagaggagcaaaagagaagagaaatgaaccgaaggaaataataaaacggcaaaagcaaattgaaaatattaattagacttttattaaaaagaaaacgaaattggccaaattatcatttaaatttcgaattcttttctctgatttcttttgccctctcacttttcccttcccttccccctaaattatttttttattttatataattttccattttatttctttttccattctttttctcttttctctctttccatttcaccaattccttgcgtttacaattaaaaaagaaaagaaaattacacaaattttctaaagaatgggcgaattggccttcatcagcgtattgccac

SEQ ID NO: 17552 - DNA, 1519 bp, Heterodera glycines
atggttatttaaatccacaaaaccttaagtctgaatttttgtccagaacttttttgaaactcaattaaattttttgaaattatattggtaaaagaaaattttatcttattgcttctggaaaaaagttataaagcattaaacagactatgttttttttgccacagtcatgcgaatataattataaacatttaaaatttcaagtaataaaatgcaattgagccaaaattaatttatatattcgatagcgcttagaattctctatttacctttaaaatttcagaaaatttcattgattttgaaaaaagttctgggcaaaaaattccgacttaatattttgtggaattttggctccataacttttttataatttcatataaaaattttctaaattaatattctgatagacaacactcaaagctattaatgattccatgaaaatttaatttggttgaaattgagccaagatacgaatttatatgtcttacattttttattttcctacaacttggcagtttttaagaaacgacctagccccaaagggggcagaattttcgaatgtatcagacggtaaaaagaggatcgggaatcaaatctgttaatgaaccataaatttaactattttttgcttttcaaactcacttttttcggcgcaattttttcaaaaaaatttttagcacattttcaagaaaattaaggatttttaggcccggcggtgccgataggcgccgccgggaaaatttttcgaaatttcaatgctatttattaacagaatccgaggccccaaaaattttcggaaatcagaattctgaccccaaaatttttttgaaaaatttaatgctatttgttaacagattttgtccaaaattgaccaaatttcgcacttttttactcaatttcaacaggattaataagtgaaagccgatccggcggtgccgataggcgccgccgtgaaattttttgaaaattctagatgaaatttgagagaaaaaatgatttaatttgattgaatttattctaaattaattcaaaaattttggcattctattctttcaaatttcaaaaaatcaataaaatcccgcagaatcccgtacaaaaagtcaaaatttcggatccggctgcgggattggaactcaaaattctttgcgggacgggatcccgcgggattaatcccgcaaatcccgcattttccaaaaaaatgcgggaatgaggactgggatcccgcaaaatcccgcgcgggatcccgtcccgtgcctgtctctagtttttagcacctaaaaatcgaagccctactaatcatcaagtaacaaaatattggttggcgcccatttagcggcgcccattccacccccaccagcggtgggcaaaatttcggcgctatgtaatttcgacactgggtaaattcgacactgagtattttcgacactaagtaatttcgacactgaattatttctaaaactttcactgttttcctgcattttcgacactggaccatttcgacattgagtaatttcgacactat

SEQ ID NO: 17553 - DNA, 576 bp, Heterodera glycines
ccacgaattgtccaaatcatgaaatgtaaaagccacgaattgtccaagctacgaaatgtccaaaagagtaaaaaaccacgaatgtccaaaagtctaaaaaagctcataaaagcccggaaaactggtctattttagggttttaggggttgctgaatacgaatacgacctttatattgccctttgccgaatcctggacccaaatataaacataaaatagcaaaaaaaaaaattcaagacttctacaaagggtgctgatcaaaattcgtagggttcccaggagatctaaattgtgccatcatttgttgtaatagcgcccgccaaaattcgcgtaatgaccgcgtcctgcaggacgtgtattgtcacttgtgagtaaaatggctaccagatcgggccgcgtccacctgtctgtccataagtccgagagagcagtggtgacagagatcattaaatgttttttcaattttacttttataaattataaagaccataaagtcttgcgtgttattgcggtcatacaagacggtatcctcaccacgttttcacgtaacattgctggaacgacaacggtcaacgggt

SEQ ID NO: 17554 - DNA, 3465 bp, Heterodera glycines
  unsure (1)..(3465): unsure at all n locations
atccaggtccaggtncattttggaaatccaggtctaggtccaggctttttttcaaaatgccgatctctagttaaaatgttttgtcaaaacaaagttcagttttataaataaaattaaacattcagaaatatatacacaaaattataaaacaactgcgaaattctgggcaattttgcacaaacacaaatctatcttttgcatctttttttttgtaataattaataaatgccaccatttttggaacaaaagtgccgcattcaaaaaatcccaaaaaaaagagagtcgtaaatttacaacaaaaatgtgaatgtcgtcagtcaactcaacccagcagttgaggatggaacggcacagataaggaagggcacagtttcattccattgaacgaatcgaacgcgttggatttactggcgaagaatccgccgatgagagaataaatacttgggcaaaatctttgagagtgtgtatatgtgcacaataataattttgcgattgggctggatcaagatgggcaattctgataaaaccaaatgtgggattgatttgatgtaggatttggcaggatttttaaaatgggaagaattttttttttttgaattttttttttgggggaggggataaattgtaatggatgggattgattctatttaggatttggttggatttttaaaatgggaagaattttttttttttgaattttttttttgggggaggggataaattgtaatggatgggattgattctatttaggatttggttggatttttaaaatgggaagaatattttttttttgaatttttttttgggggaggggataaattgtaatggatgggattgattctatttaggatttggttggatttttaaaatgggaagaatatatttttttttgatttttttgcgaggaaaataattgtaatgtaattaagtagagtagataaatttatttgaatggataaaagtttgataagttttactcggtggtttttggcttttgatttaagtgcaagaaaacagaatttaatttaaaaatttaaattaaaatattcgattttttttttaatttagcatattttatttttgggaattaaatgtcggagagattttgaaagaaaaaaatatataaaattttcatggatgcgtaaaaaatagatttacaaaaaggaaatcatcgattggggaagaataagtataatgaaatcaattttgttttttttttttgattttcggtgaaataaaaattttatttgtgaggcgtggccaagcaaaacctttcggcgaatcagagggacggaatacacatacagtgttgctgggaacaaatcctggatgaatgtgctcggaattctattggcccccgaggggaaaggggcggaacggtgagggggaggggacaagtgggaaggaaaaaaaattgtatagtctaaaataaaaaattttaaaacagaaaatttagataaaataattttttttttttttttttaaacttaaaccctttgaaaattatattaaaaaaccctatttaaaaagttaaattaaaaacgtgacaaaaaatagataagcccattagagaagtttgttaattaattatattataatatgtataagctaacataactcagtgataagtgacaaaaaatttttgaagaaaaaaattcaaattttaaaattaaaaaaaaaattaagtttaaaataaaaaattttcgaaatttgaattttgcataaataaatttttattacttaactcctttgaaaatgataataaaaaaatatatttaaaaaatttaaataataatgaaatttctttttaatttttagtatgaacaaggtaacaaaaaactcaaagttcagtgaaaaagattttgaagataaaaaattcaaattttaaaattaaaaaaaattcttggccctgaagctagcctaaaaattgtttgcacatgacgcctaggaaaagcgtagcaagcaccattattccccactatcccaaccagcaaatatgggctgtgcaatgggcgggggcggaggattgtgctgggctagcccacgagggctgggcttggcccgatctgctgaagagggggggcggtggacgtaggaggggacggaccatagcgaccggaagggcttcttcgtgctcccggaaactcaagactctcgactccaacccgttcggcatataaatacttatcaaaaggatgggatgacggcggtggaggaggatgaggagaaggaggaggtgcgcggatgggaaaggaagggacaaaaattttgggaggagggcttcggggaggataagcgatgggcaaatatgggacggattgggtgcgcgggtgggtggcccggcaccagcacaccaccaacaacggcttcacaaaacagtcacatagaggccggctaagcgatggaatgcgttctcatcagcagcagcgcggtggtctctgtcggccgggataaggacgactgagcaatgccaaactgagtaccgctaggcgctaaggatatggaagagaaaatatgcacgtattatataattgtttttgtgatttaaaattaatggggggattaagtatgggatttgattgagtgattccacccccccccctaaaaaaaattaagatttttcaaggagcgagtttcgcgagagacgtgaccgagctttatggcataaaaatgatgatccgtatggctaaattacgaacaacgatagctgttcgttcataatgccattcagctgatttatcattgagtgcaataatcagtgatcacagatcaatgattatgtcaggatcgggtttctgtttcttggttaatgatctttaatgaatgacaacaatatatttgtgccaaaaaggggcaataaaatttttataatttgattgaactgacaagaatgaattatgccattttgaccggcagcatttgattagcatggcgaggggcagagagctcatttgtcagtcggctgagatgggactcagttgactgtcgaggacttgggttaaaaccataaaaaggaagtgccgacaccacacacccacccagaggcaaacacaaagtagccgagccgaacggcgcggatgggtataattgggaggtgatggaattggcaaacattgactcctccggggcttagggagggggcaaatttcgggggcagaggtgagccaccgtccatcatccacctgtttctctttagaaagtcacaaaattccagtgtttgaagaagcgattttggtgtggccaaggctcaaagatttcaaccaacaacaataacaacaaaacaggctaaagctatgtgtggttcgtcccccgatccattcggggacaaaatttgtcggaaaaagcaaggatagaacccaagaatgcggtaaagtaaattaattttttggataaaaattcccaaattttaattgaggtaatgtccgccctttggcacaccaaatattttgatgccaaatgttgaaa

SEQ ID NO: 17555 - DNA, 2563 bp, Heterodera glycines
ttttaattttattttctaaaaattccttcccaaaatcccttttttggtgctcattaaatgatagtgcagccaaatcggcatttatgccgaactttgcaaatgattattttaccgttatggcacttattttaattttattttctaaaaattccttcccaaaatcccttttttggtgctcattaaatgatagtgcagccaaatcggcatttatgccgaactttgtaaatgattattttacctttttggcacttattttaattttattttctaaaaattccttcccaaaatcccttttttggtgctcattaaatgatagtgcagccaaatcggcatttatgctgaactttgcaaatgattattttccctttttggcacttattttaattttattttctaaaattccttcccaacatcttttttttggtgctcattaaatgatagtgcagccaaatcggcatttatgccgaactttgcaaatgattattttacctttttggcacttattttaattttattttctaaaaattccttcccaaaatcccttttttggtgctcattaaatgatagtgcagccaaatcggcatttatgctgaactttgcaaatgattattttacctttttggcacttattttaattttattttctaaaattccttcccaacatctcttttttggtgctcattaaatgatagtgcagccaaatcggcatttatgccgaactttgcaaatgattattttacctttttggcacttattttaattttattttctaaaattccttcccaaaatcccttttttggtgctcattaaatgatagtgcagccaaatcggcatttatgccgaactttgcaaatgattattttacctttttggcacttattttaattttattttctaaaaattccttcccaaaataccattagaaatgatcaaattactcggttatcgcaagaaagtgaacccttcccggcatgtcgacaagctgtttgatgtccgaatcggcctgaaagtaaatgcttggcacacagcggacgggggagttgatcacttggaatatccggatcagctgattggcgcgcggttcgaacagataaacgccgccctgggcagtgccgagcagaaacacggactcagagtcactgatcggcactttgtccctgggccgtccccccagggcatcttcgacctcttcaccaatgtccaatcccttaattggccatcacttccttctcgaccatttccttctttccccgccgtcattacctttttcgctttgtgctttgccaatagtcccgacaatgtctcctccctttgtccttcttggcctttttctccttttccgtccccaaatgttttcccattttcccgagaagcgctcgacggcttcaaaagatgtcttttggggtgttaatatttttccacaatttttcccactttcgcgtccccttttacccgtactttgccatttgtttgtggcaaatgtccctgggcatttcctctttgatacggacacttccaaaaagtgccaattttgcgtcgccctccgccgaatggcatttgaatgagcaaatggtcccattctgtggaagtggttaatttctaatgaataataaaatatatgcgcagaaactccgaccgaatcggctgctaccaacaaagtgccgtcactgtcccagagaatgcagcaaacttcggacatttcggcaccgatcgcttcgctctctgccattagcatttatttagattttttgaatttattttaaagccaccgctttttctgctcgggttcacaatgctcagattccccgtggtccatccgatggcaaataaaggctcaaaagggtgccaacagaaacagcgggggacattcgcaggacgaaccgaagaagtgaagaagggctttcccccctgagaagcacaaaacggagagtgatcagacaaaggtttgatcggcagatcacttcggtcgcatcactcacctttttggtaaagaaattggcaaaccctccgttttggtcggccaacaaaacggaacaaacgcccaaaaggtcccttgtcggatgccattccaaccgaaggtgttttgttgatggcatcaccaagaaattgcaattttatatggatgtaaaaatgaatttattaattagatttgattaatttttgggggttttgttacgttgaattgcatttgaatttgaaaaattcattttgttgccatagaaacgattgatttatgccgaactttgcaaatgattattttaccgttttggcacttattttaattttattttctaaaattccttcccaacatctcttttttggtggtcattaaatgatagtggagccaaatcggcatttatggcgaaatttggaaatggttattttaccttattggcacttatttttattttattttctaaaaattcctttcccaaatcccttttttgggggtccttaaatggtagtggaaccaaatcgggatttattgcgaactttgccaatggatattttaactttttgggacttaattttaatttattttttaaaaaatcctctcccaaaa

SEQ ID NO: 17556 - DNA, 1517 bp, Heterodera glycines
  unsure (1)..(1517): unsure at all n locations
tcgggtacccggacccgtctaaccctaattttgattatcgcgaaaatcgtaaaatttattcaaaatagtaatagcaaaagaatacttaatattgataattttaatttagggctacacgagtcagtgtatttggacaaaaaaccgggttctggtactgctgggttctgaaaagacgtgttcgggttaggggtgaacgaaacttcgagcttcgtgcttcgaaaactcgcgttttttttgggcttcgaacttcgtgcttcgaaaaaagttgggctcgattcgagcttcggcttcgagtactaagccgagcttcgcgcacccctggttcgggtccggcccaagttttcaaccgggtcctgaaaaaaattatttataattattttcattaattaaaaattttatgaaagagttggtaatttattattattaaaataaaagatttttaatagatttggtagcaaaaccaaataagatttgataagccagcaacactaagtaatttttagtccaatgctggtgaggtcaaagaaaaagaaaagaaaaagggtttgcttcgcacagtgtcgtcccttttcacaaatagtaagaaaaagtcatcaagctcaagcaaggaaaatcatctccaagaatttgtaaaaaggcatgcaaaattggtgccacctcaaaaccttgaaaaggtgagtttaataaataaataatatggtacagtgctgcgcacatggactgagtttggtgggcctgcccagcacgacattagaattccacctccttcggttgtttcggacggcacaataaaattttttatttcgtttccagtttatcttaaatttgggttttccgagatccataaaattaacttgttcacttaaaaattgatgaaaacattttattaatttcaaaaaatatttttaagacctttcctaatggattgtgttttccagctttgttatcaagttttgttcaataaatggtccttttttgagtgaaatttgcgactagacggtgccaatagtgcgtgccaccagaaaaaaattgggattatgaatgagactgtttagaaaaaatttttgttttcaaccctcattatttcccactgattagaagagctttctagataactgtcctatttattaatttttttcaaattagggattttttaaaccaacaaaagttatacattcttagcatcaatctatagctatattttctctattagcgtggaaaatttcaaaaattttctcctgattcgtatagacgttttccagtaattagtagttaagagtgattaaatttttttaattttttgattaataaaaaaatctataattatataatgataccaaaatttatagcgttttattatttagcaacaaatccaaattataaattatcggatgattccagtgaaaagcaaaaataacataaaataataaattttaataattttgccttacaanaatactatatgtaataaacaaataaatatcttttgctccattangctcgtcaatcgtttgagc

SEQ ID NO: 17557 - DNA, 1830 bp, Heterodera glycines
cgcaagtggcatccaatcagaatcaacaccaaaagccagcaacagtgctgggaaaaaaattgggcggcttttccgctcttcatctgtgtcagtgtcaaccacacagaaaacatcagaccaaaagcaggagcaaaaggatggcttaaaagggcctatgttgcaacgattaccaactataaggagagacggtgggacaaacagtagccatgtccgctcaaaatcattctcagtaacgaaagaagccagcggtagtaagcatggagcagaacaaaatgttagttcaagtgggcctacgttgaaacgagcatcgtcgacacggagagacagtatgccaaaccttggcaattccaattcagaatcattggcaaaagaagaaagcgaaatcaagtctacgaagaatccacaaaaaacccaaaggagaaattcggaaccaatggtcgggtcggactataaaaaataaacaatattaaatattaagcaaacaatgaataaatttctgagtttgtaaacgaatatttaaaaacaaattatttttctgagctactattgttttttaaaaaattcatttaatcgattttggtgtttgcctaaatttcttaacaaattcaataatgcataaatataccccctaataagcgcttttgtattttttatatttataatatttctcaattaattaaatcaccaaaagtaaagtttcaaaaacataaatttaaataaatctgattttgatgaaatttggcatcgaaggttttaatagttttgtctagaaaccggcgcgggacgggatcccgcgcgggattttgcgggatcccagtttgcaatcccgcattttttggaaaattcgggatttgcggatattgcgggattaatcccgggggatcctgtcccgcaaagaattttgagttccaatcccgcatagtttttttgtaaaaaaatgcgggttatgaaaagcaaaaaatagtcaaatttatagaccattaacaaatttgattcgcgatctctttttaccgtttgatgcatttggaaaatcttagtcgcccctttaatgcatccctcaagcccctaaaaatttccttttcaaaatatcaggtattttttctttttggaaattttatgaaatataattaaaattttcaaaatttccaaaatcccccaattacgcgcggggaacccgcaaatttgaaatttccggtgtttagttttgcccattttcaactctaagttcggcagttttcacctgttattttgaacatttatagtaataactttggtccaacttatcactatttattaagtgttcatttaattaaattttataataattaaataggaacggaaacgcgtgtcattcgaacttacaaatgatcaaaaagacggcggcttattagaagaagagttgaaaaagtgtaatcaaccgaagcaatcattaacactaccaagggcattgtcaacgagggaagttggcggtggtcacaaaaaagctgatgaggtagtaaatctctaaatatgaattaacaatatctgaattataatctctatatttatcaaataaatagtcgattttgtcaatatgaattcataataaagtgtcgggtattcaatacgaggtgggattcttaataagtgtcggggtgccagtattagtcgggtcagtttgagtggggatttgtaatgtgagttgagggtaacaattagtattcgggatatatagtatgagtcggggttccatttcgagatggggcagtaggagttgggaaaaattagtttgagtcggggtaccagtgtcgagaatgggaaacttagtacgattcggggtaccagtacgag

SEQ ID NO: 17558 - DNA, 2507 bp, Heterodera glycines
  unsure (1)..(2507): unsure at all n locations
atttgaagaaatggacggggcancggtggaatgggggactcgatcnaactcggggagcaatcgcncaaatcggactcaacggacacaaaagccgggactcgcccgaacggacccgacccggggggcctagggggaacggtgactcgaattggggccccctctcgtccctctccctcaaatcgtcgaggtcaaatgggagcgttcgccgaagggagtgcctcctccctacaagaacagtgggcaatggctgataacggatgggaaagcaattcaaattttggcgaaatccgatgggaaccgaaaaaggaggaagaaaacaatttgcagaacgataacgccgacgaggggatagagggagaggggggaaagacgaaaaaaggagacaaaacaaacaaagatgggtccaaaagtgcaaaaagacagatgtctccctcctcgtttgcaaacgggggattcgatcaaagggagggggaaaacgacgataaacagcataattttgggcgtcattttcaattgacccgcccctccccccaaggaaagggggcattcccccttcattcatctccgcacagcattccgtggccgcacaattcgccaccttcaattgggagattctcccatcttttctcatccactttttcttctagcacatccccaactgatttgtcttcccaatcttcaggaatggcaaaagttgcaaaccggaagcggaatgagcgccgaattcgtgccgtccaagacttggcacggcacctcaaccaccgaatgaaccgccaccgccatcggcagcgcgacggaaaacgggacccatcggaggaacggcacatccgaatgaccgccgaacgttatgctgatcagctctctcgcctgggagatgaccacattcaccgactgcagcaccaattcccgcaactccccaacccccgccggcgtcgatcagaggtggggggcaatctgaaagggggaaagtcccagccaaaattggcatcaatggtggtacgcccgccccagggagagttgctcccttcaaaggatgtcggcggcgcggcaccgggcgcatcgaactcccatagccgaaacgagaacgaagaggaaggccgtgagaaggccgagaaggaaagaggcagccgcccgagggtgctccctccgccgggggacagttttggagaattgctggagaaagaggcgaaagctcgggccgaagtggccgagctcgaagcccgggcaaagaaggcgaaaatggagagggaggaggaggaacagaaactgaaatcggcgaaggaagcgcgccttcgggacttggaaacccaagccgacgacttgcgccaaatgttgggcgatgcgagctggccgtggtcgaggggcaaagacgggaaaaatggggaggcggtggctccccgcgctgggaaagcggtagccatgccagcagtgccgatggaggatgatggagtgtcacttgccgattcggaaatggaggtggtgccggccgggggcagtgtcgcaagaagcgacgagatgaccaaaacgggcgggaggtctgctcccgccaaaggaggaagccattcatgggaaggttttctagtgttcggagtggacgatggaaagccccgggaactgtcacgggaggaggaggactatttcggagggggtgcgctcgatcacccggtggcatttccccgccgggagaagagagggaaaagaaacaaatggtcgaacgggagcacttcccgtcgcaattgagggacagagcgagaggcgtcaagaaaatgattggaatttgccttttcttcccaattttctctatttttcacctctttctttttcctcccatttttctcaacattttgctatcgtaattttattcaatttttgtcgtatttcaattttgcccccttttcttctctttttcacatctgcgtctgctctcccccttttgcccgccgctttgccatttatttttgaattcacctttgtcttcattttggccgacacttcccctccggccttctccgattcttttccgatttttccccattttttgtccctttgtttttgtcaattcaaactttggaccattcacatttttcgcatttttccattcacaatgtttacgatttgtgccagggagcttctctccccggcctttgactcttcccttttcttatcgcatatttgagaatcattcgtttgctcatttgtccaatttgcatttatctgtgcctaacccccggggggaaaaaacattcgccaatcactccctttccccccccccctttttttttcttttcatcacttttgttggccatcatatcattcattcgttcatttttatgtctcactcccctccagggagaaaaaattgttctttttggccttaatctctctcctcaccactcaatcacggcatccacttttactcctcatttttgccgtttgtcacttttatgcccaccccccctcccacgggtttaattaccccaagtttgagcgcttcatcaataaactat

SEQ ID NO: 17559 - DNA, 1306 bp, Heterodera glycines
actgttgctcatctccgtggaccaaaaatgctggaaaatatttttgtttgaattttttaatttaaatttcaaaattttaaattttataaatcctaagccacttgaaaattctaccaaatataattaatatttttcctaatttttggcaacttattgcccagaaattcacaattccaactttcttttgtacatacatttattatgttttatttattttaaaaattatttgctttaagccattaaaatccacgaaaattttcttgttattaaaattattaaatagacttcttaatccggttcataatattttttgagtttagacctcttcttggccatctgttcgatttatcgggaatattttctgatttggagaaggtccaattctgacaaaaaattgactggcaaaaattttttttatccaaattcatcttaaatgttttatgaatattaaaaatttaattattattcatattttttgaatatattgtgatatattttttaagaaatcttcagatttttggccccaaaatattgccaaattttaatgtctcagaaaaataactgttaaaaaaattctaacccaaaatttgctgcaaaatttctttaaccctcataattatcccccgcggaatttctttgtaagaaaatttcccactttttttgtcactttgtccgcctcctccttctcctccggcgccgcccaccgatcgtcgtttctccgaaattgccacaaattcgttggcaccgtccgttgtgccgtgcaccgcaatgccaaccgcaaccattgaccgccggtgatgctccgcgtccgccttggccaagtcggccttggtgaaatggtacacaatgccggcaccgaacgcgtcgcccagcacattgatggatgtacgaattcgatccctgttcaatggcacgaaaattacaataatttggcaaaaaattggaggttggcacaaattttgatagtaaaataatagaatacgtgaaaatagaaaaaaatgatggcaattcaaattaataaaattattttcctaatggacaaaaaatctataaaaattaaaaatatagaaaattgtaactttcataagtagaaataaaaaaatatatatttagaaaaaattacatatattgctatattttttgattattattaatgattcattaaaagaattcttaaaaatttttaaaaattggtttaaataaaattatgaaataattaatttaaatattattaaaattattaaaaacatatttttaattaaatggaatttaaattattcctaatatttcaaatattttaaatcaa

SEQ ID NO: 17560 - DNA, 2516 bp, Heterodera glycines
tgtaaaatttttttttactattttttcaaaaggataaaatattttaaaaattaggaaaattaggaaaatgtcaattcatttaaaaatgttaaatttttaaatttaataaatgaaattttgggaattttaaccattagtagccccacctgacagtgatcacttggccaaacgaaagatgcacgtcattcatttgcgctaaatgttcaatgttttttaattattaatttctattttatttattatttcttaccaataaatattgtagcgacagcctcgtaaagtgccgtgccatcctaaaaaaaatttgtaaaaattttagagatttttcaaaaaaaaaattttcaaaaatttttagaaaattaaaaaaagacaaattttgccatgttaattgtggcgccaacgggcagcacaaagcgagtgacacgccgatcaacgcccaaattttcctccaagcaacggaaagagataggcaaagtggcggaactgaaaaatttttttgaaaaaattaaattgaaattgaaatttcaacaaaatgcctcgaggcggtgcccaacgcagtgatccacgcctgaagcaatccgcgcatgaacacgtacggattctgccgagtcagcacaaaaaacagcaatggcaacgagactagggaatggatggccaagccgagcagtacggtaacggaatactgtacaaaatttaagggcgtgtcagagaatttaagcgataattttttggcgaaatgtttattaggtgaatcaaattgtgcgtgtgaaacagggctgggcaaagctcggcttaatgttagtatttgaaaccgaaacgaaggtgaagtcccaaaaaacggaaattttcaaaatttttgacactcgaagcatcatttttttcaacaaaaaaaaaatcagttttcaataataaaattttaatgggtggtaaaaaaaagttttgtaacaaaaaccatgaccatgaaattaatgagagaatggagagttaatcaattctaagtattttcgcggtttttgagtcaatttaaaaatttaaaaaaaagtaccgaaaatcaatttttcaatttttcggtcataattttctaaaaataaacgtaattttctcaaaatattcagcctcttagagagcagtgctgtcgaaatcgaaaaggcatttaatttaatctcctccaagaaaatttggcaaaaagtttttgccaatgacacaattgtgccaaacaaaacctaccatagccaatgagcgtgccgtgttgctcatgtcttcaacctgcaaaatgtggcccatgatcagacagcaaatgccgatcggcgaataccacctcaaaaacaaagaaatttgttcttattaattttcaaaaaaatgccaaacattatgagggacacaagacgcatgatcaccttaattaagtggggtcattaagaaattgaaaaaaatcttaatagtttctgaccaggtccaaaaccgcaaaaaagtccaccataattcgggcctgggcgcccagctgactgatcacaatgccaaacgaaatgcaaaagacgatgattcctattgtagaaaaatactgtcgtaatttacccctcctactgtaggataaatatagtagaatttagtgtaattgctaatattttgattaatttttattttctattaacataatttgcatattggaccaaacacaaaaaaaaaactaaaaataaaattacacaatgcaaattaactatgttttcatcaaattagtggactattagtaatttataaatttaaaatcggatgtgccgaatacgtataaattttgaatagcaaaaagctcgcaaattctaatgaaaacccattgatcagttgcatttggattggtcggggtttcggtttctcgtaaaaatttggctctcaagcagccccaattaaatagggactcaactagccggacgggctcactggtactgaaagttggcttttttctttaactcaaaaaattctcaatgaaaattccgaaaaccctctcaaaaaatctgaaatgcccgaaaatttgagcccgttaaaagcctcttttggcacactgtcaaaaaacgtgccgagaatgttcaggccgtccttgtacaccgtcttgtacttcaacggcacgtccgttttgttggcatcatacacataagtggtctccatctgctgcattgttgcctgcacaatgttttccgggaacatattcctgaaaatggcaaaaaattttgcgggtaaaaaagtgcaaaaacaatcgccaaaaaatgccgaaactgacaaatcatgccaaaaaaatgccaggattaaaatcgagaaattgaaaacataagaaatcccaaatttggttgtttgaaagaaattagaagatttaaaaaatttacttttgaatgtgacagaaacaaataaaacttaatggaatttttattttaaaaaaaaataaaaataaatgaaacatttttaaataatggtaaaaatttcgaaaaaattagttaaaatattatttaaaaatcttaaaaattagt

SEQ ID NO: 17561 - DNA, 1959 bp, Heterodera glycines
cggcatcatttggcataaaaatgtatgccgacgatgttaaattatattatgcctatggaaatgatgaccattcaaatcagttggataaagcaattgaggctttggaaaaatggtcaaaaataaaatcgaaaataataatataaaaattataaacaaaatagaagtaaattgtaattgcttagttaaaaaatattaaaatataacaactttagtttttccgagaattaatcaataaatttcattagcaaattttaaaaattcatatgtggcagtgttagtgaaatgcttaatatcgtagtcgtcttcgatagaaatgaagctttttatgcaaagtaaaacataaatatttcataaaaataaattaatatataaaatggtaatgtattgcgtcaaaatgattcagaaattttattaactttttttgagtggctttagttatggctgttcattgaatttttatttaatatttgttagtcaaataataaagtgaatgaatggaacaaaaagagatgttattgaagcagtacgaagaaataaaagttccatataaattactgaatattgaaaaattacacaacagcgtgcttttcaactataaactgaatgatatttaaaacagcgctatcaataataatgtagaaatttgacaataataatgataaaaaactacttaataatttttttcaaaaaaaatataaaaaaattttaatattttattaaaattattgttttctgtgtagtctaaaatgacagtatttagcctatcatcaagaccgcaagccattcagcgtgagaaatacaagaagcaaactatgacgtttaaaatttgataaatttgaatgtagtaaatatcctatttaatgaaagataaaataataacaaatgttaagtttatatatatgaaatgaatttattcaaaatcatacaaatcacattctcgatcatttaatttattatttactattagatcttttttaagttaaagttttttgactcgtgcgataaaataatttcatacactaatataataactattgacgctttatattttagttattaaaatgcggcgaaaaagaagcctaattatgtgggagacaattaattaatttattggattgtcgatcatgttgagttattgaataaaaaatttgcttctatagttgttttttcctctcttttaaatgttcatttactgctgaatattttttttcgaaaaatatatctgttaaatttggttaaggaatttgttatttttgataacccaacaaacatgaatttaagaaattgtcattactaaagatattgtaaagaaacaaatgcaataataatagaggcatgctgaatatcctgtttatggctgtgcgggtttccttacaaatttgttgaccaatttcaaataatttttcataatttttataattgttattatttaaatataatttgttttagatttggctatgaaaaataattaaattgcgattttaaagtattatttaattattgaatgatataaatgtagattcgtttattcattattgcttttatttacaataaaattttaaattagaaattagtgcctaccggcactgcagcgccccaaaactcttatttttccttataaaaatgatacaaaaatcgcaaaatttgatcatttttttagtgaaaatatgtcaacaaattttattcaaattttcaaaaattttcccggcggcgcctagcggcaccgcctccatctgcccctcttcccaaaaagttttggaaaagcgcgcctcaaaaaaggtttttattgattttaaaatttggaaaaaaatttaacaaaaaaatgttttgttttatgattttgactattaaaaatttgtagaaaaaatttcgcgtttcacatttattttcatttcgcattttttacttttgcaaatttcgcgtttcgcattttattttcagatttggcccatccctgat

SEQ ID NO: 17562 - DNA, 1325 bp, Heterodera glycines
  unsure (1)..(1325): unsure at all n locations
cgataaaaaaaggttatttgaaaaaatactaaaaaggcatatgccacaaaatccgggctctagttattaatattaaaatagattatttttcttcctactaagaaaaaattatatactctaaattccatttgctctttttttcatttttaactatttggtctgctcaacagccactcttttggttgttcattaattatacatttttgggtaaaagaatgcttttataaacagcataaagtcaatagttttattttcttgtttgtcgcgaaacttaaatgacgaatgttgactgaatgctggacctgtattcataatgattatatttcaaaagatgtaatttcttctttattaatattcctttgctattttttgaattttgcgtttatttcaattcaaattttcttcaaactaattaaggcttcaaaataaaagattttattttcttgaaaaagagacaaatgcttctaaattctcctttgttaacgaaactcacttttaagattttttgttcaataaatattattagggatgcgatttttaggtaagaaaaatcccagaataggtacttaaataggtaaaaaaaaatctcaaaataggtattaaataggtacaaaaattccaaaataggtaaataaaattttttattaacgatttttagtggaaaaaagcaaacaaagagggaaaattttggttctgcatatctctttgtaaacgaaaatttaaatatattaatattttcttagataaattgacttttgttatttttattaaaaaggattagatttgcttattcttatccaattattaatatttaaatatttatttatttttataatatgcatatgataatataaatttgcttttgtttcaatttttttttttgtttaatatctttaaaaaaatcatatatgaatacattttgcttttttttcttttttaaagtgattttttcgtaatattaaaaagaacttaaattttttttttcaaattttgcactcgcgcacacgaacattgcagaaaatacttaaaatgagaaatgcttcatttaaatattttattttaaaacatttaaataaattatatttttttgtaagtattttgaaacttatttggattgactttgttttatatttagtacaacttcgatcgtaaaatttgtataattttaattaataatatttaattttatattttaatatcatttgtatacatttattcatgcttcaatatgcaatgtattcaaagattattttattaatatataaaagggctgatttatgttttgtggttgcttcaanttatttaatgattgtgcttttagaaat

SEQ ID NO: 17563 - DNA, 3110 bp, Heterodera glycines
ttgttaatttggtggggaaaatgtttttttaagagtttacctacataacttaaaaatcccgaaggaactaatcaaattaagttgaaatttgaaatacttactaattcaaaaaacggagtcgcgacaaaatataatgaaggaaggcaaaggtgatgggcatcagccgacgaaaggcggaaatataaaaatgaattgtgtgtgtgggaattggccgtaaattccgttccttttatactgccaaatttcgttggaaacgcggagagagtcgggggtcattttgacgcgggacattttggcgccgccaattttgaagttttctaatttttttttattttgcaaccaaataaaatattcttaatatcaaacgataagcctaagtgttctttataagcttccaaaatttcaaaaaattatattagattaaaaaaagggacgaaacccaactcgtactgtttttcgagaaaaaaaattgtcataacttttgtcaaaaccaacaaaattaaacattcttgttagagtgaagcgggaccgggaattttgggcaagaccgggaccttttcgggttgaaaacccgggaatttttggctgggaaaaccgagaaaaaaccgggactagtcccggtcccggtcaaaaccggaaccttggtactcagttgtccgctctgcatttccgctttcactcactttttttaattcggctttatccctaaattgaatttttgcaattaaattttagcgcttacacatttccctctctctctgttgctatcacaacacaattccaattcgtcaacagcttcatcttccatgggcctcggcatatatctcttggttggctcggtttcattcatcgtcggagtggtgggtttttgggggtgggggaaatcatttattttgtgtctaatttgtccccacttccctttcagtacgcagggctcatgctgtccatccaaattatttgtgagtgccgccactaatcatctcgcacaaatttaaaagcagtggacgcaaatctgacgacgacgaatgccgacaacaaaacggcgcctgggaatgcgaccagaagcccctcaagcagcgacagtgactgaacgacgtgacgacagtgaatgaatgacgtgacgcgtggtacaacaacaataacaacggcatggagaaaagaggcgatcggaatggatgagaattttgcagaggatactaattaaatcacggataattgtgcccatcttagagatgctgtaatgaaattgagcctgtaaaacccaactgatttgtgtatgaatttccacactaatgccatcatttgatattaccaataaatacttttgaattggctttccgcatgttttttcatcagagtcgctgatcattgatcactaagggttgcgtggtattttgctttatgcctgctgagcgttgataaattcgagagtacagtactgtgctcgaccaaaattatgaatagcccccaatcaaagagggcaacatggatcaatggtgcgcttttctcttcgagggtctcggaaaaaaccgatcaaaacatttgctttttgatgattgccagtgatcaggaaatggtagcgttttgattcactagtttaaactgacgaatttaaggcatttacggactttcagcagaaaggggaagattttttgtgaaaaatggctatattaatcggtactcagccgtccgaaaaaagcgacaaaaacagcaaaaccgttttattttgtaaaagaagagtgtgtgggttggttaatggtacgagaatgcgacagcaaataaaaggggaaaaaagggagacaaaaaagggtgtcaaaataaacggaagaaatcaaaagaacaaacaaacaaagaattcgaaaagtggagaaaaattggcacttctaacttttttaagtgaatggatcctgaatttttggtgaaaatctgaaaatccgaactccattaattgcctcaacataatacctacagcgaaaatctcgacaaaaaactttcatttaaccttgtatcatctttatccaaaatacacaaaacaacatacagacatatacaatatacatacataatacacattatggtggtacagattcatatacataatacacacattattgcgggtggtacagattttcaatgatggatcgatcagtcgccttgccactggtgcggttcttccggttcttcagggggaattgcgctcatgaaattgtagcggcacacgggacagttgatgttgtatttgagccagcgatacaggcaccttgatggggggataataagcgatgatgcatttatccgaaatcattaaaatcaaaattggatttttaggccccaaaaaaaatccataaaattccaccctgtcaatttcggggatacgcagcggttcaaaactgatcggaacggatttcgaatagcgatcagaaaaaggcaaaaagaccaggaaaagtactcggcttttagacttgtttgaattcggggatccatgggttctaaattaataggaattagccactcctccacctgcgatgaaattggtgcacacagcccatggtcacacgcgtcatgtcgctcactttgctcaggcacatcatgcacttctcgcgtcccatcgcattgcctgactgaaaaattggcacaattaaaaaagggtgtcgaattgaattaattagtgtattaattgcccctccctccctctctcgcgtcacccacatgtccggctcgtccaattgcggcacgcgccttcttggcatttcgacgattgattttgatggtccgtgctcgctctgctgatgcccttgtcctggccgttgttgctctgaccatcctgaaaaaagggcacaaaattcagttcattttaaaaaattaaagaaaaaaaactgacgggaattatttattgtataggaagacgattcgaccgatggaaagaaacaatgggtgaatgcaattgaatgaatggatgatttttgtggggaattcatcgcttaaatacgcagaaaatttcataaatttgtcagtcatttttaaaaaagtataaataggacaaatttaagttttttgctcattttttttgtttgaattcatcaaattcactcttctcttctgtccatttt

SEQ ID NO: 17564 - DNA, 1240 bp, Heterodera glycines
cttgcaccattgtaatgatactttggctgatctcttccccccaatggtcgatggttactgacattggcacatttacttcgtttaactgccttcaataatactagatcaacacatttattggtctgatcactgcgtccatcatgttgatcaacttgaagcatacaatgatcacttatgcccgcactttgatcagtttctttcactgattgatcattttgtccaacattctttctccacattttccatacattgatcatctttttcatccatatcaatgatttgattgatgttctgattcattatttgggtggatttgttgttcattttctttctttttcaacaacaatttctctttaatatcatttgctataagtagctactcaccaagattttgggggttgcatttcacccccgccatttcagtcccagtggaaagggacgtttcagtaccaaatttaaacctttaaaaaacatctataataaatatatccaatcccagaagaggtaaataattgaaaaaacatctggggccgtagcaaaagaaggtggttatttgacgaggtcatttaactatggttatttgacctggtcatttgaccacgaaatacgagaaaaacggtagcaaaagaagatagtaaattttctgctggagcaaccaccagtcaccgttttttaaccatgaactaacttcttttgctataccaccaactttctaccacgaaatttttatttacatatatatatatattttgcttcttttcatggaaaacaagaagtcaataagttgttttgcaaatttgcagctgaaaggatgaatggatcaatagaaaatgatcatgaaatatatttttattttttgttggtcgctaatattgttcgcctatttttcattataaataaaccaatataattttgcatctttttcttcgtccaaatgttaatatatccttccgagtaaaaatattcagaataaacttaataattttatataaaaattattaaagaattaatacatattctcttatttactaaaaatgtctttgttctccaaacaaatgtctgagcaaattgcaacttcaattaaagacaattacgcaacattcttcccaaacagcaaagaagctaaatttgcccagaagtcaaatactgcctgggacgacttaacaaatgagcttatgcaacttggggttcgtcggtcactgtgaaacagtcaaagaaaatggccaatatgaaaaaagat

SEQ ID NO: 17565 - DNA, 1697 bp, Heterodera glycines
caagtgctgacgtgatttggaaattcagtctttgactgaagctgggtttgaggtgccaaaaaagaatatcatggttttcattccctttgtagcaagtgccaacgaaaatgccgaagaccgagttcggggcaacgccctctccttcttttttgccaaaggcatttcgtcgaaccgtaaaccctgttgtcgatctgcagcgcgatgtgctcgaactccaaaaagactttttcaaacattctgccatgcccttggttgacaaaatgtcagcttactatgactataaaatcgccaaaatgatggcttcgaatgatcagcagcagaaaagtgaagaaaaagaagaaaacaaagaatttgatgaaaatgagttggattattaattattgactaatcttatgatttggcatatttggctttataagccttttgatcaattaactaattatgtttaataaacatacattaatcattttacatcttagacataatcggtttaacttcttttttttatcggacaattggcattgaaaatgcgtttgccgttagccggagatgattttgatgatgaccaaccatccacaatctcttttactgaaatttctgcaacagagcaacaatggcgaagtgaacgccagtcaagacaaattgctcttgaaaaaagaatgaatttaaccgcacgaattgagaaataaattaattttcatatattatgagtttgtttcggaatttatcaataaaaaattagatattcagtaacaaaaaaaattaaatatttttaatttactcttgattttaaaaatttgggttattttgttaagttttatttttttttatattaaaagtaaaatttaataataattttttacttttttcgaaagctaagacttttctctattttatgaatcttatttgggatttttatcttgtttctctgaattttggcagatttttaaaagttggtggttaggtctgcaaccatgggtaggggcagggttgcaatttaaccatggtaacatggttaagtaaccaccaaccatgttcttttgctgcgcgttcacaaaccaccaaccatcatggtcaaatgaccatgttaaatgaccatgaactcgtggttgcacatttgctacgggtttaccatcatggttatggtcatttaaccattaccaccttcttttgctacggccccagaaggccaagttaatgtaataagttttgtatcaaaattgttttaatttaattaattattaatttaaatgttatttttatttgtccgttaattttttctattttcgtcaaaaaaatcatctcaataattgctttaatttttgcgggacgggatccaacgggattaatcccgcatttaaaatttgcgggatctcgcgcgggattttggaaattttgaaaaaatgtcaattaaatttaaaaaatttccaaaaaacaaaatacctgtcattttgaaaaagaatgcgggatgcattaaaaggggttgtgaagatcattattggtcccgaaattttttaattttatttttttatcttaaaattttataacacttttctaggggtgttttgaggcgctgagcacgaatccggcctccatttcgaccaattccgaatcccaagcccgaactcgaacattttcgggaatcaaatttatcaattgtaaaaatttattttaaaacattgtttttagtgttttcg

SEQ ID NO: 17566 - DNA, 1378 bp, Heterodera glycines
gtaaaatgaggaccggagccgattcagtgccaggaaaagtggaatgaatgtcgagactcgggaccaagaatttcgaaatttactatatcacatttttcagtgtttgtttgttaccctgcggcactgtcggatcattgatcaatgcccaaatttggtccagcatttcgtgtttttcccgctcgatgatgtctaatgtctgaataagcattggccaataaatcaatccagtaatattttgccgctcccaaaaaatttgttggcactcgcctctcttcggaccgcaatttcgtttggcctttccaattggtagaacacaaaggcaccaccgacaatgtaacaaacggacatcaaaatgagtccgacatggggaagaacactgaaaattaggggggggggggggatcgaaattaattaattaattaggggcaattaattaatcggagtgacagagtctggagtttcgttttttagtctgttttatatgcaatactcacatccgcgcatatttcttccaggccggcattttctgaaataaaaagttgcataggtaatttgaaccaatgattggcaaatggacgggcgatttatgtgaaagttgaaatgagaaatactcaagagtctcgcattttccataaaaatatgcttcaccggtgccatcggcgatggttcgacggctcggggaacaaatggcaaattttgaaggacggagtttcgtttgaggaacattttgagagattatgtatgatgttatagaggtctaatgaggttatttggaaaaaagtcaaaggtgggtagagggaaagcagcacagcgaatgaggcgaatttggccaacggaattgggcgaattggagggattggttggccaattcgggaatgagtgccgaggcattttgtctttggtgccaaagacagctgccaaattcccccagggccattcagtcaaattggcatttttcgggaattggatgggctcacttttggcgtcaatttcgccaattctctttaacattctcgcgctctctttttttagcccactatctctttctgtacatgatgagggcttaggaaccccaacagaacgaacccctgagggagcattaagtaaatgcaaatcgagagataagagaactctatgtgattacaagacttggtgtaagcagtgataacaataggcttctaaacggatgatcggaaatggcgagactcgcgagcaattgactttggctgtcccttctctcgttttctctcccttctgtctctctctctctttttctctctccctctctctctctacactttctcctgctcacccccatgttctcactcacctcctcatgctcatcctcctcctcttcttccgcttcttcttcttcctc

SEQ ID NO: 17567 - DNA, 1340 bp, Heterodera glycines
agagtggagtttggatccgctggatgggccttgcacttcgtcgtctgccgtcgcacaatcagcggacgaagggagccgacgcaaagtgtcggcacatcaaaggcagcgtaaagtgtcacggatcaaagggaccggcgcaattagagacaaagtgatgcatgacgaaggaattggcgaactgaacgaagggatggagccggatgaaatggaggaactgagggacaggtgggggagaagcggaagacaatgaggggaggaattaagtgccaaaaggggaaacgaaggaaatgtcagcaaaagtgccaaaaacggcaaaaagggggaaatgccaaaaatggggtaaaatttaaaaacgcaaatgaagaaagaaaactgtgcaaggagagggggaagattatgccagcaaagttagaaatgatttttaagactcggcgagttggtggacccgcgcgagtcgctgctgcaacagcgacgacgacgagtcggtttggggaagggttggactgtttgacaaaccaattaatcaaatttacaaaaaacaatgccagtttttcgcttctcctgatcggaagagattagtgcttttcgtaggccgaatcgagtcggacactagaaaaactgataggaatagacccattgattgttgctcgggtcccggacccctcgagtccattcgatcgtttcccgtcattttcggcatttctgttatgttcaacggtgaacacaacgaagaataaaaatagtttatttgtcggaggcaaaagaataaataataaaattgatgtgtcggtggatgaagaataaaataaataataaaatgatgtgatgaatgaagactgaatgtggaacaagccaaagtgagtgacaaaatgatggctatttatggacgatgctgagagatgggtattgacacgaattgggttcagtaaatggcggacatttgaatattgagtgatatacacaacaatttccaccccaaatgccgtcaccccttttagccggcagtgttcggcaccgcttccgtgccttcccattcttcgtcctctgtctgttggacgggtcattcctcttcttccttagtctgttcttcgctcggcttggacggcattgaagcagcagttggggatgaccgcagcacagatgaggacgagacggaggaggacaacgcccgaggggaatgcgctccaaaaaaggctcgtcttcttaaataaaactcagttgtagctaacgcattctcagtctcggactcgattatcggtgaaattccgcaaattgtttgttttttgctagagcagcgggaccgagacttccgcgggattcttacgggattccgtccctct

SEQ ID NO: 17568 - DNA, 3441 bp, Heterodera glycines
  unsure (1)..(3441): unsure at all n locations
gtctaaagtgaaggcccactcctgttagccgttatattttttataaaaaatctaaaagttccagaggaaaatagcacctatgaccgttattctggtacatggttatacacgggagttgggggaattgtagctttacccggtgtctcgagtagagatgctgctcgacagtaaccccgaggaaacctcggtaggcaaaaagtctattagaaccgttaaatgcgatgtcatccggtgagataaactgattctgcctaaggtgtctcgttattagggcgtgtcttctcaaaaatttcaaattctctttcttccacagtcttagaatttcagatagctcgtgaggttcgcaatcgttaaaatcgcacagaatttcaacgagagaattcattttgagcaccagtaggcattttcatattcgttgcaaatccttatataccattacttcaccactgtaggatgagtttttgccttttctctttaatttcaaaattctgagaactgaaatacaaatgatgaccactaccaaatcgacaattgacaaaaaatacaaccaaggatttgaacttgaaactttaattttctcaaactctttgaacatgacaaagttaaagaattcactatttgcatctgacacatatttgggaagtatctcgtttgagtcaaatcgatctttgtatattttcttttccttaatcagataaatttgtccctcaattattaggaaatcggtaaatgaagacggcattgatccgatcggtttagtaataatttcggtgccattatgatgtgtccataaattctcgattgatctaatgtcaatctcgtctattcgatcgtctctgattacaaaaagtcgaccatcaatatgatcaaatctaaggtacccaccgggaaaattcctaacaaccttttcttgactccctcttgttattgaagtttcatttgtattttcgttttggaaaattaaataactatgatcgttgtaataaaagcacgctcggggctttaattgtcgaaaatcctggtaaagcttaacattagtgggtccgctcttttctattgaattaatttcttggattgatacactccaccctgaaatcagattcctatttatcgtacataatctaaagcgatcgaatccgaactgtctttcattgaccgaactctttgtcatagcgagatacttgtcatcaaaaagttgtgtatcagaaagaatagtaaccctttctccactgagttgaccgactatcgttaggagaacaattaaattaaacattactgacaaattgcttaactaataaatcggccctcgggcgaaccttatatagaccgtcaatgacctcacaataagggattccggagcagcgaagtgccaagaaataaatacaaaattgaccacaggcatctgagaattgatgttggacgatgcggtcgttaatgagaattcgtttgaataggttaagatatgaacttaaatcttcgttgggataatcgcccaatgaatcaaaatattctatttctgtcggcgaatttacaaaacaggcgacccagtgttcacctatcgtgcccacccggtcggtattcgccacaaaacagtacggaaaatgcctgtccttcaattttggcatcttgtcggaagaaaaaacgccgataaaatattttcgggttgtcggatgtttggatagaaatatttcaatctcatgagaattcatcatatgcttccgtcgctactgagcacacgattagcattaatagacaaaatcgaatcaaattcccccagaacgatcatctcataacctccgtcctttataggctcattaaattgcaccttgatgctggtcgttccgtttcgaatcaattcaaaaccgggggtgtcctctagagtagaggtcatcgggatgacgaagaaacaccacccgtttacaaatttttgtatattgatcgacattgtcctttctccgtcgtccatcccgagccccgtatacatgtcaacaaatgctcgaatgtatttgtttctatcaaaattaagagaatagggtgacccggggaaaatgtttccattcgcttcgacactgatagagcgtattttggcatgttcaaagacgaagggtgactctttcggatttccggtgtacgcaccggttgaaacaaacccgacaattaaacgtctcggaacaatgctggtaaaaacattgtgtgagagatcagaagtgccccgtgggatgaaaagactcctgatctcaatttttctaaccgggtatttggccggggtggtttgtagttgattgcttattacgttatttaatgactgggtaatgtcgactgtttttacataaattctaatatcatgtatgttaatacgatatgtgtgcgggttcgctatgactgcatttcctgaaacatatggcggtgccataattagaaaatcatcggtattacgatgtatgctaaaaatgacatccgagttattaagcaatagattgggctgacgagcgagatcaaaattaagtttcaccatggtttcacatttggcaccatcagcaaaacgtgacgctctgtttttaaagccgctgtttgtgtaatcatcctggtcgacatcgtcgacataatagcaagatgcttcacagagaccctttttgacatcttctgaaaatcgcaattcattcatcatatatgccctaaacgcatagtaaatgccggaatcataagattcgacaccggaaattgacacctttaaggttttgacaaagctgtgcccaaaattttgaatgacaccgacgtgttggtcagcttcactgtccttggtaatcggaatccaattgcttttgtcttttctctctattgaagttgacaaataaagaaaagttttattgagatcacaaaactgattatctgaaaaaagtctaaagatatatggtccagattgatttattgctgaaagagggagtaattccctaatactggatttattaattgcaacgttcgtcggggggatatcgaacagcgaaaggcccccctcgagaccgtcctcactcgccttgtcaattttcttaagagttgacattttttaattctttgtattatttattctatttatacctttagatgaaacttaactgatcatatacccgttttcgattcttattagtgatcaggtccctttttcctttcccacattgttgtaacttatcggtaaggttagtcagcccctgtcttgagtgttccctgacggcatcccttaaatcacggccctgagcgatgtcactcagaactctctgcccagcggctagcccctcatgtcctgcactcgaggcaatattcctcgcaataggggtcaagaaacgtgccacattaccgaggaaaacgaatccccgttgatacttgcttccgacaaagtattgcttctgtcccctcccatngtgtgaagtgaaaaaagatgaccaa

SEQ ID NO: 17569 - DNA, 964 bp, Heterodera glycines
atatgcaaacacattttatgtgcttgtggcggtaaatacacaacatttgacgaggaatttgttgaggtggtggggtggttggtcatcggtcatcgcagcgcttccaaaacaagaaaatgatgagaaatgagtgggcggggggggggggaaatgggagccaacccccggggggaaattccaacgaattgacgacgaccgatcgggtcggcaccagccgagcagcagatctgccagccaatctctgtgactgccggcgctgactgacgcacattttgcaacagttgcaactcccccctccccctccccgcgccatcggcgcacgcttaaaatccgccgcctattcaaacgccggaggcactgaatgaattcgtgccctcggcgggcaatgaatgagtggcatgggatggaaatttcggctgttttcacttcctttgggagagattggaatgtgttgggtggtgaaactgcacggaaatggaagttttgcccgtgggaagacaataaaataaactatttttgggcatttctcagaagaaaaattcactttcatttcattggttggcggtcacagcaaactaaatgcgttgggataatttaatgtcattaaaatggcctttttgtgggccaatgattagcaacatgagaaaattgatgcaattattttttaattactatttttgatttttttgttcaatttattaaaccacaatccaagactttttgttaatattgaaaatcattaaaagcagaaagtttataaaacctatattttttgaagcacaaatttgttgaaaaaagcaaaaataagtaaattcgattaagaaaaataaacaaggaagtgaaattactctcgaatttagtggtttttcaaaaaaaaaaaagaaaatcccgaaacgcccattcattcccgcccccccccccctcagtcattcatttttcattttcgaagacgggggaaaatggg

SEQ ID NO: 17570 - DNA, 2130 bp, Heterodera glycines
  unsure (1)..(2130): unsure at all n locations
taggcctagttcgtaggcaggacttttcaagtctccgaaaggtttcttcaatctgcattcgcttcgaatagatattaacaaggttgtttgggtgttcgaatttcaacaggtaagttagttgctagactgcatggctcctttgccgacgctgagtagattttaggtgacgagtggtgacaatgagtccgtgtcgagcgctgatattttcggcctatagagcgagatctatacaatagaatttggcatgagattggattgcttatagtcagcctcttatagcataaagtctgagagagactagatgacatatcatgtaagttgctgataggtttccagttttccgctcgtaggtctgcatatcgtacttctcatcttactcgacctaatcagttcctactcagattctcaacggatatataccatggcactctaaagtccacatcacagtcaatgagcggtgtggtgctactcggtagaatgctaacaaggtcgattagacaatgatcataatctctgtcgaaatcaggtcactgtcgaaatcagccactgtcgaaaattcctggcacgttcggttttacacattttaaacttgaagtgccaattttgaccaattgtaacatgggggtcaaaaaatgtgcttttccccactttggcacctatatttaacaacaatgtctttgttaaaaaagacaaatattttttctgaaacaaaatgcattcgatagaagaaagaaagggctaaaaattgatataaataaaatacccaataattgtcgtattttagagaaataatcccggagtactcatttttatcaatttggaggtccatattcaaaaatcaatagctgcacgaaatcccgatttccaacatcagattcccgtaatttttgtgccatggaatttcggttttcctttccgaaaatttttggggtctcgaaatgctatccaattgaacacgagagcaagagttatctatggttcttcccctactatctgggaaaaaagtcggggaactggtatcaaattccccgagaattatctataaggctaaaaaaaaattttaaatgttgggggggggggtcaaaaacttggtcgtcaaatagaaaaaaatatttttctaaaaataaaaaaagcactctcacccgacagagtgaaacagacgacgttcgaattccccgaacagtgttggggatcaactcttctttaatcacttaaggaacagcatctcactttggccagtgaaattaattctttgaagtgtaaaaataaaatatgatacctttaaaagccaaaaataaatttttatttagttttgcagtctccattccatgttttgagattttttaaagaatatttttgttttttcccgaaattgtccgcaaatgtctggtagccgttcaaagtcaacgattttttctttcagcatttatatgtacaaatgattatttccgattaaaaaaatgctaccacatttgataatttttaattgattagggaataattttaaatgagtgcttttgaaaatgccattcccgaacaaatgcatacactcaaaagtgcacagagagagaaaacagcacaaaggtggacaacaacaaaaaacatcagaacatttaatggcgacggacggagtttccgcttgcgcgcaacgataaaaagcagcgatatgaacgaactaagaagaagaagaagtgaaaggaaatggagaagaaaaggagcaaagaatggaagaaaatgaataaataaatgaatgaataaaagggattaatgaggaagaaaaagtaaaatttgaaacgggaaacaaaacgatggagggggaaaaggagggcataaactgtgccaaaatgattttaaagagattgtaaagaaaccaagcattccgaactaatccaaactctcgacttttgccaattagtttagtcagtgcttggatgggattctgcagatagaattcgggaaaatgccggatttaagactctttcttacggcaaaacggggaatatattatgcaatagtccatctataggctcagattcggacccatcagtcagttccaatcagaaattgctacgttgaagcaacagcaagcagcagcccacttattgcatatgagctgagtgngagtgcttt

SEQ ID NO: 17571 - DNA, 1760 bp, Heterodera glycines
  unsure (1)..(1760): unsure at all n locations
tttgccttattattttatctaaataatgtgtttatctttatttttctgtttaacaagtctctttcgatgcggtgtactaattatacattctcttttattgatgaatttgttgatttttttattctaattgttgtgtattactgataaatgcttaatttttaatacaaaatatgcatcagttgagtcttcaggataattttttgtaccattgcattttttgattaaattttataaatttgttaattaataaatttgtataatgtattattttattctaataattcagaccactttatatttttaactaccttttgacttaaatattaattataaattattttattatttttaaattatttttcttaagtgattttttgaatataagtttttccccattcccaaaaagttaaagtgaagaatttctttaaaattcaaatgttttaaatatttcaaaaatatcttgaatttttcaagaattttttctaagtggttgggaggaggacacttttaagaaatgcgcaatccctttttgtcatttttaagaaatgtaatcgcattctttttttgtcacatttttgcaagaattttttttgaggtttaaacaaaatcagcccttacgaagaaagcaattaaaaaaacaagtataaatattaacaataataaccaaaataattcgatttaagttaaaacatgactttaatagaaagaacgcagaaatgtgtctatgacgagattatttatttctatatttttaaaatatctaagtgactatcgtcgtggattttgtatatgaattaatttatatatttcgaattgaattaacagtttattaagatatttaaaaagaaattaaaaaataaaaaggaaattttgattttgattttgtaaatgatataaattaatttaagaactttataaaataaataaatataaacaaaaatgttaaaataaataaagatacacaaaaatgttttttgatttatatagcaaaatagaaaataaccaaaataattcgatttaaaaaatgccttcaacagaaagaatggagaaacgggtctttgacgttaaacgaaatattaaaacaatcaatgaaatagcacaataataatacatatttcaaattgaattagcaatattaataagtgataaatatgacaaacttaaaaagaatttaaaaagcaaaaaagtatattaagattttgtaaataaaataaatgattttaagaattttatgaaataaataaatatacacacaaatgttatctgatttatttagtaaaatagaattattctattctaattcattttatatttataaatatgcataaattattataaataaaaatgaccttaaaaaattaattctttagaccaataaatcatgataatgggtttgaagtgaagtgttgcatttcggtagcacggctgctatatttttaccgtataaccaatctgtttctgtttcttttaataatataattttcttttaattatgaaatttgtttaaatgattttcttattcgaatagttgtgtattactgataaaagccttaattttcaatgcaaattttgcttcaactgaatcttcaggataatctttaagaaaatttatccaatagacatttctattttttactaatttttgaattaaataataattaccaatcattttataactgttattttcttttatttgggtaactaaaattgtatttatttanatttttaaattattttttctcttgcaatttcattaatta

SEQ ID NO: 17572 - DNA, 1673 bp, Heterodera glycines
  unsure (1)..(1673): unsure at all n locations
attttgtaanagcgaataatatgttcttttaaatacaaaataaattgttttttctttcttgatttttaactttggttataaacatgatagtgtttaaatctacttaaaataatgttaaaaatcaaaacatcgtttattaaaatcttttttcctgattgtacttatatttaaattgctttggttttggcttcggcattaagcctactaacgatacccgcgtcgggaacgcaccaaagcatcgggtaccaaaaaggggcttgagaggttctatgatagttaaagggatcacttatatcccgccttatcatacgctgcacccctctcattaatgcagcgattaacttaccgtaaagcccctttaaaaacatgttatattgtctttttcgttattgttgactcaaacaaatatatacatactttcattatatatattcttacttttattaaatatattcttatttttatgaaatatattcttacttttatcaaatatatttttacttttattaaatatattctacaaagctgaccaaaaacttaaccaataatggattataccgtattaagttatgtacattctacttttattgattcggtacctttcagatttatttaatcagataaaatttctttataacaaatatttttcactttattctctttattttttggatgcaatctaactttaagcccttcccatgattttgttcttgaaaaagcaacatataattgaccatgttgaaaaacattattttgtaaatctataccaatcttattaaatgtttgtccttgtgatttattcatagttaaagaaaacgctaattttattggaaattgatggcgagacagtgaaaagggaaaagtttcatcatcagttaaagtaattcttggtaaaagtattttagtgccagctttatctcccgttaggatttcacaatgaagaactttatctaacatttttaaaattctgagcctagtaccattacaaaggccttctttaatatttaaatttctgactaacattacaatggcattattctttaatctcaattcatgccttggtagactggttgtatataatgtattaaggtattctggcacacaatcaaaagagctatcatttcctgcagtgtcaatacttttgtatattttttcctcagaattaattaagtctaatactttttcgttgatctcatctacatcaacattcaatggagccaaaattactctatcagacatttccttaaaattatttccggtggaaaagtcgccaaaaatttcattaactaaatcagtatagcaaattacctggtcaggtaactcaagcatatcgttttcgctatttaattttccatcacccattttaagcaaaaagctagaaaaatctttttcattttcaagagctcgtaaattctttgttagactaaacttttgaaaatttttccaaaagcatgattttttaattgaaagatcaattagctgagactttgttgcaaatttttgaattggtaatgtttgacgaaaatcaccaccaagtatcacaattttgttaccaaataattcatttgtaccagttatttcttttaatttttcattgattaactcaagcatttttttatgcatcattggggattcatgaattataaagatttcagaatcattaagtctttcca

SEQ ID NO: 17573 - DNA, 916 bp, Heterodera glycines
  unsure (1)..(916): unsure at all n locations
cccctaattaatgaaacaatcgcacaattcccatggcatcttctcntgggagaaacggcggtcattcaatgctttttcatattttttggtgatgaacagatagaggacagagagagtaaattgccaaaaatgacccgggcttttaattaattataattgtcaattgatcgggcaaagcaaagtcctacaaattgccccggggcctttcaattaatttgccaatttgctaattgttcattctttttttgtccgctcacttttcaattatttcgctcactttctgctgcttgtcttcgctgccgtttcctcttctgatattccgtctcaatttcttcccaaagtgacggccgatgagagctttgaattgaagcagaatgaaaacactctaaaaatggcaaaacaaagcaaattcataaggaacaaattgaggatttattaattggggggagggaatttggggggaaaaagagcgggagacggacagtgacgcaaaaggcggagtttttgattcgaaaaagaagggggagggaatgattggaacgatcggaaccgatcaaatcacaacaatcgaccgattcccgacaatctttgcccctatgactgatgtggtgtctctttgaaatttgataacttttctatttttgtttcaatgaaatgggcaaaaggctaaaactttcggcattttgtgccgcttttgtgaggtgtgggaatgaacattatttcacccataatcgtcaccacccaaacgcacagaanatcaatttatttatatatttttgcttttttgtagggacgtaaaagagaggcaaatgatggagatgaattggccaaaaaacgcaaaatgaaagggtggcggggaaggggcgaatgacgggacacggggaaaaaggggggaaatgggaggtggggaaagcgg

SEQ ID NO: 17574 - DNA, 1118 bp, Heterodera glycines
tgaccgacccctgttcatgctcatctgctgctggtgctgctcttgctccgtcccctctctcttccgctcttcctccccctcacttcctccgctactcgtcgaccaatcgtctccgaattcgtcctcctcctcttcttcttccgcttcttcttcctccccactcacataaaacgtcgatttgccattggctccgatcggtgccgtcccttcgcttttattgccatttcttcgcctcatcgacgcaaaattcctttcagcgaagaaaaaacatagtaaacgaaaaaagaaagaaagaatgaattggtttggattttttgtttcgttttgccaatggtccgtcactttcgcttggccattttcactgctaatttaaaaaccggttttggttaaaagccgagctaatgaaataattttgggatgcttttaaccgcggtaatcaccggtaatgaccaaaaaatctttttcaaattagcattagggtgaaacgattttaaaatgcttttagcgaatattttggccccaaaaaaacggacttggcattgtcctgctgggcgaacaattttttgccaattgcgcaaaaatgggcggaagggcaacaatgtctggtgttgagaagggccatccgaaagcgaattttatccatctgaaaataaaattggggaaatttgacatttggggaaggaaaacgaataaacaaaaaaaacggaagaagagaatggatgaaagagagcaaagtgaaaagagagcggaaggacaaaaaaggccaacaattaattaattaatcatcaattagtctgacatgattaatagcaccgacccctctgttcaaattcaaccgcaattcgttgctgaatcggcccagtttttgttcaattatttcactcttgacaatgcgcgaacgatggcgtgccattggcggagagggcactgaaatggcaggcgacgaaatggtggcagctgagggcagaaacatcgaacgggacagaagaggggacgaattgagacagatggagcagcagcaaacggatggagaggaggaagagaagaaagtggactaaagagggagggcgaaaggcgagggaggggacgaattgggggaaagggagagggggagagta

SEQ ID NO: 17575 - DNA, 1477 bp, Heterodera glycines
ttactgcaccattctatttcgcttttgtctcttccagtcttttattacaccattctatttcgtattgtgccattctatttgttggcatctcttccgttttctcattgtttcattctatttcgcttgtatctcttctagtctctcattaccaattctattcgttggcatctcttccggtctcttactgcaccattctattttctattgtgccattctatttcacttttgtctcttccagtctctcattacaccattctatttcgtattatgccattctatttcgttgggtatcgacgtaattcgcgcatgtgtttgtataatattatgaaaactcattttacatgtttttatgcacgaatgtttgtttatacattatataaaatggaaataaaaaattttgctttaattttaaattttgctcacatttatttttttaataattaaataaaatttctttaatttttataataatttttgagtttgaattttttgtttaattaggaaaatatgttctttttgaattcaattcccagcgagaatgggctcattttgctactgtttgccatcagattcatttcaacactttgtgtagtagattcaccaaaggctggtaaagatttaaataaaataatattttaaaaaaaattaattttaaatgttttcgacaaatttatttaaatcaaaggattagctatctgaaacagaagtaaatttagtcaattctcatgtgtattattttgaaaatttgtagaaaattataaaaaaaattacaaattattttaaatacttattttttcctgctttatttcgattataaatatacgaaaaacatatttttaccaaggaaaatcttcgctttaattttcatatgcccctagaaatccttattttagattttttatacctaaaataaggcccctattttcgcgtttttttctcctatttttgcccatgttttagtttttttaatccttaattctaaattaaattaatcatttttatagatgagaatgtggaggataaaaacaactcacaaccaattgtgccaacaatgaatgaccaattgaatgaatatatgcaaaaaaatgaggatggtcaatcaaataaaaatgagggtaattaacaaataaattaattaatattttaacaaaaataaataaataattttatttaatttagatagcagcattcgtgccgaacatgcatcagtccaatccagctcatttggtggtaaataataatcaaatgaaattactaaattaaaaaaaaaatttatttaatttctgtttgaaaaagtcagtttttaatggattaattaagtttcattaaattttattggtttccgtcatccacatcttttttaaaaattatttttagcctaacacggttataaaaaatgtttcaatttcaaaatttacatcttgggtaaataaaaattttaaattaaacgatttttagggagcaaaataaaaagcca

SEQ ID NO: 17576 - DNA, 1613 bp, Heterodera glycines
  unsure (1)..(1613): unsure at all n locations
attgtcaatggacgacgattgaccatgttgccatcagattgnagcagtcgatcaaattgcattgcgttcactccactgatcaggaagattgaatgcagcgtatgagtttttgatcaaagattgggaaactttcnccgaaacaaaaaatggtaaaaaaaataattaaaaaattatatttatcattgtatagaatcgaatataagcaaaattgatgaagaatatgtagcagaaagtagtgaccaacaaaatgttggaaaaagtaaatttatgatcaaaggaaattgtaattgttttaaattaaattaatttaataaatttggctaaaaacttaaaattattattttatttccgtctcaaataaatatgaaaaaaagaattatgaaatagaaaattaaatattttttaattgaattaaagattttagaaatataattttaaaaaaagttgatttttcatataatttttaaatattttttctatacatttttaattgaaagctaaaaatgaagatctgacctcgtcaaatattggagatgctaacattgagaatgagattcatgaagaaggtaaaatggttaaatttaaatgaatttaaatttgatttctctgcctattatagctacaaaattggacggaattgaagaaattggtaataaaagtgccaaaaataacggcagattggagatgtatgaacagaatgccaaactcatagaacaattgaaccgcgaccaaagtgaacaaaatgccaattaaaaaaatttattttaaatttaaaattttaaggcacaaatgaagcagacaaaaatggcaaggaaaagagaataaaacatggcaaaagtgcaagtttaatcaacttaatggccgacaaatttaaacttttccgcgctaattcaaattcaaaaatgccacgttcgaaaagcgtaaatgagaacaatgaaaaagaggtaaattaattattagtaaaattaaaataagagattttaaaaatgaaaaattaaaataaaaaattttgaaatttttaagctgaaaattcgccgtcactttccagaaacatttcatttaaattaatatcattaaaaaagattaaaatgtctctttaagaaaattcttttttccattttttaaatgataaaaaattttcttaaaaaatatttgattatatatatatttttttcaattttatgtttttagtcccatcaaaattcacctaaaaatataatggaaagacaattggacaacgcggaatcaagtgttgccaaatctgctgaccatatgccaccatcatcaccatcaccaataggttgggcaaaaggaagaaccgtcagaaacaaaatgccaaattaatgaaaaaaaatgttaaataattttaaaaaacgccaaataaaaattaaagaatcggagttagtgaactaaataaaattttaagtgttttcataatttaagaaaaatttgaaaaaaaattttcatttcctaaacttccgacattttctgtcctggtcttttgtttggtttttttttaaattaaagacaaatatgcgtttattgaattagctatttcctaaataaaaggcccctccgctcacccctgaaataaagcccccccccccctcccc

SEQ ID NO: 17577 - DNA, 796 bp, Heterodera glycines
ttttcttgagatttttctataaaaatttttctagtaaatttcttgaaaattgcatttttatccctaccccctccccccttcactcaccggcttcgttttcatcggttgaccgcccacggtgccctcggtgagaatgtgcgcaagttcggccagctcgccacggtcggtgaccaggtccacctggggaattcattgttgttgttttttttgtaaaaattactattaaatttaaagcaattttacaattaaaaaatgaatctttttttttgaaaacgccaaatttcagcgatgcaagacgaaatgaaaaatggtgacaaatttttaggaatttggactaaaaattgcaccctattttcgtctccaaatgaattttttgtttaagaatttgtgccagtttcatgtccaccagtcagggacggtccggggggggggggggggggcggggttatttttcaattaaatttagttgtacgatctttacacatatgctggactggtgccaacccaaattgtcaccactggcattcttgctatggtctgtttttgcggcatcgttctcaacatgttgctcgtctatgtcaccgtcaaatcaaagtgaaatgccctcgggattttcggcgccataatttattaaaaaacaccatacttaatctgagataattaaaaatgatatgtttaatcgaatttttggggatttgatagtttttggcacaaattttcggtctatgtcagttgggccccagcacgtttgggccccagcaggtttttggactataactgttttctttgacatcca

SEQ ID NO: 17578 - DNA, 1663 bp, Heterodera glycines
  unsure (1)..(1663): unsure at all n locations
atatttgatgaatttaaatttttgaattttaaaaaaatgttcgaatccgggttcggtattcgaaattggtcgaaaatgtggtcagattcgtactcagcggctcaaattagccttagaaatgtgtttccagaattttatttaaaaaaaaaatcgggaccaatgaacaaccgaaagattgccaaaaaaaacctgatggaacaaaaatttttgacttcgaaaccaattgcttttttttgataaaaaattgacttaaaattcgccaaaattagtctaaaaagcactttttgtggtcggcggaaaacggacagaaaagcaaccaataaaaattttgtggttcagacttcaattatttcttttgggcacaaatgtctttagagttttggacagcaactcaattttttttattggcggaaatggtaaaatttgacggaaaatgccggaccaagcccctaggaaaaattgaggaaaattccggtcaaattccctgacattcggtcaattttcatggggggggggagactcagtcgtcccggtgctcacccggactgtccaccaccaccagttggaacaagtcttcagtgagtgcagtcactgtgttctgtgtgtgagagttgtgaaaatataaaaaaaaatttgtcacaaaattttaaaacagacatttaaattaatttttttattttttggattagaatcattcaaaatgccataaattgtgtggcgaaacggtacccgtctggtggtgtcaatcagtttgctcactgcgcacacatttgcccgtatcagagcattctgcaaaaaaaaagaatgatttttcaccaaatgaaatttatttagttcttttcaaagggtgcaccccaaaatctcaccgtacaatttttaaaaaaattctcaaacagaaatttttcaagaaaaaaacatttgaaaattttcaacgatttttcttttgaaattttatgataaattactgttttttggaaaattttccaaaaaaaaagattttgaaaaaaatatttttaaatttctgcggcgaggctttgggcttcgagattttgtcccgtccctttttcaaagaccgcaaaaaaaatgtttttttatataattttttcgggggagagagacagtctgctccagctgatggggccaaaaagcccgatcgtttgttattggtcccaaaattaaggggtcttttcgcggccacgatcaatacaacacttgaatctcgagcactattttttgaatggacatcatcccgactcccattgacaacacaatcaattccagcaggtgccaatcccggacaaatagtgcaggtcgagaaaattttgtttactagagagagatggacagactgaccgtcagtgccgacttcccgacattcggcgcgccgatcatcgccacccgaagggcacagtgtgacatattatcactttttgtatgcagcaacagcaaattgaaattgtgcgtttaaaaaagcaattanaataaattattttcgcaaatanacaaaaagcaaaataataattaaattaaattattcgttttatttatttttcgcaatttatgcgcgagaggttttttcgtctcaaaatccgtttaaaaggtaatgttttgtgaattgaagcaatcatttgagagaaacagaattgagagaaagaaaaggaga

SEQ ID NO: 17579 - DNA, 2486 bp, Heterodera glycines
ataaatttgtctccttagatttaatagaagaattagaatatcaatgagaaaaggctttaatactgtcaaccttttttttgcctgtagtatttattctcggatgatatgaatcatagaaatgtgaattgtagttttaaagtttggttgcttttgagcaaattcataatagacgcaatgaaaatttttattttcgaaaattttcaaaaattcggttttatttaattttggacaggcgaatattaaaaatacttttatatttttctccatttgttttaagttgccttcaagagtttgtgcaccaacacctactgaatttaaaattaaagacgcaacgaaaatatgcttcttaatttagctaaactcccacgattactcaaaacaatttattcatttttggatatacaattcacatttgcatgtttcctattatcagaggaaaattattattctaaaacgcaaggggaaatttggcaccggaaagtttgggcaatataaaattgggcaccaaaaaatttggccatcaaattaaggaaataaaaatattttaatatgtaaataatatagccgtctaatttaaaagcatagttgtaaattataatcaaattcgagctgtaaagtctttaacaaattgcccagtcaattaaccatgtttatatggttgggattcattacaattctttgtatattaattcatatatatgtattatttgtagaaggctcaatctgttgaagactaccggccttgatattttcggtcccatataatctaagtagtctaaacccaaatataaactggtatgcatcgaaccctaagtatttaatgatcaaatcatagcgtaatttatttttttattttttaaatttttcaattttcaaattaataacattggtgcccaattttcctggtgctcaaatttctggtgccaaaatttcaatttcaggtttggattttttttgggcacataaaatccgaaaaaagtagtttatgtattaaatccaacaggtgacacgcaaacctttttcgaatggtaatttttcttttcaatataaattaaggaaactcttttcatgcttttcttaaaatagaattcttccgtgcatttaatgccattttaaaaaatgccattcggatcttttggctcaattcaaccgtgccacatttttacttttttagaatttctgttaatacaaaaaaagatataattaattcactgaaatgtgcatcttaatttcacacacgcacaaaattttttgccgtgcccattgagataaaaaaaatttcacattaaatggcaattagtcaaaggcatacaattaatggagaacacaatttgggtacaacggcacatcagaggcggaaactctctctttaaaggcgagttgagaagttataatttgcttcttatgccggccctccatttaaaactccgcacaaaatgccattataattaaaagttttagaatattccaatttttattacattttttctattattgcatacagtaaccgtaaaaaatgctttttagagaaagaaaataatgatggcttcttcctcagccattccgtcgcccatcgacaattcctttccgaatttttccacaaatgtctcagctgcttaccaatattatgtccaattttgtgacgacccaacgcggcgtgacctgacgctgacctcgtccgccatcactttgttcatcatttacgcgcttggcattgtgtcccaattggttgtgctgcccgccaattggcgcctctccaaacatcgctccgcctttctgctgctcctttacattgtgcgcatattttgagtttcaaaaattgaatttacaacagtgacgggaccagtacctgtttttagtaaaaaataaactacccggctcgaatcttgcagtaccggcggtaccgcaactaaccgtcctgttgatatcgataccggtcgtaaacttgcatacggtatcggcataggtgatcgcagtaccggcatctgctttagtgaagaataccggtgccgctctattcaatttacaaaattagttgaaatcttttcaatattctatattaaaatttgttaattattatagaatttaatatacatggcatataaaatacaaaatcatttccatatgtcggttttatttcaagattaaaaataaaatattttggctttagaatctcttcgaccttatttggctgctcgaatatgtttggctttccttggagtttctcgttggcactcgcgtacatgcaaaatacccatttggtgcctatctgttccgtttcgtcaatttttgcattgacactttttacatcgaattggcattcaatcggtgcaccgctttccttttcccacgtctttacagcaaaatttgcacagaaaagtttgtccatttaactaatgagaaaaattgtatttggtgttgccaagtggacattttttgccttcgagggaaacctttggagtttttagagaaatttgaatttaatt

SEQ ID NO: 17580 - DNA, 2960 bp, Heterodera glycines
ggacataaatggcaaaaatcgcaaaatatggacataaaatggcaaaaatcgcgaaatatggacataaatggcaaaaatcgcgaaatatggacataaatggcaaaaatgtcaaaatatggacataaatttttcaaaattgagtgcaaaatttcttcaaatttattggttgaaattgcatatgagatacatttccaaattttttgactcggtaaggcgctttgacaaagacggctttcgttttgcaattagtcggtcaacattcggaaattggtctcgaattttttcggcaattacgtgcaatcattttaaaagaaaaaaaacataaaagctaaaatttattaatttttttagcgcaaaatcaacaacaaaagcgaaattttcgcttttttgcttatttttgacataatttattaatttttaagaaaatttaaatttattcaatattctcgagaaattttggcgaaaaaatgattttttgaaaaatttttcgggttttgggctcaaaaaggctaatttagctgctgggggccgttctaatagaggtttttttgaaaaatgccaaaatatggacataaaatatggaccaaaatgccaaaatatggaaatatggacataaatcgcgaaatatggaaaaatatggatatagaaatccttcttttctgtcttcatctctgcaggcttttctcccaccaatatatcgatttttttatggtgacaattttagttgtgagcagatagaaagaaaatggagaaatagtgtgggttagagaaatcaaaaatatttggaaaaaacggatgaatcaatttttgttctactgttacgtcgggattaatacaaaatgtttgcaattgatggaaattttgaatttagcgaagaaaatgctaaaacaataaaaataaacaattacgattggtgaaaaaatcctgcagaaacactcgaaattgttgagatgactcggaaattgaaactcaggcaaagaagttgaatttaaaattctttcaatttcattttattaaacgcactgaaaatctgctgtcgccaatttcgcatgttaaacttatgaatgacattcaattaagtctgtgcaaattcgttttcggctttttggcaatctttaggttttttttcatctaattcgctatatttggccattactttcgagttatatgtaatgcgggatatgcatccaatagtttcgtcatactgcagcagaaccaagacctgctgcagttcaagcagcacaaaatggtagaggaagcggtccaagagcaggaacgtcgccggagtatcgtcgtcatggggttggccgagtcggccgaaacaaagccgtcggatcgcgttgctgccgaccataccgctgtctcaagtgtactcgatgagcttggcatcaagtgccccatttcaaactatcgaatggggtccccccaatggaagaacatgaacattcgtccgtcgctgagcccagcggaattggacgtacgtcgacagctgcagaaagaatgtgcagagaagcgaaaagacggcggtgactgggtgatctacgctgggacggtcattgaacggtcggacattcccaatttccggaaaatcaattgacttctccccaaatcacttttgacaaatacatatttttcacaaaataagaatatattttccggtcttaagcatgttaagctcaataaaccaatgatgaaaataggggaagttaaagcctgcttagttaatataagatcaatccacaacaaaattgatgaattgctttaaatttggtaaataaaaacatagaaatttttctgttaactgaaacatggacaaaggaggaaaacccaatcctctttagtccatggataagcgaaaactataactttattttttgtcataggaaatcacaaaaattaacgcgtgggggcggtttcaaagcacaaatgccaatggaaattttgtaaacattttggagaatgtgccacgttttggcacgggcgatgtggtcggatgtggactgaattgggcaactcgtcaagtgtttttcacgattaatgggcaacgcttgagtttgtgtttattatgccaatttacataaactggctaattgcctaataaagacaacaccaatttgtacgttgacgatggcacggcggacctttacccgaccgtgtcaatgctcagccacagagcagcggtcgaggccaactttggtcccaacttccgatacgatttgtccaagaaattttgagactttggaaatgaattaattgcttatccaaatgttgaaaattaattaaaaattcattttttgattaatcacaaaaatgcgtcgtcattcatgcccactgaaaatggcaccaaatgtacggatttgcgtgactgagagtaattaatattacaattgaggcccgtatccttggtatcaaagcaaagatttaaatttaaatttatgataattaaattctgggctaaatacaactgatgaaaaaaaatattcttaaatatactcgaaaaatgctgaattttattatgttttctcagcgcatttttttcttatgtcaatatttgctctatttcttgtttacttataaattcccgagatttaattggttcggaattcactgaaatgaatgtgtttcttttatgataagctatcccgaaaattcccggctgaaaatttttttttaaattttcaggtgtcgaaatttatgtacacatcggattccgtcagttcggccccagaacgtttttacaagatagccgtttttttttgtcaaaatggcaacataattggcaaaataaatgaaaatgataaaaatgttaaagaaaatattcaaaaagcagtgaaaaataaaaaatcattcttatcaaacattaattaatttgattattaaattcggaataaattcaatttagtaaatgtccatcagtttcagtgcgtccccgagatatttagctattatatttctaaata

SEQ ID NO: 17581 - DNA, 1418 bp, Heterodera glycines
taaatcgcaaattgtttctttttgcactacaacccccgtatgatccaagggcaaaaaagaggacgataatctttggcgaaattcgcctctcagaatcaacacagcttttctgttactacttgcttcgtttaattatgcaggtttcgccattaggctattcgctcgcgatacaattagccctatagaaacttggagcaaaaactagtaatattttatcctttagaaagcatgcaaaatagtttgttatagacttgtgcaacaactatgaaataattcgctgaaattaatgtcctttcgacaatataaaattaatttcgtttattttagaaccttaggttctgatgaattaggtaaaattaagttctaatttattattaaaattatgaataagcgtcaaaaagcaattaacaggtggtaaatcgcaattgtttctttctgcactacaaccccgaatggtccaagggcaaaaaagaggacgataatccttggcgagattcgcctctcagaatcaacgaagcttttctgttactacttgcttcgtttaattatgcaggtttcgccattaggctattcgctcgcgatacaattagccctatagaatcttggagcaaaaactagtaatattttatcctttagaaagcatgcaaaatagtttgttatagacttgtgcaacaactatgaaataattcgctgaaattagtgtcctttcgacaatatgaaattaatttcgtttattttagaaccttaggttctgatgaattaggtaaaattaagttctaatttattattaaaattattaataagggtcaaaaagcaattaacaggtggtaaatcgcaattgtttctttctgcactacaaccccgaatggtccaagggcaaaaaagaggacgataatccttggcgagattcgcctctcagaatcaacgaagcttttctgttactacttgcttcgtttaattatgcaggtttcgccattaggctattcgctcgcgatacaattagccctatataaacttggagcaaaaactagtaatattttatcctttagaaagcatgcaaaatagtttgttatagacttgtgcaacaactatgaaataattcgctgaaattaatgtcctttcgacaatataaaattaatttcgtttattttagaaccttaggttctgatgaattaggtaaaattaagttctaatttattattaaaattatgaataagggtcaaaaagcaattaacaagtggtaaatcgcaattgtttctttctgcactacaaccccgaatggtccaagggcaaaaaagaggacgataatccttggcgaaattcgcctctcagaatcaacgaagcttttctgttactacttgcttcgtttaattatgcaaggttcgccattaggctattcgctcgcgatacaattagcc

SEQ ID NO: 17582 - DNA, 819 bp, Heterodera glycines
tttttgctgatgcggccaaattttaatttattttttctaccttttaaacaaccgcctcttttactctttcataatttttcccatttttgaacattactttcacaaatacttacatatgtcttctggggcctatttcttgcaaaattgggttggggaggggggcaaaaaaaacaaaatctgttggggcttctaatttcgcttttccaatttgaaattggattcgaaactcttatctttaatattaattataccatgtaataaaaatactattaaaaatattatacaatatttcttatttgttttatgttctttattgtaaatgcatattcaaaattttattggcaataaaaatgttaatgttgtgttggaaattttcgttttttattgcttcaaacgcatattatatttgggccggcatattttgagtaaaattaaatgctatattcgttcgtttatatgtacaatttgtgatcgctgatcagtacattgaaaacgaggatatatttaaagaatttgtccaaaagtgtatggagcgtcagcagtccaacggcggcactgccgcaatggcaccgacggtggcgagcagtgcggagactgcaacggtggcggcggatcagcagcagcagcggtcggacgcctgtgtgtcgccccaccaattgacggagacggggtgagcgagacgtgccgtacgggcattttgggagggggtcgggcatttttgctgtcatcaatttattgatttgacaaaccgtttctcgggctgattgacggagttttgcgaaaagtctatggacccgccagaagaggccttactgtgct

SEQ ID NO: 17583 - DNA, 1267 bp, Heterodera glycines
tgccaaatgccttttccctggactcgccactgctggtgcaaaaagctggtgagttatgcacttcgtttttagaaaagtgttatttttcttgaaatcttatgagggtcgccttggttgtctagtgcaatctttttgtaatgccataatgcgtgaaatgattcggaatttggcaggctaacaagccagaaaaattttcgggtgggggaattcgaaattttctttttatattctctttaggtacgaaattttttgccattcttactttataaaatcttcggcgccggagcgagaaaataggatttgtagtggttttgccaaaaaaaggcaattttttgccattggctaacaagatgttgtcgggtgaagccaaaaatgctttttccgtcggctttttctcattctctctgcctaaaatgacctaccaaattgaccactcattcgaatcaaacccattgttattttcattattgttgttgttgaacagatgcactttcccaccaaattgcctcggtgcacgagcggcccaccgacgcgggccgtcccaccgttttgtgcgtcggtcgccagctgatcgccgtgggcaccgcccgcggcctttgtctgctgttcgagcgcggcacgcagcgcctgcggcgattcattcgcgcggaacagagtgagttttattcactgctcctgcgaatttataggagaaaaaatatacaaaatctggagattttacccatttctttgtttagccgtttttcaaattaaacttgccaaaaacgaagggatacattttttgatccattttcaatctttcaaaaagttcaaggcaaacaaatccccaaaaccttaagcattcggctccatctcctgcttggacttctcgcccgacccgcaacagcagcggctctgtgccggtcacagctccggcgcactgaccgtgttcgactgcggccggggccgtgtgctattcagcggcaacgacctcatccagccgggccgctcggtgctgcacgtcaaatacatcgcgaggtgagcggacagtcggaaaaatgcctataaaatgtttgggattttttttaattttcattcatttttattttttcgttccacatttatataattttatctaaaaaaaacaccctcattatgtgttggttcagctacgtgttgctgatcgtggacagtggtggcaatgtgtacgaattccatgaacggcaccagcgccagcagtcccatcggagcaatgtcgtaaacggaggtggcaaaagcagcagcaaac

SEQ ID NO: 17584 - DNA, 1365 bp, Heterodera glycines
aatggcataaattcccgttttttgtttttttgcaggtgttggtccaaaaatgtcaaatttggcacttcaaattgcatttggcaaagtggagggcattgcggtggacactcatgttcagtggggttgccttcccgtctttgtcggcacattttaaacaatgtttttttggcaggtccaccgaattgcaaatcgactcggttgggtgagcacaaagagtgccgaagaaacggaacaacggctcaaggaactgctcccaaagtgcgtaggtgttaaagccagaaatttgaaataatttttgccattttcgggtatcgtttttcttcatcaacaagaaaatggtaattcctacgggaaatgtttccatttttaggaatcattttcattttatacaaaaattttgctttattgacttgttgttagttctttgagcggcatttagatttttcaaaaagaaaattttattgtttgatttataaaaaataaaaggaaaaaaatttttgaatactttctcagcaatatttttgaaattttgggaaaaattagtaattcatcataaaatatgaaaaaatcgctataaatatttttttcttgaattttcttatagaaagatttctataaaaaaatttttgtaaaattctaagtagtaaattttcggaggagaaacaagctgcttcccatactttctcacatcatctcccctaaatcagcaggtctgaatggccgtccatcaacaaactgttggtcggctttggtcaaacaatttgtttgccggtgcgaccgaagtgcgacgagtgcgccaaccgttcgctctgtccatggtcatcaccagcaaatggagcagcaccaaaaccgaagagcaagaaaaagagatgacacagagagaatgaagaacgatgaaagaaaggcatttgccaccaaaattcacttacaaattaaaactgatcctcgaaggaggccaaaattttaaatcgactttttttttgccacccgtcatagctttcaatatgtggaattagatttcggcctggattcaggtccaggccatttttttgacaacttggatttttgtccaaaaaataatgataaaaatgttgttaatattggttaattaaacaaagactctcaagagcatcggtaattgattttattgacggacccttcaaatttctaaaatttttatcatgaaattttttttattacgtttacacctttaaagagattcaatatgggtcagggctgggaccgcgccgcgatgtgcgattcgcggcgttttttttttgcgcggtccgcggcaatttgaatgcgcggccgcggttttttcctgtgcgcgccccacccctgatatgggccactccactaatgctg

SEQ ID NO: 17585 - DNA, 1174 bp, Heterodera glycines
gcgcaattttaattatttaatcaaaatcaaatgcttttttattgttcacccaatgcaattagtgccactaaaaagccaaaataacacattgttacaattttcatctttctgaagctgaaccgccgcggattccccaattttgcatcgtttcattatccaacaattgtcctccaagtcattttcctttgctttgatcagtgtcagcttttccttggtctgttcgttcgctaattcaaatggcaccatttgcattgacggcccatgaacagaaaaatgaatttcgtaacagacggaagaaatggcattggcacggagaaattgctaaacaattgggaaaacaaaaatagaggcaatcaaaaagcattgatttgccgaaattatggtcacacctccttgaatttgttgacccaatcaatgtccacatgtttgttaaaatctttgcaacgcaatcgcttgggttggccatcttttctcggagtttgcaaccatttggacaatgcttggccagcagaaattgttgcatttggcacatcaaaatcactaattggatcaggcaacagaccaaatgaatagattgaattcaattggttaagatcggtaagaattgtcggcgaagtgcgacgacgcaaattgtccaaaccatcaccatcgataaagtccaagtggcgaatgtttgatgcaaaaattggccacatttcacgaacaaaaacatcccaaatcggctggtcatccgagctgtgtgcggaataaatccacaactctaaattggtgcctcttttgttaaaaatttggtgatttgaacgaagaaaagcgatgacgaagtgatcgatgtaactgaaaatggaaggaaagctttcattgccataaagctttgatttttaattactcaatccgaaggcgcttaaaacggattttgctgggcaacggacgctcgggcaacggaaatggcacaaatttgtaaaatttttcatccattacataaagtttcggttcaggtcctttgtccttgtctattatgattgttctccaaattgtcaattcgcttttgccatcgaaatgtttgcccaccaacgcattgaaacgtggcgaaagaattgccaatttgaggccgagttgaggacggtcaaaactgggcaaaatgtccatccaaacgtcgttgcaaatccaactgaaa

SEQ ID NO: 17586 - DNA, 2628 bp, Heterodera glycines
gtgtcgcccattccgagtagacttcgtttcagttttcaacacgagccaatcaaaatgggcagcacggaaatcggagtcgcgaagttcgtttcgacaacacaaatggacgggcgtacacacgtcgcaacggcagttattcgtcggaaccgtcgtcgggtcgacgaagctccttttcccgtcatcaagatggtgctcgtacatacgtaccctccactgcagtacagcgaccgatcagcccgaatgggtgtgacagtggcggcatgtttctaatggtcgaccccttcaacattccaaacacattgggcgcccagtaaataaacacattaattttcattcatactatattatacataattcttataaattaatttatattattcagaattcaagtatttgatctccaagagagttagttcctttttattttggcatcattcgcctttttatttatatgtccaaaatcagacgcgaatttaggcatccgacatattattggttactgcattccattgcgttgctgtgtgggtctgttcaagcacattcagccatgccgtgccatcaagtcgatggaaagtcaatctatggatgaacagttcgcgcacaagtacaaattccaccccaaccttccattgagcgttgtcccgcttcacgacacggaattccatcggatgatgggctcaccggtgatgccgttgcgcgacggttatcagcaacgtaacagattctttgtgcgtccctcttccccgcggttggctcaacagcagagacacgaattcgacgacaccgcgatgcattagtgagtgagcggagattgtggggtttttaattgattgtcaggtgttcgttaaacaaaattttcaaaagaataatgcttactcagtgctttttggtattacacctgtcaatatgttatgcgtatgaagaaagttcttgctaaatcacaattttaattaagcgtgcaacacaaattcaaacttcagtgagttttgttgggttcttctgcttttaaaaatctgttttagcatgaaccagcatctcattgcttacagactgccagatggccttgactgttaccttcgtctggaactcgccccacattgtaatatatatttattcttcattttatatttttatttgtttattttttcccacttttaacgtatattttaaggccagagcctattctctgaatagaggagattgcggcagcgggaaaccatgaacatgatcctttttgcatatatttacatcgctcgtgttaataagaaaaatttttgattttttgcattccattggctttgacaaaactgcgaaaaaagtatcattttccaattgtttatttgtccgtgcataaaataagattttctgcagtgtacatagattttaaaaaatgagagagataatagtgtagagaaaaaaattcgttgtatgctacatagaattatgagctgctgagtgcaaaataagcggcttcgttgcaatttacaggaccataaaagacatggccataaagtaacttggcaacttaatgctcacagcttttcagatttgggctcccattgcaaataaagggtttttctcacagtcggtggattgtgaattagtcaccaaaggggaggggggggggtcccaggttaaggtcctccatatgttgtgtgtaaatttaaattcattccaaatttgtttatatgaccaataacgctctaaagcagtgcatagacaaggaaattaattcgattactattcataaatcatggaagtataagggaaaaataaaaatccctttccctaatttagtctgcaaaaaatgcaattcaaaatttattcattggaaacaaattaaaaacaatagacagataaataaatattctttgagacaaagggtacaaaagtcaatcaaagcgaacaattggagacaaaggcgacccctcgctggcttagcatagaatgatcaaatccaattggtaacaaattaagtccgaacaaaaatttggccctgttggagtacagataaacaggcaccacaacactcgctggagaatgtccttccaaggtccacgtgaactgaagccgtggcactccaacatgcacttcatctgtcagcttaatttcgtcggcctcacaaagaacgccaattgcgcgaaggtctaaaaataaatgtgcgatgaaaacgaagttcatcatcatcaaccacctgtcagtgtgaatgccgttgattttaattgtacttcctccgtttttgtgatatgcatgtacatctgttcgagcgaccagccattcgtttgggctatcagctgacgcgtagccgttatatacgcttcaggaaagaacatcccacccagccagacttcctcatatctcagattttcagaaagtgacaagcgctttagttgttccatcctttgcacaaagtctcgcatccattcaagtgctgttacgtcttttggcacggaaaattggagccaattgtctggcacacgttttctcttgaccaatgcagctattaattcacggctgtgattgttctgcttctgatccccatgacaaatggacaacaattcgttgaggtcccgtcgaatatcggacaaaagtctggcgcccaaagttgatttcacgttcaaagaatcg

SEQ ID NO: 17587 - DNA, 2985 bp, Heterodera glycines
tgcgattgagataaagcaagtctcacaaaagattagagaccgaaattttaattgcacggggcctggtccaggaccttcaacatgcaaagagagagcgtattacaataaaatttgattaaaggatttttagcaatcttcggatggaataaatatgataagatggaaccaatcaattcataaaatttcgtagaattccaatttcaaaatttcgagagatctattacatttgtgctaaaatatatattaaaagatttgcttgtaagtgttggatttcgttattatgcaaatacaacttttttgtataaatgaaatgttaatgaatgcatgtcgtcgcatgccatgcaattattttattttcctttttttcatatttatttagaacatattcaaaaaggtaacttttacaatgtatgatgaatttgagcaattttacaaaaaattcacaactcatttagttttgggaaaaccgggacaggtgctaggtcgatacgaaaaaaactcaaagaatcataaaaataattaatttaattttaaatatcggtgtctgaatttaataatacgattattagccttcggcaagccgtataaaccagggtgacatttaattattattatttttatttatctattgcttttctttaggttcgtatttgtatttattattattataaattatttactctcgctctgggctcactttattgttgtgtcagacgttctttttatatgttcaataaaatataaaataattataactgtttcttcacctatataattgtataaaattttgttttgtgtgatttaatattaagttttggtttatattatttctccttcttttgtgaattaattgcctttttatgcaattatttgctcaggatttattagaatataatatgtatagatttgatttattttctatattttgtttttatttttttatgtattaatttggtttaacaattgaaatacattgtgtatatttactctatttttatattaaagttacttaaacaaaccaatgacttgctttgtatttatattggttattaattttggtgatgcgacatttgcgccgcgccatttgcgccgcacagcaaaaatggacatttgcgccgctcagcaaagtcgacacttgcgccgcgccatttgcgcctcagacagttgcgccgcggatatttgcgccgctccatttgcgccgcgacatttgcgccgcctagtaaaaatggacatttgcgccgcgcagtcaaaaataatatttttcatttcaatttcactaatatcaataagattactaaaaaccaacgacgaaaataacgaagtgaaaaatttcaaaaaatcactacttaaagataaacattaatttttttatttttaatcattaaaaatcttaacatttattaggtttatcaaagatatgaaaaatgaagaagaataacaactaaacagactgacactgtttgaattagtcctactcatggatatttgaccgcccacggctcaaaaaataattgaaattgatgagtagggtggggatttttaggtttttagttattttttctgcggcttttaattcaatgagaaaagagaaacacatttttaacacgaaaccccccccctatgttttctgtaagaaaaacagactattttttgctttttattcaaaaaaagatgaaatttatgtatgtattttgtcattaaaattgttaaaaagttatttacatcgattttaattttgaaacaagcacatattttaatttttcgcccctatttcgcgatttttgattgaatatcaatcgattataatttagaaaaattgttgggtcaatcttataaaatttttaatgagcggcgcaaatttcgcggcgcaaatgtcgtttttgttaggcggcgcaagtgtcgcggcgcaaatggtacggcgcaaatgtccgtggcgcaattgtcttttttgctgagcggcgcaagtgtcgcggcgcaaatagtgcggcgcaaatgtccgcggcgcaaaagtcggctaaccattaattttatattttctattaaaaacggctaaacatatattttcaacatataattattctcttggcggtgtgcaattgtggttgatgtgattggtgccgtataataaaaatatttatttaagaaatttctaataatttggtttaattatttttttatgaatatgctatattatattgcttctggcatttattttattcattattgtgtaatctctgttattattataatgagttcattgaaattaaatatttttattttacttaaattttttttgattgtaaattcgtttagtgcgctagaatatatatttatcgtttttatttaagctcatacatgtagggctttaatttatttcaaagtataaatttattaataactgaaaattttataaaataaattatttaattttatagaccttttatctgctttgttaagactaatacgaaacttatattgaatttgttatatgcaattattttgggtttatttatttgtgaatctcaataatcaattttcatttataatttctttccaaccagcagcagaaagtaacgtttgtaaaaatgaaaaacattaatttcaaaattaaatttaaaagcaaaagatgtcatgcgagggtaatttatcaacaaatatcacgcagaatatatatttagctccattaattctcgtggtgcagttgtgatattaatttccataaaaatactgattaaaaaatcaaaaaatttactccaaactgaaaatacctaaaaaaatgttgttcgaattttaaccaacattttcacgtttcggctggggagagagagcctcacatacgcgaaagtccttggccgaagaggatttttttcattgccaatttggcgcaaattcaaaaaagcggccatttgggtagtaaattaattatgggaaaattaaaattaatttcagaaaaatattaacaaaaagtgattaaatttataattt

SEQ ID NO: 17588 - DNA, 1794 bp, Heterodera glycines
agcgtactttgaccctttaattctttcatttgctaagtgggtctcgggtcttttcaagtgcagcgatccttgcgacttattcccaacatttgttgttaccgatcactccaattgtcaataagcagccctccaaattgattaattaatgagtatgaaaggacaaacgaatatccaggcaattaggttaaagaagtatttcccgtcaatcgatcactgattccctctaaaagtgccatcccctctaataattgacgaatgtatggacaattaaaacataggctacgaataaatcaatttttatttcaataaatgggaaccattctatttaaaacaatgaagaatttaagaaattcgtatatttttgataacaagttgccatctttaaaatggtcggcagagttgcgctggtggcacagcggaaaatggttatttttgggacttagggaaccaacggcgtagccaaagagggctaaagctccccgaaaaaccaaaaatgtgaacgaaaaataaattgtgcccacgatgaaaaatcttagtgatttagactttccatgaagtgaaatgcaatggtttgggaggtgagtttcttcataaatttatcatattatgtacactctggttttttggcactaaaaagagaaaatttggcgttacgaagaaaaataaaaatggattttttttcttaaaaagatttgttttgttttttacttttacttgttcaaaaataaataaaataacttcctgtttcccactttttgttaatttttcctttctgcactaatcactaataatcaaatgcattcccgagtccaccaatgtaattccaaattcatattagataatcataagcaaatgaaagattcagattcaacccgagaccaagttcgagtgcccaatgtgattgccttagtcggtttgcctgcgcgtggaaagacttgtgagaattgactaattaagaaccaaagactccaattaaggagttgtttattaaattttttattagggtttgaaataagtttcattcttttttttgctattttcttcttcagatatttcacacaaactttgccgttatctgaattggattggcatcaaaacgagggcattcaatgtgggggagtaccgtcgccaggcatgcgatttcttccagcaaggagcatctgaattctttagcccaaataatcaaattgggacacagatcagagagtaagtgtctgtttctgtttttgtatccattttttctcatttccctttagccattgcgcaaaattggccatggaggacatgggcctttacctggagaaaaaggagggcgaagtggccgtttttgacgcgacgaacaccacacgccagcgacgcaaatggctggtcgactactgccagagggagcgcatcaacccaaagtttcgcatattttttgtggaaagtgtgtgcgatgacccggacataatcgcagcgaacatttcggtctcacccattttggcccatttctcaactaaaatgcatgcatttcaggaggtaaaagtcaattcgcccgattatcgcggaaaaatgacggaggaagaggcgaaggccgactttttgcgccgcatcgaaaattacaaattgcaatatgaaccgttggacaacgaaaaggacgaccacctttcgtacatcaaagtaagtctctcgaaggaattaccgtatttgctctaattatcccctagtctccgttaatcccccaatctccaattatcccccagtctatgagggggtttgaagaataatccctctatcttaatggccagtcctacg

SEQ ID NO: 17589 - DNA, 2080 bp, Heterodera glycines
cagtctacgaggatgtgaaaaataatcctccatgggggataattagagcaaatataacccatttttcgataaatttaaaattgtaaaacgccttttctggggttttcggggtcgttgacaaattgcctctttaaaattaattcgtttaaattttttattattgggcattggaaggcaatgtttgcttagcttttattctacaaaaggcatatggattgcttattgttaggttggcgtcattttctgtcctttttcgttaggttattaacgcgggtcgttccttcttcgtgcacaatgtgaatggccacgtgcaaagtcgggtcagttgggtacaaaagtcgggtcaatgggcggtggcgagtccaccgttttaaaatgcatttggtttcgcttcctttcactcattttgcctttccatacgttcaggtggtttactttctgatgaacatcagtcttctcccacgttccatttacctcactcgagttcgtttctccaactttcgacctgtttaatgcgttggtgttaagcatggcgaaagcgaatacaataaaattggccgactcggcggcgacagtccgttgagtgataatggcgttaaatacgcggagaagttgaaagaatacttcgaggcatgtcactttacactaacaattaattctataaaaaaaattagcatgaaaacatcgaagatttacgcatttggtgctcccaaaagattcgtgcggctcaaacggccaatcatttgaagaaattgtcttcatacatcgaatatctaaaagtgcttgacgaaattgacgcggtaatctagcaatttttgaccattgtgacaactcaattgacaaatttagggaatttgtgagggtttgacctacgaggacttccaaacccgataccccaagcagttcgctgagcgggacaaggacaaataccattaccgctacccgtccggcgaaagttacgaagacctcgtggtacgactggagccggtgatcatggagttggagagacagtccgacattttggtcgtttctcaccaagccgtgcttcgctgtaagaaaggaaaagcaaattgcaagacaataatcccatattaaggcattttggcgtatttcaacaataacaaccgggcagacttaccgtatttgaacgtgccattgcataccgtaatcaaactgaccccaaaggcatacagtgagtgggcggttacggcacgatctctgctaattggaaatacattaggctgcaacgtcgaactgttcaaattcaaagtggacgctgtcgacacttatcgggagaagccaaacgagccgatggtaagcgaacggcggaaaatgaaaattgtaaacaaaaagtggattagttccaattaatgattcttcgcattgcctttgtcctcggaattcgcttcatttgtctttctttctcatgcctctctctctcttgcattccctcgcatttattcgttgcctcttttgtagtgggaacacatcgaaggtgaaggctgcattcgcatttgtcgctctccctggtcagttgcgcttgttttgcccacttttcttttcaatgtctttctgttgtgcatctttgcccaccttttgtgcttggtcccccccccctaacaaatccattaactgcgctatcactcctttttggcttctttcgtgcttttgctttccttacaattattttttggttttctattactttttaccttggcctgaaatgcactttcctctctagtggtttgcttttttcactttctccactcttttcgttttttcctaatttttctgtttcattaattaagaagaaactcttggccgagcccatccccgcaccaattcccgaggagagagagtcgtcaatctccgatgatgctgtcgaacctccaccatcccaaatagttcctctcaattagaagtcaactcatttatatgtagaacagataacttactcaaaaagttcattttgatattctcactaaatttctaaaattgagtgtatttattgattcatttttgtaaaaatgtatttacgcatgttcagttaaacagaagaataaattcttatttttgaagg

SEQ ID NO: 17590 - DNA, 719 bp, Heterodera glycines
  unsure (1)..(719): unsure at all n locations
atggccagatgagaatttaaaaaatttcttttactcaaaccataggcggagtagaggtttcagggccggagaatccgattctgatatccatttcgactcaattccgaactccggacccgaataaaaagtcgaacttactaattttttaaatttctcattttggtttaaaaaaagatttttaaaaatttttattgaatcattgataaacttttagtgtatttccgtatatttaagccggttttgaaccaaaaaatgcgaaactcgaaaaatttgaatttgaagtttcgactttttgttcgagtttggtccggcgctcggaattgggtcaaaattcataaccgcccccatctgcacctggtagtatttggtccggttgaccacctcctgcgcgtcgtcggccggctgctgagaaggggcggaggaggaagacggtgctgcaccaccatcacttgcacccgttgttgttgacgtcgttgttgcagtttcctcttcgcttgtgccaccggcaacaatctttttttgctctgccaaaatttatttggattagatgggtttcaaacccttaaaattctctctctttctctctctctctccttatccctcctttattcctatttcatctctccccaccctactctctctctcttcctctcgtncttcttcccctctctcgccctctctccttttttcgtctttctcctcccgctcctactctctct

SEQ ID NO: 17591 - DNA, 1262 bp, Heterodera glycines
catcaaacggttcgcggacgaggcgacggaaatgccgacagcggaatgggcgatggcacaacaaaggtccaccaaacggctcgcggtcgaggcgacggaaacgccggcagcgaaaattcgggcgaggatggcacaacaaacttccatcaaacggttcgcggacgagtatacggaaatgccggaggaaattctggagcgggcacagcaaacggccaccaaacgattcgcggacgagatggaaatggaaattccggcagcggaatgggcgatggcacaacaaacggacaccatgcaaatgccggcagcgaaaattcaggcgatgtcacagcaaacggcgccgacagcgcaaattcaagcgatggcacagcaaaatgtgtcgggctccgaggtggccgaattgcagtcagacaacgctgcgccagaaattacaacaaagagagggaggccgaaattggagtacgacggctatttgtacttgttcgagaggcggagtgcggacggcaaactcaaattctggcgctgtgagaagttcaaaaccaagtacacgaaatgctcggcccgactgcacaccgacgagcacaacgccatgcgaaaaacactgaatgagcacgtgtgcgaccaaagtgcggcacacgtggaggcgcaacggttgcggacggccatcaaacggtacgcggccgaggcgacagaaatgtcggcagaggaaattcgggcgattgcactgcaaaatgtgccgggctccgtggtggccgaactgccgaacaaagacgcgatggaaaaggtaaaacataacaaaagattttttgtttcgtattttcgagtgatttggcacttttttcagatggtgagacgtatgcgccaacgaaattgacataagctgaagggagctaacaaatgaggagaaaggaggaggaagcaaagcgatgtcaatgccgaagcgatcaaaaaaggacgaaaatgcttattgttaattaatgccgcccatatttttgtgcacaataaatctgtgcgtatacatgcccaaaggctcggtcaagagactttcgattgggtgaaaatgaggggggggggagggtagactgggccaatcacttgtgaaaacctcattagactccttttaaattaaattggctgaatttcaacaattatgtatacgaaccatttttgtttaaaaaacaaaacgaataaccgcatcatcttattcatttgcaatgtttttttctgttttatagatgtccatcggccactctcccccccccccc

SEQ ID NO: 17592 - DNA, 1460 bp, Heterodera glycines
ataaccattttttgacgtattttcgccctgcctctgatcagcagtgccttcttcttctgctggtggagagctatttgttgcatttgaaaagtgaatgaaaagggtggcaatgaaaagaagggcgaagttggacattcttcagatggtttttaattttctatatgaatatttattatattttattatttatttaatattaatcaaattgcctttttctaaatttaaatacttctaatatttccttccgttcacatgaaaagcacattttattattatttggtcgacttcctcttccgcttcatattttttataatatattttttcaattagtttttgtgtttttcataagattttttgtatttattttatttaaaacgtaaaatatttaaaataaacacataaataaacaaataaaaatatggaaaggcagcaaaaaaaaagtcatacacatgattaatttaaatactgtaagatatactgtatctacaatataattgatgctaacactgtaattatcgtcataattaaaatggccaattcgccgtgggcaaattcagtccatccaaattccgtcccttttcgtctcagaaaattcctttgccttttctcactttgtgcactttttctgctgtccaccaatcgctccacgcggaaaagtgcttcgtccaacggcggaattattcgatcagtgaaaatgtcgcgcaatttgtgggcacgcgaaagactttttgggtcggaaatcaccgaaaaagggacggagaatttaattattattattttaatcattattttccaaagtaatttaaagctgaactgtttgaattgcgtgaagaacactctgctcggtcaggctgtatttgttgatcactgctgccattcccatggccaatagtaaatgcgcttggtgggcctatttggcgacacatttaaatttaaaaccaaaccaaaaagccgaaaaagcgacctgttcagcaaaaagtggcatgacaatcattggcacaccggcacaaaacccttctcggacacttaaaactgagaattaattgaatgttccatttattttattggatatcggaattcctggcattaaaacattgcgaagaaagttttaatccttaattgatgtccaaataatcaagatattttatgttgaatttaattctgtttctgcgcctgcctcttcagtccgccatgtgtgataaatgccacggttttggcgtgtgccaaaatttccaactgcggtacccacggcatcattttgatgtgatcgtccaatttgggcgttgtttcaattggggggccgtcgtatgcaaaaataatgcgatattcggagagtgcgttcattgcgccaaaaagtgcgtttaaaatgcgcggcggtgccaattgccagtcggggtaagagccaaaggcgaaaagaacggtgccgcgggagaacggcacgtcgacaaactcagagaacg

SEQ ID NO: 17593 - DNA, 1159 bp, Heterodera glycines
ttgacggaaaagttcggcccaagaaaagtttgggacgccaaatttggcgatgtttggcattgtgtaactttcagctttgtgtaattttggcgaacaatgttattttattattgtgccaactcactgatccaattcattagcacgatttctgcaaaattttcatagaacgcaaacagacgatgggagaaaagggaggggcgaaagacatcgcgcgaatcggtgggcacaaacggacagaatggcacacgggagacccaattgcgaccaaaaaagagaaaaggggagaaagacatcggagatgaagcggactttacagttacagtcaacttttcatggaattcatgtgaatcatcttattgctataaataaatattagatcgtgatcactgatcagagtaaaaaatttaccatggaaaaatatcaaaaaaattagggggaggtgaaacctagaagtaccacaaatcattccaaagaaaaatgacatttgagaggcgagtgaatgccgaaaagagaggaaccattttcattaaatttgactgaccaaaaatcttcaggttcttaaatattacaataaaattaatttattttttaattccacagctcattttcccccagtttcggtgttcatcccaccgacttattgcgcgaacggattcggctgaaatgagcgtttgtgcggcagtgccataaacgatcagatgaggccttggcccgttccgcgcactgtcccaaaaacggcgtttgagagtggccataaaatagccgaatggccacatcaaatcatcgatcacaagcaaatcccaatcctcattgatcagatcgaccatctgttgaagcgaagaaagaaaaaataatttctatttttggtggctaattggtattaattattttacaaatattgaaatgaaatttaaatgcatttgctttttttccattcgtgccatttatgactccgttttggtaataagcttagtcctcagtgctcgtgcaccttctccgaatggttaagcatcagtgtggccaactgttcgtccgactggcggtaaaattcgggcaaagtgacggaagagtccgtttggttccaaaagaattccgcaaatgcgtgccgttccgcctcgtcctccacttccgcgtggggcaacggcgcgcgaatgtgccg

SEQ ID NO: 17594 - DNA, 1502 bp, Heterodera glycines
  unsure (1)..(1502): unsure at all n locations
gcatagcatagctgaagccnctgtggaaatcgctgttttgcaatttggattggtgacaccctttgtagatatttttatccgtttacactaatatagccttcttggcaatttctaaatgctgtgggtatgcaaatacctagaagcatgaactcaatgttgccaactagatcggaggaagcctcgcaatcttctgaaaatagttgatttctacattttctaatatgtcattgtaacaaatagaaatactgatgcattgtagacgcattcgatgccaaaattcagcccatctacgtgtgcagaaagtcaaccttcctttctgtaccatgtttttgtttcgaaaatatttccaattttgtttatgatgaaatagacaatttacaaaagtatagaaatatattagcaccactacagtaccacaaaattctttcgtaaaacacccgatcaactgaaaggtctgatcgctagaatatgtagctttctgccatatgagagaaatatgaaataatggtatgagggatgttccaattacatgcttatgctgttactaaggctacttttagcggcagatctgtaatttgtgcaacccttattatcagtgagattaaacacaggattagagaaatgccaacctagcaaacgaagcatagcatagctgaagcccctgtggaaatcgctgttttgcaatttggattggtgacaacctttgtagatatttttatccgtttacactaatatagcctttcttggcaaattctaaatgctgtgggtattgcaatacctagaagcatgaactcaatgttgccaaactagatcggaggaagcctcgcaatcttctgaaaatagttgatttctacattttctaatatgtcattgtaacaaatagaaatactgatgcattgtagacgcattcgatgccaaaattcagcccatctacgtgtgcagaaagtcaaccttcctttctgtaccatgtttttgtttcgaaaatatttccaattttgtttatgatgaaatagacaatttacaaaagtatagaaatatattagcaccactacagtaccacaaaattctttcgtaaaacacccgatcaactgaaaggtctgatcgctagaatatgtagctttctgccatatgagagaaatatgaaataatggtatgagggatgttccaattacatgcttatgctgttactaaggctacttttagcggcagatctgtaatattaaacacaggattagagaaatgccaacctagcaaacgaagcatagcatagctgaagcccctgtggaaatcgctgttttgcaatttggattggtgacaacctttgtagatatttttatccgtttacactaatatagcctttcttggcaattctanatgctgtggatattgcatacctagaagcatgaaactcatggtgccaaactagatcggaggagcctcgcatcttctgaanatagtgattctacatttctagtattcatcgtaacatagaatactgatgc

SEQ ID NO: 17595 - DNA, 1980 bp, Heterodera glycines
tttttctcacaaaaatcttccaaaaatatgtctttaggggttatttgggccgctgatcacgaatacgtgatcagattttacttttgacatcgtcaagacctcagaatccctgtgtgattggggattctgaggcatcattttgaggggggggggggcaggttcgaatccggacggtgtaacattattttttttgtgcatttttacgttattttcaatgaatttaattaatttaaaatattttgttgagttaataaataaaaaattatatttaatttaattttttttttgataaataaattttataagtttaaattaattgtttttttaattgatagaatttcatgtatttttttaattaaatttgttaaaaatattttcattttaatttaatgaatttactaatcactgttgtatcaatttatatttaaagatttgttgtaaattaataataaaagaatttatgtaaaaaataacaattatcttttaataaagaatttcatatttttttaattgaatttataaaaattaatttcatattaatttaaatattcaattattgtacatttcaaaattctctttttaattaataaaaggaataattaatttattttttaaaatttataataaattgcattcaatttttgtacctcttctaatcactgttgtacctcttctaatcacagttgtacctcttctaatcaatcacagttatacctcttctaatcacagttgtacctcttctaatcacagttgtacctcttctaatcactgttgtacctcttctgatcacagttgtatctcttctaatcaaagttgtacctcttccatttacttttgtacctcttttaatcaccgttgtacctcttctgaccaatgttgtacctcttaaaatcacttttgtatctgttctaaaatttaaaaaacggccgcgaagcggccgaaaagaacaacaaaaattagaaacgggcgtgaagcgcccgtctgagtcgatcaaaatttaataacggccgcgaagcggccgtcaaagcccaacaaagtttaaaaacgggcgcgaagcgcccgtccaaggccaacaaatttgaaaaacgggcgcgaagcgcccgtccaaggccaacaaaaattgaaaaacgggcgcgaagcgcctaacaagctaaaaaacgggcgctaagcgcccgtataagttcaacagatttaaaaacgggcgcgaagcgcccgtccaaggccaacaaaaattgaaaaacgggcgctaagcgcctaacaagctaaaaaacgggcgctaagcgcccgtgtaagttcaacagatttaaaaaacgggcgcgaagcgcccgtcttgagcctcgatgtggactaaaagcctctaataattttttaaaaattcaaaaaaatctctccaaccaaatcgatcaatttgaatcgcttcacagtctaggtagcgaagctcccaaagcgcgaagcgctttttcccagcgaaaatgccaacggttcacgcacccgctagttactatatatgttatattgacaaggagtttcgtttcaaaaaacaaaatctcccggccgaaggccgggagcgccctgaaagtggtggaagggtcttacaactttttgaggagaatccgggaaaactatagaaaaaaattcagcgcggacgactgagtcccagggacggatttctcattttttcgtgcgtttgacggcccataactttttttctgaaactcggatcaaaaaattcccgctgtgagggcactccgcagaagtgtcctctataatccagtattttttatttttttattagagccaccccctggcctgcacgcttggctaattgaagtgtgctcaaaatgtacacttcagtaccaggcgaataactcgccaggggttgctttgaccgaaaaattgtttctgagcaaaaatgtgtagtatttgaaaggctatccaaccaagttttaaaatttcgaaaatttgaaaattttcgagcta

SEQ ID NO: 17596 - DNA, 1809 bp, Heterodera glycines
ccgcagctttcgtttgccaacgcttctgtcggtcgaattcgcgcagctgaaaaacaatgggcaaattcaatgaatcattcagtcgaccctttgatcgatcagtataatttggacccaatctttcttacccctctctctctcttatttctctatgctcctctctctctctccctctctctcacacacactttctttctcccaaattcgactgatcacccatccatcatctctcaatttcgtgatccatcattcatttgcatttttaaattcttaatttcctgccgacttgatcatccatttccaacttttctctcaattgtctgttcctttttccaccgtttgtcactttgtccacctgtctgatcacgtcgttcagcaccgcttcttcttccggctcgcatttgagcacttctcttgccgttttcatgtccgcttgtccgtctccgtccaacaaaatgtgccgaaacagtttggcacgtcgcaaaagttcggcttcgcgttgggcctcaaatttggccaattaattagcaaaaggcgcgtcattgctgaaataattttacccttctgcagacacgccaaagtcgaccgttcaatttgatcacgagccttgaaaagttaggggaagtgatcgggcgatcaatcgcatggcaaaaactatgggatgtcaagtgatgccccctcccctccacagccaaaagtgccgttctcaagtgagtcttctttgctctcggctgactcggcccattccattctcattaattacccccctaattagccccccccccccttcccacttcgattctgtccattctgcgcctttcttccgcctcgcgttccgcttcctcccgtgcgacacgttctcgctcttccctctcgcgcattctctcctcttcaagcgctctctgcgcctcgcgttcagcggacattttccgttccgccacttggcgtgccaattcctcctcccaagtgccggaggcgtccatggacagagaacgccgggcggaccgaacgccaaaatttgcctgaggagaaaagcgggcaaaaaataaaagaattcgaaaaattaaataaaaaattaaattaattgattaattaaaatcaaaagcaaataaatccaattcaattgtataatttaaaaaatcccagtaaatgtaaaaaataaatgcatcgcttttgttgattatccattcgcacttatcgacagatatcagtcaaagatatccgcgaatttttacagcaaaaaattgcggcacatttctccataaattccctttaaaatatgtcacatttttctgctggaaatcggtataatttaactaagattatatttttagattagaatgaatttcaaatttatttttgtaaattccatttcaaattagccatggaataactatgcttgcttaaacataaaaaaaacgaatgatacaaatttacagaattttggcaattaaaattaaacaaactcggtgcccaaactgaccccgagactctcgacccccctgcccctttttttacatttggtgatgccattttgttgacgttgttcttccccgtgggcgattgtgtgcacagcaaagtcgagtcggcgccgttgtgctgttggtgttgttcaacaatgtccacatggcatactgtatgtgtgatgtacaattatgttacagtaacagcgttgccatgcggcggtgtgatacggtgctaccgttctggtggtgcagctgctgagtttgctcggccgctaaattgttgccgcccgtttcctccacggaggacggacatgagacgggaggagttggaatcagcggatga

SEQ ID NO: 17597 - DNA, 1400 bp, Heterodera glycines
tcattataatatactaaatggatcatttgtgagtttcccctttcgaagttcgtaattttattataattatctccatagtcccttttttgttagttttattcgcctgttggtgcgcggcgagaatgaacgcggcggtgtcaatggcctgaggcggtggcgcaaattggggaaacattggcatggcgccggcaatgaattggcgttggcattgcgcctaataggctaattaataggccattatgaccaattctcttttgcctgatattctccaaaaaggatcggctgcactgcagcgggtgacggagtcgtgaaaaagtgcagcgccgaaggcgcttgcaggggaaaagcggacggagtgccgtaaagcattgccggagggatggacggcgggggatggacgacgaagggagacggcggatgatcaatggggggaggaggcttaaaaaggggcaaagggatcaatggggcaagctgaagaaagagggcggggatgtagaagggaatggttattcccgacactcattagttgattaattaccccctcattaactaattaattacctcaacgcccatcggctgaatgttcgtctgctcattattcagttgcatttggtgacagtgagatgactaagtatatttaaaataattaattttcaatgttttcccatttttattcatttctttttttacattcgccgccattccgtcgcttttttcgctgtaattttccccctgcctttgctcattctccgacggctctttcggcgttgcccacgcgcggcgtctccccggcgtgtgcttttggccaaatttggcaaaccatccgccggtctgttcattttccactgaatttgattaaatcaatagtgaatggcgatgaagccgggccggatcattagtcgtgctaattactgttaatccccccctttttctgccacctctttctctatcccattgctcctttttgcgctttgtcagcgacccgtctcgtgaatgcattccgttctctcccggcaatttgtgcggtgacctaatggacaccattttctgctagttttttttgtctgaaagtgaattttttaaataaaataattaattaaatgaataataaatgtaaaaataaagaataataaaaaataaagagcaaagaaagttctccaaatagtattctgatcatgtttcttttcgactgatcgatccgcgccccaactgatcggacggtggataaagcgtgcccattcgtccgaccaaagcatttggacgcattggccaacgtcggacccttttcacgtgaaatttgatcaagtcaccaagccaagggatggggagggatttatggcagtgagtgatttgtgtgctatcgctgatcagtgctctcacagcacgtaataatcggtggt

SEQ ID NO: 17598 - DNA, 2360 bp, Heterodera glycines
aatacccgaacactccgtgaaggccagcggtgagctcgtccatcaacttttgaaaaatgctcggcgcacttttgactccgaatggtaaacgtttatactgaaataaaccacggtgcgtgtttatgcccaccagctcctttgactcttcgtccaattcgacttggaagtacgcgtcgcggaaatcaatttgactaaaaactgtgcaaccctccagcgaggcaaaaatatcatcaatgcgtgggagcgggtggcggtttagttccagactgttattaagcccggttgcaaaatcaatacaaacccgcacattgccacatttcttcttaacgaccacaatcggcgccgcccatttgctgaagtccacagattttatggcaccacaagcgagcaaacggtcgagttcgtcgtcgacagctgctttggctgcatgtggaactggacgaggccggcagaaaattggctgtgcgtccggtttgagctggaggtgcgcccgcatctttgtacaaagacccaaacttgaggaaaaaacttttgaaaatttttgttttaaatttttggccaaagtgtttgggtcgtcgcaaactgtgacggcgtgtgcctgtgcgagattgagtgtcgtagcgattggtcgctgcaatgccatttcgaacgctttgatccatggcaatccgaacaaattcattggtccgtccggggcgacgtggcatttgagttgaagagtgcagccctggtacgtgactgaacacacaaaaaatcccaaaatttcgaaaaagtgaccagaatatgatttggcctttttgatgccacttatgagtttgggtttacccaatttttcccataaaccaatctgaatgaccgacagacgggaccgagagtcagccatcaatgacgcatcagtattgttaatcctgcagttgatcattatccattccgataagtcgtcgtccgtaatgttgaagaccgacattgttgtgttgtaccgttgtgaattgggccgggctgaagatgctgagcggcattcggagcggtagtgaccacggcggttgcactttgagcaagtcggcgcctgtgaacaatcacgcacccaatgcatttgaccacaaaacctgcacggtgatggcggctttggttggcgctgaaaaggggaagggctgcgatttttgttgctttgtgccttcgccgatgggcgctgcgatatgctgcgctttttgagctgctgttccttcaatttctgcggcttgagagtgatggcgtttgttccagaaacagttgccaaagattgagatgtgttgcgcaatgacaaaaacgcacggcactcttcagtaagcttctcaaaagtgatcacttccggcggtgttttcttaatggcttcctccaaaatccgcaaacagcgttccctcagttctctgtcttcatccgagaggccagtgaggaaaatgagggccttgatttcatcttttgtcaagtccattttcgaacgttcacacatggcattcacttggctagcaaaatctaatggtgactgggaaaatgatttagctaactgaaaacactcatatcgacgagtgaaaatgcttttggtttccccaaacaaaattttgagcttatcaattgtctgtgccagagtgaaatcggtcggcagttttggaagtacacgttcggcatgacgagcgtactcctcctgaccgagcttcccaagcagcagtcgcacttgcattgcgtctggaaggtccttgccatccacctgaatgaacgggccaaaacggtcgagccatgcttgaaaagttaaatccaattctggattatatgtgaattggccaagttggctattgatagtcgaataaatagtggaatgattgacggaatttggatttgtttgggcatttcggagaagggcttgaaaagcctccgtctgatttttaactaattgttgaagaatttgaccaatgtcagcggccattttgatcagttaagtgcttttcagtcggaccaatgtttgtgtgaatgaaaatgagtaaatgagagtgaatgtttatcgccagcaaatattgggagagttcgccacgcacagtcaataaaatcaataaacgacctttgttgatgtggaagttgtaatgaggtgagcacagcggtcgcagtgacttgtactttcccaaatgtgtctttccttacaacagtgcgttcagaggctttttatggcttgaacgttgccgcaagtcttctcggtttgcttggcgtccgagggttatgctttcgccgtaacgtttcaaaccgatgtgttacgggggaaggtaggtcggagaaattaaatgctaataaaatgtgcaggcaaattcccaattatagcaataagataataa

SEQ ID NO: 17599 - DNA, 969 bp, Heterodera glycines
ttttttttacagtttcacttttgtatatccaccggttaagaaattgttttttttgtttgcgcgaatggacaaaaatattacaaccaaattgggtaaaaatcaaatggacaaaaggaaatggccaaaaggaaattgaaatgggcaaaagaaatgggccaaaaggaaatgagcaaaaaggagttggcaaaaaaaccctttttcaacgaataagccccggggtaatcatttcatacgttgcttcttcttcgtcctcctccatcccgcttgcgtttgagtgctcatttggtcccactccatcgcgttcgcaaccgtcgccatcgcgttctcagcagcattcgccatcgcgtccgcaaactgcttgctcgcctcggggtgtcccatcaacctaaaagctccattttttacacttttaatttttaaaattttattcatttatttgtgaacagttccccgtataccagggacggtcccaggattttggcttgggggcgggtacctcccctcgggcgacgactttttttttgcctttcacataattttctgttatttttaaaaattcattaacattttttgagaattgctagcattgctgggtggggaggggtaccaccgctctgggcgacaaactttttttgtttgttgttgatttttacaccacttttttgcggcgcttttttggggaacaaggaggccggcggtgtggcgccacttggggaaattttttgactttctaatgtagccaaatttttcagaaatttccccttcatcgacaaaatccaatctgttaaaattctattagttttgtgaaccagaatgggtccgccttaggcgacgcctgcagaaaccacccccctcccctacgcttcgcataattgacgcctgctaatccctgcttatcggagatacgatgcacctaccctttcttaaaatttaaatttttttcgaggtctgactggcataataagttaa

SEQ ID NO: 17600 - DNA, 1662 bp, Heterodera glycines
  unsure (1)..(1662): unsure at all n locations
gccgtaatctgacnccacaaaattttgggattttacccttttttcacgcttaacatttttttttgatctcttcatntatacaaaacaagacacttagggctatcgaatgataccaagaatgtttgatagggtaactctggagggtgaatgtgtttttttgtattgttgaaaaaataagtgaattgggccaagaccaattgaccctgttacaatttttctttcccggttgtttgctttttatttaaaaaaacaataaccttgcggaactcgtcgatacaatccactttgtcccagaggaacttgagatgtcccacctcgtggatacaggtgcgacccgtggtcaattgatccaacgcttcgccctcgttaatgctatgcaaaaatgccacctcttcgtcacatcttttcctttgtcctagttcccgtttcgttggaatttccattattcgtaaaagaagatattatgaaaataacggagctaaactgaagtgtttaattggctacaacaacctaggggaacggtgcagatacgtagaaacgggtacaggaattgacaataaaaagaataggcaagaactcacttaagaaatgcttaagacgcaaaaaagttaaaagagttagctgtcatcagattcattttcgaatgttgtatttagctcactaagagctttcgattgataccattaacgttggattcaaaaacaaaaaatccacttctctcgcgttcaaatgtcagcgctcaatcggcccccttcccattaaaaaaacgaattgataacgccaatgtgccaaatttaattgtcaatttcagaaaacgcagccaagaattcttccgctgctgttccttggtgcgcgttcggttgaactgagcatttttggagtccacaccgggggcgctcgatgacacggtgttgtgctcgtgtcccatcataatgaaaacattttacgatttgaattgttaaatttatattgaatttccgtcgaaaaataggaataactttgatagaagaaaaacaactacttggatgagaactaatccaaaggaaacataatgaaaagtgccaagagcaccaccactcgaccatgcatgtgaataaacaaaaaaaagcaaaaagttaataaatatgtgttaattttaagttcatcaaaagccaatcactagggtgcattttcacattgaaaactcgctctttaggggtgtatttttaccgaaacttcgggtaaaatagcagaagcacgaagttaaaagctcaaaaaacccgaagttttcgaagccgaagtttcgcccagccctggtcccgactcttttctagaaatgttaaaatcaaaattcaagaaatcaaattgtcagaattgtatgaccaaatttttttttgaaacttgattcttttnttgggggttttacaatgaaataatagagaaatctccgcgccatcgaaatatcattgatatttgtctatataaggcanaatcggaagtttcgtctactaagccaaactttgggtattcttttttaaattntgaggctagtaaagaaaagttatggcttcggatgagaccaaaaattgaaaaattttgtcgtttttgcaaagttatgaataattaattatcagtggcaaaaattttcccattatttttcagcctgaaaatccgatttgagct

SEQ ID NO: 17601 - DNA, 2883 bp, Heterodera glycines
cagcaaagcgcggaaaatctcgaagtggaagagcgcgtgccaaaagagtcccgtcgcgagcagaattatgacacggaacaggtcaaaatgcacgaaaactttggcgaagaggacgagtcaagtgagtggcccttcctgatcgactcggttatgaatgagtccaattaaggacagcccgattacggttcgaatggaattgatccggaaggaacccacaaattacgggcattgaagttcttgaaatttgaattatcaataaatcagcaaaatttagttttttggttattttgttaagtaattttccaaaaaatgtcgaaatagtgaaaaatagtgacaaaacgccaaaaaagtgaattttcactattttagtgacgaagcgccaaaatagtgctttctagtgaccaataatgacggggccaggacgttttcgcgtggccgttttcgcgtgagggacgttttcgcgtggcccgttttcgcgtggggtacgttttagcgtgagtgcctattaggactgaaattggtcggatgtgtgtcgaacatacatttcgacctatttcgaatcccaaacccgatttcaaacaattttttgcttttatttactcaaaagcgtcctcatttttatgcttgcaaagattaacaacttcaagtattaacaacatgaatgagacacagaatccgaccatcggcatcacgacatttctttaatttttttcttttttccggggcggaggactcttcttttcacatacatatcctatagattaacccattggaaagtcttaactgttttgttcaattttttgccgtacaaaagtaatgccccaaacattttacgcacaaataactcaattttatatagaaaaaattctgtaataggggttggaaatttttttttaaattatgataaataagcctgccagaaagagagaaaacaattttataccaaattgcatttgggatggtgagtttacactaataccagcagagcattagaccgtgaaaaaattatttgactgtataataatttgtcagtcttaatttagtttataaaattcacttaaatatatattgaattaagcaccagaagtaaaacgggagtgaaaaaattttccaaactataaaaaagtaaaaaattcgcttatgtgcaaccacgcgaaactgccacgcgaaaacggccctcacgcgaaaacggccacgcgaaaacggccacgcgaaaatggccctcacgcgaaaatggccctcacgcgaaaatggccacgcgaaaacggccacgcgaaaacggccacgcgaaaatggccctcacgcgaaaatggccacgcgaaaacggccctcacgcgaaaacggccacgcgaaaacggccacgcgaaaatggccacgcgaaaacggctacgcgaaaatggccacgcgaaaacggccacgcgaaaacggccacgcgaaaacggccacgcgaaaacggccacgcgaaaatggccacgcgaaaatggccacgcgaaaacggccacgcgaaaacgtcctggcccgctaaaatcataaatttttatacaaaaagcaacaaaactatgccaaatcaatattgagataaataatttttaaaatcaaagatttgccaaaaaaacaaataaaaaagattttggagataaattttgagaaatttttcgtttcttagggttgcattttgaaaaatttcgggtcaattcttaggggtgtattttttgaaattttttatgtcgatttattttcgtttgtatgctgatgaaggttcgtttgagctttataatattttcaaatttttcatttgaaaaacccaaaatcctttcttttcaccattggtatccttatcgttggtaatttcagtgcggtttctgttttggcatcatttaattttaaaacattgcaccaaaattgaaaattttgtttttttagttattggcacttccttcggtgagcatgaaaatgttatttttaacaatttttgattgaattattatttttcatttctatcaatcccaaaagtcattgacaaatatggcatcgcccgtcaaaaagaagaaaaaacattcccccgccgaccatcgccccatttcttctgcagaaattggtgaacataaacagcaatcgatgggttcactggtgacatcatttggcaaacgacgaagtgttcgcgtggcaaagaaaatgaataaacgaattttgaggaaactttgagaatttatcgaattaaaaattttaaatcgctcaattattccacaatttcagaattaacaattcgcatgggcgccggactaaaaaccaaaactatctgtgcggattaatggcaatctgtgccatttccattgcccgatcgtccgtttccaaacaaaattcgctttaattaccttcggattgagtaattgaaaaattaattagaagcagttcatttaaatatgtagcactctgtgctcgcatttctccgctcaaataaacaaatttttgacaaaagaggcatcagtttttatttgtcggatgattcacacaaaaacaattttttgctggtttggatgttattggccgacaaatcttgcccatttttgcgccaaacattcgccgcttggacttttatgatggtggtctcgaccatttacttatcaattggccgtcaattctccaagcaaaacatcaattcaatcgaatctggtgatgattcgatcgttgtgtttggtgattttgaggcatcgcatcgaagaatttatcgaaaataattggtgcttataattggtttaatgcaacttctgctgctgattatgttttgaccaaagggttgcacactccgacaaaaaatggtcaaacgaagcaattgcattgcagagggagttcaagggcgtagccagaccctggctttggggg

SEQ ID NO: 17602 - DNA, 1232 bp, Heterodera glycines
cattggccatttccctctgttgtctacctgctaaaccttttctctgatggcacacaatgggttgtgaaatcctgatgctgttattcgagagtctcgactctagtcaaactttcagtctccaacagcatggaccaattggacgcccatgactcagcgagcgccaattaattatagctaattagcctaattcgctaaaattcaaatcggtcaaatgcccaaaatgtgcctgccctccattgattaaacaaattagtgaaaaagcaaatttttgtattaaattgagatggtagccattaatttgattgaccagaaataacttatgccattctaaagttggcgacgccaatatgcccctttcaacgcaattttgaatttagtgttgtcgaaaaggaatcaccggttggcggagtgtccggctccgcaacagttgcctcatttacgccactgccacccgcaccgcccgacgcgtcgcacgcgcgtcgccgcctgctgcgccaacaagcgcactcggcaagcgcggacaatttgctgatccggaccagcgatttgggcaccgccagggacgtgccgcgatcactgccgcttgctgcgccggaaccgcgcggcgtcggcggcggccatctgctcgacgaacaaagccttccggcaccgtcgcctggaaagacattaagttttgaagaacccgcacaggacactgatcttggtaaatagctaatcagcgaagcaaatcttgacaaggataaatacctaaaaagccaaatctttgtaaaaaaaataaagagccttggttttggcatcattaaaaataagaaaggacaattttccaaaattggatcatttttgaggaatttttattaaatcaaatattatttgttccgtgtttttactaaaatcttaaaaggcaaaatcaattattgacttttcttgaaattttttgaattttttttttgaaaaacttagtaactcaccataattttttttaaaaattaaaatttaacaaattaatcattttagctgatcagccgctaaaacgacagcaaatgccgcgccgtgacgtctcgccgcataggttgccgacaaaggagagcaccaaatccggcaccttcatcagccttggcgacaccggtgatcagcaacaacaacaatcgtcgcaacgtgatcggatgatggcacccgtgtcggacccacgcatacggcacatttggtcggaagccgttgagctgggcgaaatt

SEQ ID NO: 17603 - DNA, 1973 bp, Heterodera glycines
  unsure (1)..(1973): unsure at all n locations
aaaaaaaaaaaaaattttttttcctggcttaataaaatatatgagaaacttttcttttcttgcagatttcgttctttgcgtgcacaattgggaattgacgtatgatttttacaaacaaatttatttaattattatttatttttaaatgaacaaacaaaaaaatgaaaattttaacaagctttgaattacccatattttagcaacttaaacttgcgaacactagttataataaaaagttatttttaaaatcctaaagaatctacctaaaattcaaaaatgatcacatttgatctacataaaatatctttaatagattttcctcctattttttcaaattttatccgggtctatattttatcaaatttttcagtttttagcatttatgctttttttatttttttattttaaaaaattaaaaaaaatgattaaaagaaaaaaaatttaaaaatttttttctttaaaaaaaagaaaagaaaaagctcttaggtacatgtttatgcatttttaagcaccataaatcctagccctggacttttatatacaaatataataagctgatttatctgaacatatctcgccactttttcttatcatttaatcaatttgatgatttttttgatcagtcattgaatgtgaaagtcaataattctaaaaaatgtcttttatcataatttttttttacagaaaatttcatccgaaacgttgtcccaataccatgtcaaaggtcacatggaccattttgatcagcccgccatttgctacccgcgctatcgtggcccatccacgcgcaatcggttgcccacagggctgaaactgatcagacgggtgggcgaaaagctgatcaaggagaactacccgagcacggaagagtgagcataaattagggcaattatatctgccatattagtttttaataacaaattgagagtaacaacgtaacaacattttaaatgatttttttgaatcttttcgttggatcattcgttatcccatcttttccaacttggcattctgcttttatatctattattggactaattaatagatctaattttcctaacttttatattgttttgagcaaatgatttgagtacgtttcgctcggagctccattttccacttttctgctaattaatagggatgcgatttttaggttttggctacttcgtcactaaaatagttaaaaatcactattttggcgtatcgtcactattttttcactatttcgacattttttggaaaattccttaacaaaaatgcaataaaaccaaaaaatacacccctaagaatcgacctaaaaaaatttcaaaaaaatacacccctaagaatcgagctaaaatttttcaaaatatactcctatgaaatgaaaaaaaattttctcaaaaatttactttcttggcaaaaatttttaattttaaaaatttttttaggtaactattttgggttttttggtcttaaaaatcccagtcctactcatttgcaactgcaatcagtgaataaaaattatttttgctcaatttttggctgaaaatttgtcactattcgtcactatttcggactttttgtcactatttcttcactattttggcatttttactcactattttagttaacctcgattcaattccttttggcataaattacacagattttgtctaaagaattaccaaatttattgatttatgctaattttttaagaaaaaataggttttttgggggccggtggtgccgataggcgccgccgggggaaattttttaatgaattttgttagaaattagtcaaatttttcataaatttcattcttttggatgaaaatacgccctaaaatcagggacatttcttagaaataagcacataaagaaaccctggattaatcagataaaaataaattcaaatgaaaacgtcaaccggtggcgactccaaaaagaaatactggtgggggtgaagcactaaccactannacacaantata

SEQ ID NO: 17604 - DNA, 1764 bp, Heterodera glycines
cgagacagttaggtgtgtgctagtgccaaattagcgcatcttcaaaatttaaacaatatgcaaaaaaaccttaactaaaaaaaccaatcggaacattcggtacactctcctgttctgtggtgcacacaaacattttccatttcgaagtttaaaaaaaaagacgattacatcttaaactcttgcatttatttcactaaaattttttgcttgtatttactactagtagttatgtacgtggcaggaaactaatgagattttgctcgaatatgagccgggtcgtttttcgagtcaaaaaatttccacatcattctcaattccgaacacaccccattttgattggtcatgattattagcaacaataattgtgcagcgaaattcttcttgccgctttttcattattttatcccccataacacacaggcggatgacaccgtggtgattgacattggcactggcaaagtgacggactacgtgaagtttgatgctggcaacatttgcatgatcactggtggacacaacattggccgtgtgggcattgtcggacatcgcgagcgtcacccgggctcctttgacattgtgcacatcaaagacgccgctggccactcattcgctacacggttcgttcgttcattgttttttgggtttagttggttgtaaaacacttcatgaccaccacttttgggtcccaagcgtttacccgacattaattgttaactgtcatttcatttattttttttgtgaattttactcagtttccgcaaattttggtcgcgtataacggaaataggcatcaatttgtgtagcaaattatgtgaggcatagaaaattgggtggaaatttcttcattttcgaaaatatttaattgtttggattatattccaatccctttaaattcggaaaatcttgtcttaccagcaatcaggccccctatttccaaaataatttttttcttttctgtccaggatgaccaacgttttcatcattggcaagggtgcaactccgttgatcagtttgcccgcttccaagggcatccgtttgtccattgcggaggagcgtgaccgccgtcttgcgcagaagcagaaagtttgagcctgatcccgaagaacccatttttttgtcgtggatgttattgttttgtttgttggcataaagaaaaagagtgttgctattttcacagagcccccaattaagggaggaaggcccgaaaatgatgaacattttttttgttacttttctgcacaaattagtgtggggggagggggggggggaatgcataatgcataacgcgtaaataatttgctaacattttctatacgaccaatttgccaccgaccaattgccgcacaattttattatttgaattattaattttcgcttttagttttacaacaatttaattttttattaattttttttagagcgcgaaaatatatgagattaaatgaatgcgctttttacgtttcttgaacattttgaacgaaaaagatagcgcaatgtttgctcatgtagaccaaattgcgcaacaaagtgtgttcacaagaaaatttattgcatggtacattcgacaaaaaaggaaaaaaccaatttaaattcaatttttggtattctttgtcaatgaattttaaaaattattatttttaaaaaaatatttttaaaaaaaaaagttttataaaaatataaaaagcccctgattttaaaaaagaacccatgggaggattaccgaaaattgaaaacaaaactaaatttttaaaggaacccaagcgc

SEQ ID NO: 17605 - DNA, 3428 bp, Heterodera glycines
tgcgccggcttgtgaccattgacggacacctgctcaaggcggtgacaatgttgtgccaataaatttctgcggttcaaatggataaaaaagtgccaaataattaaaaatgattctttataatcaattcagatattcgagaacccgacagcaattttgtcgagaacgattcctggacgagaatggaaagctaaagcgagtgaatgaattgatcccattctcagttggaaaatggtaacttttggtggattgtaatatatttaataaatttatagttttttaaactattttaaacttttcttatttagaaattaaaaaccactttagaaacaaattacacgaccctaaacctcgcttattgttttttataaaagtcaataggccgtaccatgattaaattgttttacatgatgaaagttagtaaaagtggccaatttagttttccctaattacgcatccaactggcacatcgttttcttgatcaaatacatttttttcggctttttaaacaattttttaaataataattaaaactgattaatttttattggcttcccccgtcaccactgtttcgccgtcatttttgcgcttgtgtcgcatttgccgactgacggccatttgtcatgccgcagtctcagccgtccgtagttgtcactgattacctcatcaaatggcacggaaatgtttttataaattggggcaaatttgtgccaattgttaatggtggaaaattgaccaaatatgtacatacgtaagtacaaaagggggattaaaagtttgatgccaattcggcgttatatgaacttaaccggggcaattactcattagtgatccatttattccttttcattttagttagtttttcttttctaatttaaaaaatgatcattatattatttttcaaatgggataaattattaattaagttttattttgcttaaccactttccatgaaattattcaatgtgaaaaactgaataacattgtttttatgaaaatttaaattttccaacaatcttaaactatgaacgcataattatttgggaccatttgaacccacgcgatggaaagtgccaaaatatactactcctaagttataaaaaaccaaatcataaaaaattggaaattaaataattctacaattttctctttttagcttagaatgactagcttcattcctcccgaacttttattcgaaatttttcaatttacgacgtccgttaacaacaaaaatttggttcgcttacgatccatttattacagaatgatcggcacagttgactacaaaaaaatggcaatgttatgcagttttttccaaggaattgtcaactcgtattttgcaaagcggaaatggattgtcgattttattgaaattcgttgcaatgaaaaagagggcaaaaaggagtttgaacttgcggaaaccagaagcaataaaacgattgaattgccgaaacatctgccagacaaaattcgtggttttgtatgcatctcgataacgtaaagaatataaaattgtattgattttaacattttgtaacatattacaggtttcttgaccaaaaagccattgaatttctgcgccattttcaccgacttttcggcacgtgccaaataaagttgagtattggaacaagcagcattttggcaattggattcttttattgtttcttatggccaagaatcaaaaaccaaatatcattcattgaatttcgggatgaccaagcgttcagccgaatgcgagacattgcaccgtccatattcagtgaattgccttctctccgtatttttgagtcattggaagatccattccccgcgtttcctgccatcgacagtaccaatgcggtaaatggacagctattggcacattggctgatcaaggcgcttccgaatgaaatccctaaaattgttcgttgttcaattgaggaacccgacacggcgggtgatttgccagcaaaaattggcgcaattaaatcggtatataaaaaattgaaattatttatgtttgtaactaactgttaatccctttaggcattttcaaaatcttctttttctgccaatttcataatccaaatgacgatacctgatgaaacaatcattgcaccattcgatgtgttcaacaaaaaaactggaagacgtctgttgctggatgattcccacgatcaaaatctgctgctaatttcatgcccaattaaacgggacaaaaaagcatggacgaaatggagggaagaggctcttcaaggaagtgagatttacacgtggaatttaattgatctcaccgcgggggacgctgacattggcgaatggtgaaaaatcattttgtcaatgcataaatttttatttttaggaattcggcacaattccccgatttaatggcgaatatgcaaaagtgaaaggatggataaaaataattggagatttttatgatctattttttacatttcatttatcatttgatttttaaaaaatatattctgaaattgaattccttttctgaagtttaggcaattacatttctctaggacttttttcatgaaaatcatataaaatggtcacgaaaatttaaatatttcctatttaatacaaaattatgtcgataattcaaattcccggtttattaacatcttaattaaataaattcaaaactaacaaaatgaatattaattcttattcagtaagaacatttgccattgatctgtcgtccgtaatcatctataattagaacaaattccaatgatgttcggcttgccaaatgggctcgattctctttcccatttggcccatttttgctcatcacgcgcaattggacaacggaccagcaaaaaatgtttgatatgtttgatgccattctttttcaatgtaaaacgttcccccgtctttctattgatcatttcaaatggcacaatataactaacatctctccatggaggaaacctaatagcaatgatgaaattcacgggagaagaagcattggcaaaagcctaaacggaaaaaaggttaaattagcaattaactattaggtggaacgcggacagaaaaattaagtgttttcttaataaattcgggataattaaattttatagctttctgagccaatttttagtcgatgacaattaatttatacgcaaaaattgatatgttccgttccaccctattttctgttactatcaccgatttaatgcttataattttcggcctccattggtgttctcgaatttgactgcacacaatcaactttggaattccatcagaacgtggcgtcaaaagccaactgaccagagcttgttcaatcgaagttttggcactttcatcggttgaaaaacggggaaagtgccgataagaatagaacaaacgaagagtttggcactcgttgagaatggaagtgacaaattgtcgtatctgatgagactgtttgttttcaatgtggaaataga

SEQ ID NO: 17606 - DNA, 2574 bp, Heterodera glycines
  unsure (1)..(2574): unsure at all n locations
tgtgtatataattattttggcaataaaaaaaagagataaaatggtgacaaataattgncattgttatgcaattttttaattatttatgaaaagcaattcgatagttcaacattatggacctaggattccatgttggtcctgattttttagacaaaaaacccnaggtccagggtaagtctgggttaccgaaaaaccgaaattctgatttgtaaaaacggtttttcaatgaacatcgtttagagcaattcccgaatttgttcgggttccaatcccgaatgccatgcctggacctgagttttcctgacaaaaatcaaggaaaatgcattttattatgatttactagttttttcaaaaaaattttaaaaaaatcgctgaaaatttttgaaatttttttttacttttttaataaaaattttgtaagtttttttataaagataatataagatcaaataattttttaaatgtttagcaaaaatttatttattataaataaatttcaaaaaacaaaaaacaattcatttctcatttttatcatttaaattgttgtccatttcgctttcctcctcctccttcttcacctcctccattcggcgccgatttcgctcctaaaatattgggggatggcatttttttttgaattatttttttgtggcattttttcttcccccgtcacctctctgctgtatttgcgcgttttgacattgcccaccagtgcgggcgtaaggccaactcgacgagcgtgacgaatagctaattttgaggaaaaaaaacaaattaagacaattgtaagcaaaatcagtggcataaatttttgaaagattttcaaaaaaaaaatgtaaaagattcccccccccccctcaaaaaatgataatggtttttaaaaacccaaaaattatattttcctgcggaaattttcgctgtttttaatgcttgtcagagataaatttatataggtacataaattaaaatacaattttttcggagcaatgccaaagtccggaaatttatcaagacttggcccagaagtgactcgagatttattaaatattttgctggcactttttcccgcatatttttccattttaatttaatttaattatttctaattttttacccatttgctgttgttgttgttttttttgttgcccattttcactgacggaaatcgcattagcaccagtaacaacgtaagaagcagcttcgcccgatggattttgtttctgtttttcgttgagcaacatgtccgaaaagtgttccaatttcttaaaaatggaaaaaataattaaatttacatttaaataaattaaataattaatgtgcctccagcatttgggcgcgcagcttccgcttttccatgtacagctcttgcgaaaagggcaactgctcagggtcaatttggtccgaatttgggcggtactcaaaactctgtgaaaaaatgggagaattttgtatcaaaatttgagtgaaaaaattccaccggcggttacggtaatcgtaatttaaaccactcccccgccaactacaaaaattaaaaatcgtaaaatcctaaaaatttatggggaaaaaatgagcaggactcaaaaacttaataaatctttaattgaaaatgataataagacttgtttttgtacagtaaacaggcaaatatatacagtatacgtataccgatcaaccgtaacccgtaattgcgggacgaaaacaactaccgtaagctcacggccccaatggtgggcggccatcgcccaactcatgcggcccgtgtacacctcgcgcaaaatgttggccaccaaccagcacgggatgttgcggctgacatcgctgaaacaggcagccaaatttaaattcaaaaatggttaaaaaatgccgaaatatttaaaattaattattttccaaccgtaaataattaaatttaattattattattatttaaaataataataattatgtctatggcaataaccaaatgtgctggtcaagcggcagtcgatagcacgggagctgttccgccagcgccgctttgctgcaacaaaattggatggaaatggttcattaatacggtatcacgaatatacagtaacccacacgatgcgattagttacagtaggtctcctaatacaatgaaccacagagtttactgtgttcagacaggcccgtatttagaaaaaaaaaattcggggagggcacctggagttttttttttgttgcacttcgagccaaaccaatttttttcttcggtattatttttctaaattttgggcgccgaggcgaaaaacaggaatttctcgctgtattgtgcccaaaaaatgaccattttttgccattttggggcttaattaaatttatcaaaattttgttttttttgtacgtcggcaacagccatttctgctcccagtcatcaaatgggagcagtacaaaggcacggaattggccaagattttcaggcaaatagtcaattgcgcgttggctgacatagacaatttggtctgaaagttgggatgaaaaaaaaattaatgtgtgcgttaatcaatttggaaaagtttttatttccatttttaaaaattataataccaaaaa

SEQ ID NO: 17607 - DNA, 963 bp, Heterodera glycines
aatagagcatgtgaggagctttcgaatgataccaagattgttagatttggtcagcaaagaaaaaagttataataaaaaaactgaggctggcgccaaaacgtcggcgccaaaacgacccagtcccatttgctgcctatgttcaaaatcggattcaaattaaaaaattttcaagcccagattaaaaataagaaaacaattaggagcattaattatgttgtttgaataattggatgcttttttaaaaagtttctaattaaagtttgaacccaatttttgacataggcgtaaatgtggggtaaccatttatgtaatgggttttgatgtgtgtaaattttccttttggatttaatttgaatttcgctggtctattggacatgccaaaatgtcccatttggcggtgccgagtcgtaaaagcatcacaaaggttgggttgtgtgtgctgtgcagcagcaggcggaccgaccgccgacacaccgaacggagtcaatttgcaaatttgcgttaattgggcagggggggggtgaaggagagggagtgatcgattggactccctttggcaattttatgattattctctaaatagcaatgggttacggtagcatcggaaaacggtgtccaatccgatgggacccaacaaaaaatgtactttttgatacgactttctaaaagtgtgctatttattaccgtatttggctgttgtattactcatttgccatattttttttcttattaatttgcacctttcttcagttgcggctccttctcctcctcatcctcttcctcctcttccctttcccctttctcttcctctttttccccttcctcttccttttccttttcctcttccctttcccctttcttttcctccttttcctcttttccatttttctcctctttctctttctcttccttttctctctttgaatttgtcttcttcctccgttccttctcccatattttgtg

SEQ ID NO: 17608 - DNA, 1506 bp, Heterodera glycines
ctaaaatattcataaaattctttaaattttgaagtgaattttggccagttgaatttttggcaatttttgtgttaatttttgccataaaaagtcatttcaaatccgtttaaaaggcactttttgtgaatgttcgggagaaacaatcgctttggaatgttgacaaaaagcaaaacgcaaattttgcatttccccaaaaaatcgcatgaccaaattttgcgtgcaaaaaaattctgattttaggccacatttttgttgcgtcgtcgcccaaactgactgaacgtgtttaacccaaaactgggcggactttaaacacttcgcggccgacttttggttgttgccataattaatgggcgggagagaaaaaagggggaaaggcgggggggggaggggatgcacaaattacgcaggggggtcaatagtcgagaagattttgggtgacgggagtgaagatcatcggaggagggggggaggcaattgtaccaaatccaaatattttggtagtaattacgaaatttgcaaaaattaattggggaggcaattgataatacacacgcaaaagtaatgatggttattaacactaattgaaaactgaaaagaaaagaaaaagaaaagaaaagatttttacgaaaataaaatgaaaataaaaagagacaaattaagaagaaaaaaagaaaatattaaggaataaacactaattaagagctgattgattgtatctgaaacaaaataaagcaatcaaaacaaattcccaataaaatccaaataaattatccaaataaatccaaataaattatccaaataaatccaaataaattatccaaataaatccaaataaatgtcctttggcgaatgtttcccctcaatttgtgccttcctcctacagtattcgttacgctttttcctcggaggaatttaacacggcaaaatttgacgggagagggcaaataaaaaaggggagggcgggcatttttgacacatttgggggggggggggcacaacagacacaaaacaatggacgaaatgagggggaaggcggagtttggaggaggaagagagacattggaattgagggaacaatcggcggagaatggaatttggggataagggagaagagcagaaagaagagggataaaaagggggtaaaagagtaaaagagagagggaaagagaggagaaaagacaaattaaagaagagagagagagggggggggggggggataaaagagtaaaagagagagggaaatgagaaaaaaggataaatcgtagtggaaatgatggcaatttaatgccaaactaatcaatgatctatcgacacttattctgaccgatttaattgtttgctcatttaataattttatttaaatatggcaaaacaaaaattgagcaaaaataatgtccaaaatgtgcggtcaaaaattgactcgttgaaagggttcacccaaataaacaacactcgcagaaagagcacaaaaatcggcaaaacacccaaacatcgtccattataaag

SEQ ID NO: 17609 - DNA, 3202 bp, Heterodera glycines
ccaccgtgcagagaaaagcctagtactatctcgtcgtttccctttttctttataatttctctcactttggcgtactatctcttcattttaattatgtaaaaaacaacatttacttgtctccatataactttttttctatgcatacaattaacaccaaatttagcaatagatagagaaaaatattttgaacatttttaacgctcaaattttaattttttacgctcggtgcttaagttatagtgtgatgaaaattttgcatttctttttctctcgttttggcgtactatttacatgtctctaacacataaaaaacatgaaactcaaattctaacaattttggtttataggctacaagatcaccttggacatatagaataaatagagtgccacgggaccgggaatttttgccaaaaccgggaccgggacttgccgggacctgagaagccgggaccgggacctcgattttttttcgggaccgggacccaagaaaaaccgggaaccgggaccaaccgggaaattttaaaaattcaaaaaaattttaaaaatttaaaaaaaattcaaattttaatttatatcaagtgaaaataatacaaaattatttggttttttatttaataaattaaattaatgaaaattttcaaacaaattttcttcaattatttcaaacaattaatcatttttggactaaatcatcgaatattaatagaaattcagatttgattttcacatcacttttttcggagcgctttttcaaaaaacttttgggaaagaaggggtccggcggtgccgataggcgccgccgggggaaattttaaaaatttgggtgcaatttgttaacagattttcaacaaaaaaggttggtttttgggattaataggctcaacaatttactatggattttcatttaaaaaatgataaaatatgtatcaatttaaaaaaaactatgaggaatcatattttctttataggaaacccacgagtatacataaagaaaattcaaaataatctaatttctgtagagggattgaacaaggggaaagaagaagggaaagtcaaggagactagccattaggccatttgcacacttggcagtgttacttttaaagaatatattaatttttattttttatttttccctttgactcaaatcttcttcactaatttttcactcagacccccattcttaccagtgcttgtttttcccggttcccggttgccttaccgggaccgggacctgagcttttcaaaatccgggaccgggacctcggacgatcgggaattcccggcccggtcccgtggcactctggtttccaccaccgttcgttccttgcttaaaaactatttttgtaaattaaaagaaatcaaatttgtgtcccatatcaaacaaaaacaattttctaatttaaattaaaaacaaataaattttttaccagtttaaaaaaacaaatttaaattcttctcaagtaaaaactaatatatttaaaaacattttaaataaacataataatattcttatatttagattacctaaaaattctcatttttaatcacatttcgttagcacaattacaaatttaaaaatgtttcaatgctgtttagagtaaatatttttctcactctcaaagatttataattatttttcggaatttcttcgccaaaattcaaattttgccctaaaagtgaaaaaaagtcataaaaaggtcaaaaatgcaaaaaaaaaaaaagaggaaaaaacttggacattttgccaaggttttgatgccataaaggctaattttgtaataaaaaaaattcaaattttttcaaaaaatcgccaaaatatgtgtcaaaaacagtcaaacccccaaaatatgtttatatgaacaaaaaatccaaaatatgttttttagttcctaaaaactcgctctgattgcaaataaaactggtaaaaatgcctttcatgcgttagcatattctcaaataaatatgttaaaacataaaaatccaagcctgtatcctgtatatctatattaaaataacagtaagtgatatctatgaattttaaggcatgttcaaatatttaatgtcatcatttaattttttaccatttgtcaaatttatgaagctaaacaaacaccgccaaaaagcgcaatttaattatttaagaaataagggttgtaatttcataaaattaacagctgctgcattttcatttcttattcaaattaataattaaattttaaggtgaacgaacatgactttttcaaccaatttcatcattgtccttggcaccctcgtccacttaagaaaaaagatattcggcaattatttaaaaaatgaactattctggagtcggagccctcactgttccattccaaagttgacaagcgtcttgttgtatatggacgttgatgagcttgatatggcgtcaaagttggtaaaatcgcagaaaatttgcaattcatttcaggaaggttgccgtccggaccaacaaaaatactccaaataatccgaaatcacgtcgtcattaagccaattgtcaggctgttcattttttatttgaaaataatttataaggaattttcttgtacctttaagcatatgcgggtgtcgttgagtattccgttgcgtacccaccatttatctttgtagcatttacaatgaagttcttcattttgcaaaaaaagaaggcttcgctagcattagggatgtgcgagaagtgatttttgccgggaaccgagaccgagaattgaccccgggaaacgatacgagaaccgagacccaaaaaacccgagaaatttctcgactcggcaatcgagaacttttacgagatacgtcgggtttttcctttgcaccagttcgttgaatgataagcagccctaaaaattctaaccagaaaatcataattgttttcaaattcgtttttagacacctttttgtattttaaagtgttgatgttacatggaaatttaatgggctttattacactcaatggcacattaactattgtggttttttttttgaaacgtaggataaataatgatttatccttattttattgttttttgcaacgattgtttttcgcgttaatttaaaatatttttgatccttcattttaattttcctttttattgttgtcttagtgttctctcaagttttttatatattttgtgcttttctaaaagagtaataaaactacaaaatttggtgcttttccccgtgg

SEQ ID NO: 17610 - DNA, 2986 bp, Heterodera glycines
gaagaagatcgtctacttaaagctgttgcaaagtatgctcactttggctttcatttggcaactcatttcactgcgccaattctgcgggacttttgccgacccaaaagtcaattcatttaaatttcacaaataatcaaaatgccgtgattttcaggccttcctccatgacatctctgttggccattgcaaacgctttacactcatcggaaaggactcaaaaagcggcgaattcgacgccgtgttcgaccaggacaaatggcacaatcagctgttgatgagcagcaccaatggacgaccaaccgaagaacagcaacaccaattcatggacgaattggccgcgaaattgcctcccgctggacgactttgtattccgatatcggtcagtcagaaaaacgaataaattgatcaaattaacttttgtttgtttttgtttttttcagatttcgcctgctgactggttttttgacgtgattggcatgcacaaaaaccccctcaaaaaactcactttcttctatttttccgaccaactgttcgtcgcattgtgctcgttttacgtctgttacgccgaattaatagattttctgctattctctggggaagaatatgaagtgagcgagcgtaacacgtggccacaacaaattcaacccgacaaaatcgcgtcaaaaattgcttttcagtcgaaatccgatggatttgtttgtggatcaaattgaaattcatttgctggttttgtcgtgtgagtttctttgttcgcgaagtgttcaaaaagcatttaccattgcgtcgcttaatctgtttttgcttgttagatcactgtcaattgggttgccttcgcttctatcttctgctggtgttgctgtgctgagtactccttcagattgctgctccattggacggacttttggacttgcgtcaacttccaagcggatcacacaaatgtgccgttgatcaatttcgtgagtttttttgccatttggttctccctttgccaattttaaacttttttaaggtgttcagcatcagcatggtgtgtttgtacgtcttcgagatttttcttcaagatgcggaatgatgtcgccacggaatgtgccatcgagtgaacataagcagagacgaatggaacgatgctgatgccaacaaaacataaccaatgcgatgaaacaataatgtgatggatgatatatgatatatcagattacctatatgttcataaactgttgtattccattatataagtagatgtatatgttatgcatggttgtataaactcactcagtattttgctgaccaattagttttggagggaatcgccacattttgggtttcacacttttcatatggcttttaattgtgatatttcagttttttattcacaataaagacataataaaacccaagaattgatggtactagtgcagttggtacgaatgcgaaattcgacttttgctcgaacccgggttaagggttcgaaattaatgtcagattcggcttcatcgacccttaaaagcccataccggtggaccccttcacaaaattggccactgacacacccactttttatgtatgaaaatattagcaaagccctaatttatttatttgtgaatgaacgaaaatcaaatacaacaacatttaaataacaatgcccaacatttagatcaaataatctcataagccaatcatcaaattcattttttaatgtttctgatcagtgatcacacctggccccgggcaaatcgccgagaagactgaaagaaaaacaattttaaaatgagaaaattagcagattttttacattatctattttcacttattgtcgattgcgtcgtctccgatgaaaatgccaattttgttgttcttttgtcctccgaccaattcattcatttccttcatccattttcccttaccacctgctgcaattgaacaacggataagcttaaaaacgttgacatattcttgtgacagtgtcaatttctcttgggtaaattcgttggtcagttcgaatggcacaacggaagaaagagaagaggacgacagaaagccaacaaaaatgacaaaggaaacaggagaagaagcattggaaaatgcctaaaaagtgaagaaaacaatttaaaaacgaacgaattaaatttgacaaatcaccgctttgatttgtccctttaatgtcgaccattggttcacagctaaattctcaatgctaagcatcttcggcaaattgtcgggattaggcgagaacagccatttggccaccgcttggccatccgacgcattggcactgtcgtcgggcggaaattcgggcaaaatgccgtcatcaaaagcaacaacacgaagggacggacaaaagttgagcattgacggggcaaattggcggttttgacgaaaagtgatggggttgaaaatcatcacatgaattatgtccttgaacattggccaaatggtgaacacaaagaactcagaaattcgaatattttcagtggtaatgtgaatttttgtttcacatttggtgaaaaaacggcgaaggaaagtgagcacattgtggtcgaagaagctgaaaatcaaaaaaattgccagaaaacatttacaaattcaattcatttttcacttgatcaaaatgcttctgaatccgatgaatttgttcggcaacggattttgtgggattggcaatgcttttccattggcattgataatttccatttcctttgcgccattgtctccgattttgcttcgaatttacaatttgtccaatttccatttgcgggttttgaaatgttcatcaacgaaatagtcaaatcggtgactgatcagcgcaatttcgaggcaaagctgaaagggcgacagaaaatcgaacactttgagccaacaatcgacagagatgaagctgaaaacgaaaaagcaaaatgatttcatggaaattgaaatttagattaattatttacatcgctttttccatttctttctttgcttctttcggattgtgcgagattttttt

SEQ ID NO: 17611 - DNA, 2412 bp, Heterodera glycines
tctttcttatttgtcgcgtgggttcaattcgccataagaatatgagatttttcacattttctttaaattattttaattgaaatttaattagtaagaaaatttatctaactttagaaattatttttcttttttttaaaaacaaccgtaaacccactaattaaccaattatagttctttttttgtacaaatctgttacaaatttcaataaaaatttcaatttttttcccggcggcgcctatcggcaccgcctgaccccctccctgtgccagaaaagattttgtaaaaggcgcgccgcaaaaaaaaatttaataaaaaacatcttctaaataagttgaaaacatagaaaaattctctaagaatattttggaattttaaaaataatagacaattttaatgaaaattattacatgcaaaaaaattttctaggaattgttttgattattttaattaattaaaaataatattttctaatatcaaaaaatttttgtttattttttaaaacagacatagacccaataattaaccaatgattgggcattttttggaaaaggtgcgccataaaaaagcgattttttaaaagcaaaaaaaaaaagaaaagtttttcaatttgtgaaaattctttattttttcgtcataatctttggaattttaaaattattagacaattttaacgaaaattattgaattataaaaaaattttctacaaattttagaactcaaaaaataaccaatttttccggcaccattgaaaatattggtaccggtttattttttaaacaaatcaatcccgaaaattcaatttattaaattttaagttattttttgcccaaaataaaagcaatatttaatcatttaaatcgaaacaatttttaaaaatgtttaaaatataatattttcatttaaaaataattgaagaaaaaattttagaaaaaaattaaattttttcgtaaaaaaaatttcccgttcccggcgggattcccgttaaaattgacgggatttttacgggaacgggaaaaaggcgggaatcccgttaaaattgacgggatttttacgggaacgggaaaaaggcgggaatcccgttaaaattgacgggatttttacgggaacgggaaaaaggcgggaatccagttaaaaatgacgggatttttacgggaacgggaaaaaggcgggattcccgttaaaattgacgggatttttacgggaacgggaaaaaaggccgggattccccttcggggaattccccccccctttttttttcgtttcccgttcccggaaaaaaattttttaccgggctctacctaaaacctacctattttggcagtttttagcacctataaatatcatccctacttttaagttggtaatattcaaaaatgtttattaaaaatttgatccaaaagttgtgccgttttccgtcattaccgtaccaattttgcctaattattcgttaatttatcacatttttgtaccattgtgcccttctttggaggccaaatggagtgcattgagcccattggaattgctcgtgttgatgtcgatgccgccgcgcagaaactcgagcacttggtcaatgttgccggcacgcgctgcgcgcaaaaacaccgcattctgatcattggcctttgtcggcgccttaattggaaatttgcattgcaaattaatgggtcataagataaacattttcttcaaaatggtatatatcagtgaaagcgatgaggtcatcaaaaattttggcaatcggattacgagtcaaaaatgtcggaatcggcaatcggcatgccgacacatccctggtatatatatatctctattaaattctatatttagtgtttcccattttttatggctggtcttctttgcatatttagacacgtccgtaattagctaattagtgctcgacacaatcggtccctaatgattgcctaatgacccctggcggtacaccttttgtgctggctgttgttgctgctgttggtgttcttcgtctaattgctgttgatcatcattttgtcgatgttgttgttggtcgtcctggtgatgttgctgtgtactggttgatgtgcttggatcaacaacggtcattctgctgacacttggagttttttgtttgtttgtgtgatcaaatcgacgatggacggacgattaatcgtcacaaattaattgattaatttgttccacttcaattttagagcaattatctttattatgggaaaaagcataaaaattgcataataatgaattaacaaaaaatgaatgcgaggaatgtaaaaaaattgaaattatttaaaaaattaattaatcataaattatgggcactgataaaaatttaaaagatttccattcttatcattttttaaaagagccgtggagtcaggtatgataaaaagctctaatccccgttacagcccaaaa

SEQ ID NO: 17612 - DNA, 1887 bp, Heterodera glycines
acttcatccattcgagtcacttcgtcaagcagtgccattctcacctgagaaagggtaaaaggggcgacagggcagaagaattaccgccttcagcagatcagtttccgacacaaaatacaattgcttacagctgaaagagaaattgtgaagggaaaggcgaaagaagtgatcagacaaaggaaaggacagaccgatcgggaaaacgttcgcagtcgatcacatcgacgtggggacgcaccgattgggtgctcttttgctgctcagtgtccaaagaaatgaaattcccttcaatgggaggggtcgagtccgttccttcttttcgtccttctctctctctctcttcccttttcttctattctctcgtccttctctctctctctctctcttcccttttcttctattctctcgtccttctctctctctctcttcccttttcttctattctctcgtccttctctctctctctcttcccttttcttctattctctcgtccttctctctctctctcttcccttttcttctattctctcgtccttctctctctctctcttcccttttcttctattctctccgttctactcactctttccttccccactctttgtctgcccgatctcttacctggctgcactctctgcatcgcttcgtccagagtgacggctccctgaaatctgtccaaaaattgttccctttccgtttcattctcttactgctccatgaagatggactgttggtcgtccctcttgaacatggccacataagggaattttttgattcctaaatttaggagaaattaatcgttggagaatggggggaaaatggcagagggagaggggggagaggggggggggggcactcgttgagaaagcaattccgacgcccaaaaaattgggaatcggaattccgagcctaaaagtgtcggaaaacggaaatccatcgtatcccttctctggtgcaaatgcttaatacgccctctccctcactcggccttttcctctgttttggtgctaatgagtccctgccgattaatcaattattacccaacattggcaccagcggtgaatttgacaacgtccgtctcactccgatttgtttccgattctgccaaaggtcgagaattgactaaaatgcgaatgagcaaaagccggtgcttttgtcctcacttggacaccaacagcgtcaaattgttcaaagattatgagtaaaaagttggcggacgggaaaatgccatgccaaaggtcctcaaaacgagtgtttctgaacttagtgaaagagatgtaaaaccatcaaatggtcctccaactgacacagtcacttccaaatgccgaaaattgggccaattcgaatagccaaatcggttgtattcattgagaagctaaatgtttcatcatttttgtattatattaaccgtcccatttctccctccgtctcactttcgctgccaattggtccctaagatttgtgccggaatgcgcggattccatcaaaatgccatcgctgacggaattggcagaccgaggaaaatattttatcatcggaaaataggcaaccgaattggaacgacaaatttgaccattgaaattgtcggcacaattcacggcgccaacctaatgaaagtgagggagaaatttgatcgggaaatggaccaatggccttctgatcaggccttacttaatctcaattctcacctgtacgatatcgctccatcgctttaccaacgaagcgaattggcgatagaatggagcaaaagcacggcaatgaccgcacctgaaaaaggggaaaagcctaagaaaagggaatccatcaaatgaccgaccaatccgcgtaaaactccacaacaattgcgttgtcccggccaggctcaaaaacggtgtctgcaaaagtgct

SEQ ID NO: 17613 - DNA, 758 bp, Heterodera glycines
  unsure (1)..(758): unsure at all n locations
gtgggcggtgtttttttaggatttgtgaaaaagggacagaaattgctgttttaagcagaggtgaatgagttcagttcggtggtttggtgtaaatgnagcggagggaggggcggggggggggatttgcccccggagggatttggcaaaagtcactcttctgttcattctgatttgtggtcattgaagggaatgtgtggacgaagtcgcctttgctttctcaagaggaagcaaaccaaaaacaagaaaaaaaattcaatttaatctccaaaaatacgaatggattttcggactcatcgaaaggcatgggacattaagaagagaactgctgacaatgagccgactgatgcggacaccggtgagagagggaggccagcaggaaaaggggcatttgtgatgagagatgaccgacggaagagggatggcttttctcctcgggaatgcgacagattgagagagatgggagatgagggccgtctgtgcaaatcgtccattttcactcatttatcctctcaccacacctggcgaatgcgcaaaatcggagcgatgtttggcggggatttcccgttttatttactaagatttataggaagaacagagaaaaagggacggaaaaagtgctcaactcattggaagtgacagaagaaaaagctaaatgagttttgactgataatgccgtaaatatttatcaaagtatttgtaaaaaattatattaataaatatttcggtgaaaagtttatttttcttcgaatgaccacggc

SEQ ID NO: 17614 - DNA, 2088 bp, Heterodera glycines
atttttgtgtatttaaaaaacctattttgcgattttttgtgcctaagaaagggaatttggaagtgggtcttggcgcccagttggcggcgcccagttgagctggcgcccagtcggcggcgcccagtcgacccccaccgaagaaaggagctcaaaaaacgcatttctgtgttaaattttttcattctgaagtcactatcggtcactagaaatcagtattttgcctattttcgcttagttcttatgaaatttgcaaaaacggcgcattctataacgacatcaataacattcacctcccccaaaatgatcacaattatgccaatgccaatgtgaatcccgaaaacattatcaattttctcactggtgtttcccgaaactatgaaatgcgaccttagtttgttctgaaatttgttattttttgttatatttttataaaattttaaatattttttccgtttgacgcacatccgaccaaactgacaaattactgtagaagatattagccgcaagaaataaaaaaattaaaaagttaagaaacttgtccgaatgcgggttcggattcgaaacatggatgttttgcacaaatccgaccaatttcagtcctgaacagctactcacgcgaaaacggccccgaccgattcttagggggtctaaaaattttagctctatttgtaataaattgtttgaaatttgccggaaattccctgagaaatttaatgatttttttaaaatcgttaatgggatttggggaacaagctgtgctcctgcaaaacccacgccacaacataaattttttgcctatgtaatcgaatgaatgcatttttctttcgaaaattgtgtagttttcaggattttgacggggatttacgacatccattagcaatattagcaccggcaaaatcaaaaagtgccgatttgctgctgttcctccctcttttctgcttcattctctcctcctttttgcgccgaatttttccttttcctctctttctcttccgtctctcctccttccccactgctattttcatccttttcctcctcttccctcgtttctccatttttgctaccaacaaatgttggatttggttgacaaagaaaatttctaaccttttacttaaaagcaatcaaatttttaattccttatatcattcgatagttctagatgttttctattagcctacagaatttcaaaaagtttcgttaagtttcaagaaagttatgagctaaaatgttgtaaaaaacttgggtttttgagcttctcaagttataacttttttgaaacttaacgaaactttttgaaattttataggctaataaaaaacggtttggcctttttatgtcaaaatgtttccgcgccttccgtttttgtcaatgatttttcgcctcccattggccattggcaacaatttaagacgaacaaaattcaaaaattgttggataaaatgtgattttcgttagaatttttggttttccgcttttctcattatataaaaataaagtttccaacgcaattaattcttctgctatttgtgtgacatcattcggaactcgtccaaattgtgctaattgccacaaaaatgaaccgacggtaaaaggattttaaaagtctaaattcagcattatttagctaaactgttttccataatttcagttggatttgcaacgacgtttggatggacattttcccatcctttgaccgtcctcaactcggcctcaaattggcacttctttcgccacgtttcaatgcgttggtggacaaacatttcaatggcaaaagcgaattgccaatttggagatcaatcgaaattcacaagggcaaaggaccagaaccgaagctgtttgtacaaattggtgacaaatataacaaatttatggaatttccattgcccgaccgtccgttgcccagcaaaatccgttttaaatggcttcggattaagtaatttaaaatcagagttatggcaataaaagcattccttccattttcacagttacatcgatcactccgtcatcgcaggtcttcgttcaaatcaccaaattttcgacaaaagcaggcaacggatttagatttgtcgattccttcatcacatacca

SEQ ID NO: 17615 - DNA, 2009 bp, Heterodera glycines
ttgcttaaaatttcaaaaaaattacttaaaattttcatcaaagagtcgttcatagtcaaatggataagtgtgccgacgactcgaccgttcaaatgaaaaaccccagcaaaaaatgtcaatttgattcagtttttcctatttaaattttttaaaaaacgaatattttgctcaacaaattttcagtttttgtaaatttcactttacctttaatgagtagtaattaattaaattgtttgaattttactcctttataactagggcttatttttttggtttttatctatttttttctgagctcccagtggtctgaaaagcacgaaaaacgtataacttgaggttgtttttatgctacttttcgcgttattagggccaattctaggtttttacaaaatttttagaacataaaaattttaaaaatttgaaaaacctattttggcgttttgcacataacctttataaattataactagagcgccacgggaccgggacctggtagcggacaactgagtaccaaggtcccggttctgacaggggaccgggactagtcccggttttttcccggttttcccagccaaaaattcccggtttttcaacccgaaaaggtccctccctgtcccgggtttgcccaaaattcccggtcccgtggcactctaattataactttttttcttttctctatttttttgccaatttttgtattattttttgctctttttttcactgttttcctcctccaaaatgtcccaagaggaattgctgctgtcgttccaagatgaaactgctctggactggttcgttcggcttgcccatccgtcgttgtcctttcgttctggccatgccgaattggacgcactaaatgccattgtcccgggcgaactggtcgaaattgttgggcgggaatcatccggcaaattgcaggtggaaaatgaatcaaatcgctgaaatgccatagatggtggacctctttttgaaaaaaaaaatttttttttaatttttcgcgaataaaactatttgggaaacccgagtttgccaatattttggtccatatttatcaattttcgagcattttagtccatataattgtctgccctagtaaaaaactaactcattctttttccgataaaaataatcgtcaaaaaagcaacaaaaaataagaaaacacattcctaagaattgaaaaattttaaaaaatgatcctctaaaatcttttttttcttgtgattaagtttttaaatgttttggctaaagcgttactaaaaatttaataaattttcccatttttgtgcctatttaatccccattttgcgcttgtttctgcctttttcacgatttttatgcctaaaaaatgaagccctacttatggccaaaaatcgtaattctctgttatatttttcacatttaataattttttttaaattttgtaaaaaaatagagaaagcgctaacgaatgataccaaaaaatgtttaatttggtcgaccatttacaaaagttatgacaatttacctaaacagttggccatgactttggtggcggaatttttgttgtgcgaaagcaaagcggcacagcaccgggccgtggttttggatttcaacggcagcttccgcacggagcggctaatgcaaattttggtgaacaaaaggccacaattggaggaaaatgtatggaaaatgaatgggatgggaatttgtaaaataccgtgttccttcaattcagtccccccccctcaattagaagcgccccctgaaataaaggcctcactttttaggtgggggtcgaaaataaagcccctggggcggagtagctcagttgggctccggcacgtttggggccccagcgggtttttggctataacttttttctttgcaaaccaaattcaacgatcttggtatcatttagttatggccagaagaatttaaaaacccagattttccaacctttttttgccataaatttgttcaaaattgaagagattttttcggattttgcaggctaatagatcatgtgaaga

SEQ ID NO: 17616 - DNA, 2158 bp, Heterodera glycines
ggtagagcggtacctgtactggtactgaaaaacatacaactgagtacctatgtaccgggtttcaccggtaccggtactagtaccgggtttttaccggttttcccagctaaaaagtaccggttttttttttacaattaccggttaccgctttaccctagttaaacctcgaccccgaattcctccatctttttgggtttctccccgatctccggtctgtcatccctcgacgatccccgacctccgatatgcattccccgacggggagcgcggaatttttagactgttaaggattgacttgtcaaattaaattctcaaaagacaatatgccaaaggatttaatgaacccaagttcggctcccctcaaagaaaatggttttttttttgctctttctttcttgcgcattattgaaggcgattataaatatttaataagtttggttttcccattggattgattattcactcactgtttttgaccagaaatgcgccaaattcgtccccattttctccctccaataaattggccattttgtccaagtgcaatttggccaccatttcgtcaccatctttttttcttttatccttcaaatgtttgtccatgcacagaatgaatttggcaaattgcgtcagttcgagttggaaaagggcgtccaattttatgtcgacaaatttttggtcgtactcatccgccacttcgcttacgcaaattttcagtgcgcggaacagagaaacgtcggagggcccatcctcccacaaaaacatcggctgatcatcagtctgatcagctgactgtaaaaaagagtgattgatttagccaagttggcacttgaaaattaaaaaaaagaatatccaatgcgaaaaaccatattttggtatcaatgataaaaatattattgaaaacaaacattattttaccattatgaattctaaacaaatttttttaaattttttgaaaaaaaataattttttctaaaaattaaaaacctcctaataatatacaataatttaaatcctatttcaattaatttttattaattagctcacaaataagaagaaatcttttccttcctttaattcacttatcatttctttcattttggcaactttgtttttactatccttggccatttgatgcgttactttgcgtacaattttttctcttttccaaaaattgcttgcataaaatatccaataatctcccaaattgtgaaaaaattttactcttaaattatcctttacaaaatgtttttcttcgctaacatttccttaaaaagcattaaaaattaatttattttaatttttattaataaataataaatactcacctgtttttttgcttttattttgattttcttctttatagaaaaagttttgcgtccattcttcgtacaatcgaatttccaaaatcattttggccctccaattgccgatttttgaatgatttgtaaacaatgattcatataatgcataaaaaacatttttatcatttctctcacctattttgcaattaataaggatgccaaaaatatgtataaaaagtggtcaaaatatatacataaatattttaaaaaaatccagaaatatgtataaaaacccaaaaggtaaaattcaagaatacttttacctcaacaaatttaacaaatgatatatcatgcgactcctctcggtctgtaacgaacgaatccgaaagatttttttcggaaagcactttgggccgagtaatgggcccgtgactgaaatggccaaatggcttcgggactgaaccgtagtagttaaccgccccggtgcgtagtttgggcgggaaaatttcccgcacaaacgccagcctattgggcggttttaggctttgaagttgccgccacctgtcaatcaaaaggtggcgggggaggggaggggtcgagagtgagtgatcggtggagagggtgcgcgggagggggtgttgggtttaagcctaaacctattgcgtagtttggggaggagtcccgtaggtgttgatgggtgggtcgggatttttttgaaaatgtgagtgggggtcaaggggtcaatgatcagatgtgaaattcacacctggtttggggtgaaggggtattgaaattggtgattacgggaggtcaggggacggacaatttaaggtgtgaaatgcgcgcgctattttgaa

SEQ ID NO: 17617 - DNA, 963 bp, Heterodera glycines
gagaattggacatgtacgatgacgtccgattggtggagccgcaacttggtaagcgaattgggggagggaaggggggggggggattggcggatcagcgaaagggctaatcggagtgattgaagagcagccactgttcatccccgagatttatcgcaatgatacgcgggaaggcaccacaaaagcgccaaagggtgcgaaaggcggcgccgcggcaacaaacgcaaatcgcccattggtatcgccggaagttcagtcccgaccaccgatcactgtccggtacgaatggaacaacggaaatgagggaaaatgtatttgggacgcaaatcgttttccgtcctcccccacttcagtacgaccacccctcgcccgagttccgccactgtccgtccgccccatcccttcgggcggccgcctcctccgctcgttttaccgcaacagccacgacttccccctcaggtgccggacccggtgaaacagttcaaataaacctctgaaataacagcatcctcaaccgccccggccttttcccccgcctaatgcgccccttccgcagcccttccggcaaaattcgcaggtaattaatgcagaagggtaattaaacgaataatcactcgcgcatgtccattatgtgttaccaattgaactcttgtgcttcgttttaagccgtcacctttgccccattcgccaaacgctgtgccgcgaccaatgccaaatcagcaacaggtggcccttcccccatccctcgcttcagccctaccttattacccatcctcaataatgagtcgctaattattctttactcaaagtgtccctttgtttagcagcggccgctaaccccaaacattggaatgggtcaaatccggacgggaggtggccaaagactgtttatttttttaatttgccatttcgcgtctcagtgtgccatcaggccattttctatacgccgcagtcagtcagcgaagc

SEQ ID NO: 17618 - DNA, 1908 bp, Heterodera glycines
ccagcagcagaaaaagggaaagaatggacccattgtcaattggtctgatcgaattccgatcagaccaatcgaagcgggcgcagaaaatttcatagttcgatttggcacttactgagcagcccaaaatcggcttctaattcagcccttccaccgcttttcgtgttcaccccgcctgtccccaatggccaaaccctttgtacaggtcaaaaagcgatttgtcactgacaattctcggctgatcagtgtccctccctttaggaataatgttaaatctggccaaggcccagtccgaattgcgtgtgtgacgtgccaacagagaagtgattgccccgaaattgaatgattgaccaaatttatcacaggacgagtgccgaaaccgggccaaaattcgccaatgccattcaatggccaaggcaaacaacagcaacagacaattgtaagggatacggtaaaggaaacgggaacagagatactgtacaaagaaaacgggagggaaatcagcagtcacacaaacaaaatgatatcaaatttatcaatagtcataataattttcccatttcgtgtacagtccgtcacccgtcccgcggccggcgctgctccaccgccgccgccgcatgtgatccggacgacagtgcgcgatcggctcaacgccgggccgttcttgcaaaacggggataacggcccgcggatcgcccatgtggccaatgcggcggcagtgctcaaaacgaccgaaaggggcgaagagagcgaaacggggcgcgatttgagtgccgaatttcacaaattggagaggtaagtgacgaaaaagaaactaattatcacttaatattggcttagactgttaaaatcggctgaagattatttggacgaaacggaaccgaacgaagcgaaacgaacggcgaaagaagaaggaaggaaagggacggcggtggggagggaagtgccgtcgtggacggagggacacccccaaggtaaaatgggcaacaaatcccgaaaatgaaacaccgattcaggcgagggcttctcccccctgcgcataaatccgcttcgaaggccgtttatggaggacccaagccgaccccacgcgattttttactcaaccgaaaaaatgccgcggccgaaaagtggggacaacgaaaggtgagaagggatttaagatagaagggtttttattttttaaaatttaaatgccagaaatggagaagaattttatcaacggcgaatccgacgaaacgaaagcgaagaaagaaaagggaaaaaggagaagaaaatgaataaatgagagaagaaagggagggacggagggaggacaaatcaaattgttggattaagaggacaattaaagacaaaccaaaataattttattgctcaaaaattaataataattgttaaaaatatgcaaaaatatatgtttttattggcaatttcatttttcaccacttttcttcgtttttttcgcgtgccatccttcgctttccgattacaatttgtccgaaaatgtctgcgattccgttgcctttcttttccacttccattcgcttgacccaatttcgccgtcaccaaagtgtttatcgatcaaaatcccttcctcccctccccatttctgtccaatttgtaaatgttttttcactttttaaattggctggcagcaggccaaccttggcatttggttttgtcggttgtgttgcattttcttggcattttcactggcctttggatttggtatatctttccaaaagaggtaaaataaatgaccaaagataattaattaattacacaccatatattaatttcagcctgccagaatgaacagcggcagaagagcagctccgagggaattggagaaaggacaatcactgcttgggaaggaggacgaaacggaagaggagagagtgggcagaaatagca

SEQ ID NO: 17619 - DNA, 934 bp, Heterodera glycines
  unsure (1)..(934): unsure at all n locations
tcaaattatcgctcatatatgcgctgatcagatggactccgatgccgacgaagccgccgaattcgttttcttcgcaaatttggagtctttgcctgtgtctgccgaagaagttgctttgtgtaccgcagatgaagaactgctacaacaagtaattgggtatgttcgttcgggctggccaagcaaatgtcctgccaacgatttactgtcgtttttccaaaaacgtaacaccctctcggttgtgggtggttcccttttatcaggaaacagagtcgttgtgccggcatcacttcgcaaacgtgttctgactgctttacattttgctcatcctggaattgtccgcatgaaagctttggctcgtcaacatgtctattggcccggcctggacaatgacatcgaaatgttggtgaagcattgtaccgactgtcagtccgcggcaaaactcccgaaaaaagctccattgtgtccatggccgacttctaatcaaatttttggtagagtccacattgatttcgcaggtccatgccccgacggcaaaacgtatctgattcttgtcgattcgttgtcaaaatggccggaaatcactgagatgcactccaccacggccttacacacaattacggcactaaatcgcatttttcacagatatggttttccatatgtacttgtaagtgacaatggtccaccattttcatcctttgattttcaacagtattgtaaacaaaatggtattaagcacatcttttcacctccatatcagccgcattgcaatggtcaagccgagcgtatggttgacacattcaagcgtcaggctaagaaaaatgccaattccaaaaatcaaaattggatttcagagttccttttctcttataggtcaactccaaccncagtactaaatggtttgtccccctcagaaaagtttttgggacgctctctt

SEQ ID NO: 17620 - DNA, 1525 bp, Heterodera glycines
ttcaaaaacggtgacactgttctcgtgttgattacggaaggtctggcaagcctaattggttgaaggcaaaatagtcgatggtaaaggtctaatttggaaggtcaaaattccacttttgaatattactgtcactcgacatgtaaaccaaatgcgttcttttgtcccttaccaaacagagacaactttttcggccgatttagttgaccaggttcctcaacagaaaagtccttgccatcacaatgtcgcgaccactccggtgccaaccttgccaattcaaccaacgcctcgtcctcagagacaacgccgccccccaatacgttattcgccgtgaggaaacaaattttaagaagggagatgttggagatggatgttgatgttggattttaattaatttgaattagcgccatacagtaacagtgatgttcctgtttgtttctccgcgccacatttccagttattattttccctccgttgttttcctcctcattcattaattatttccttcttaatttttcggttctaaattaaatctgttttgctccttccattttcgtcattcctctgactccgtcgtcatcttttatttatttattgatttcatttgtctttccacaataaatttaattctgttgttccttgcggacacaacaataataaggacggagaagaagaatacagtacccttataccgtcacagtatccccgtttttgaaaatacattatttctgaagctttttctattcccttttcagctctgatacagcaaaatgggtcactttctgcagctgaatttgaagaggcacttccgcttggctcatttataaaagatttttacggaatggcgttgcgaattgtggcactgtaacttaccaagggcattgaacaaatgcacggaacgaaaatgtgcaaaacaatggtgggtgctgtaatgatagtatacttacgacaatcgaattagttgatgggtgggtactgtaatccaaatggtggcttgatttcctgtaataacttagcttttctccgtccatgctaatgtcagccttttcgatatgcaggtggccgccctgaaaatttctcttaataaagttttttattttctttagcctgtgccgaaagcgtcaaacattgaccatttgggcacaaactgtacacaaattgtgtttgccgaccgtatgccacagttttggctgaatgtgtccgtttctccctattttattgcgtgcgaacaatttaaggcgccatttgatccctcgactatgttcaatcagtctcggaccagcagtgatttgtttgatgcatgtcaaaaggtgccaacaacaccgaactgcgagaagttggcacattatctgtgataaaattatttaaaaaaaaaccataaccaatgcacaaattcgaggactgtcattggtctttaattctatgattttaaattttcagaaattccgtccttatttttcccattatctcgaatatttaaaaaaaactgttctttttggtgcaaaaaactttcaaagtgctcaaaaaa

SEQ ID NO: 17621 - DNA, 1974 bp, Heterodera glycines
atctatttgttgaaaaatagtccaacgtaggcgtattataagttaaattgcgaattagtaaaaatataattttcataatattatatatttttaataattcatagaaaatggatattaccatcgcaaaattaataacaatttatattttaatcgtttattttccgaataattcgaccacaattgacttttctggtggaacaaatgaaggacccaagcaaagtgaacactcaattgttacttttaatcattttcaaaaccagcagcagttcaacatggcacaaccttgttacggcaaattctccgtaaaaaagtttcggtatttaatagaattaaaaataatttaatgtttgaaaatatttactgagattattgcagtataagaatcgaattggattgactatatttcggttgcacctgatttttaattcctgctaaaatataaatccaaaatataaatccgacgaataaattgaatcaacttctaatcttaatccatccttcgatttattttaaattagataaagcgaattcagacctaaagcaaatgaattgatccaattattgaatatgtcatttgaatttgaatcataatcggtcgataaccagcgacaacaaaacttttttctcaaacacaaaattaaacgctatccaaaaaaacgagaccaaattaaaccatttatggtgaatttttttaaattttttaatttaaagaatatttttaagaaagaagaatttgaacattttaaagaattagtgaatgatgacaattttcttcgcacaaataaggaatgcaaaaatcatcaaagtttcagtcactacaattgacagatggaaaaaaatactcggaatcacaaagaattcatgtaagcaacatttcagaaggataataatttattttttacaatgttatattgtcaaaaattagaatttttcttattttcaataataagaaacgcgaatgggtggcattgggtcggaaaaacccttttggcagtttttagaaacgcactggaaaaaatctttgtaaagtttgttttggttttttgagaatttcatagcaaaaaaaaaacggtttcaacttagttgcctctaatatgaattttgaaaggcaatagaaaaaaattagtgtcacaaatgtaaaattgggagatcacagtgtatttttgctgctaatgtgcattttgtcatttcatcggccccttctcccatgcttctttcagcatggcaaaatgatcttctggttttgtttggttatcaatcaatgcttttccactgatcaaattccgctgaacaatgccattgacagcagccaaagatggagcagtattatttgtgccaaatcttacagttgcatcaccaattcgatgattatagaccaaatgattaaatccaaacattttaccaatacggttcacaaattggcataaatccctcttcaaaaatgggtggcatcttaaaacttttaaattaaattaatattttaaattttacatttgtttacgttataatgaaaaattcgataagaaggccgaaaattgagttgataatcgcaaccaaattgaatatatgtatataaaatggcaaattgagaatgtcccataataaaatcattgtccccgcgaaaatgttgcccaaattcagaaacagtggcggtattagctgtttgccaatgcgaatgttttcagagagctttcaaaataaataatgattatataattaaattatatggattacctgataacgaattgacagattatttgagccaatgttttggaacattttttgataaattttggaattgtatcggcttaattggtagaaaatgcctaactcaatgcttccgaccagcaattggacggcagttgtgatcagattcgttattggttgcttatgatcatgtggtgaaggcgttgtggtggcaatataaattgggatgatcaactgtaaataaaaattgatcgcttatatcttatc

SEQ ID NO: 17622 - DNA, 2240 bp, Heterodera glycines
tagaccaaatgattaaatccaaacattgtgccttacggttcaaaaattggcacaaatccctattcaaaaatggatggcatctaaaatttcaattaaatcaaattttaattttatatttatttacgttataatgaaaagttcgataaggaggccgaaaattgaattgataatagcagccaaattgaatatctgactataaaatggcaaatcaagaaagtcccataataaaatcattgttcccgcgaaaatggtgcccaaattcagcgacagcggcggaattagctgctttccaatgcgaatattttccgatagcttacaaaataaaatagattttttattaaatatttatttagttacctgataacgaattgatagattattcgagtaaattttggaattgtatcggcataattggtagaaaatgcctaactcaatgcttccaatcagcaaatggacgacagttgtgatcagatttgttatcagttggttttgttcactttgtggagatggagaaaaagcgatgtaaatgggaatggtcaactgaatgaataccaaataaattttgtttcgttataattagttataattggctaataaaatgtgattactctcaccgcaaaaggcgtccacagaacggtaaacagatggccacgatttttttcatatgttcggacaaataatgtggccaggatgagttcaatgaccaagaaataaaatgtgattactctcaccgcaaaaggcgcccacagaacggtaaacagatggccacgatttttttcatatgttcggacaaataatgtggccaggatgagttcaatgaccacgacaaatggcacaaaattacgagcgtaaatgccaatgaaatacatttttaaaagtgacgggaaaaattgcatagattcggcaccaattggatcccaaaggaaaatttgaacagacaaatgacaaaacgacaggaaccacgcttaaatttagaataatattacaaataaaaattattttaaacaatattaattatttcaatttaaatgaatctatcccacaagtaacttcttatttcaattttaatgaatagcaaaatatttggtaatagaaataattaatgaaaagtgacaatttaattttgttcagaatctcttttgtttccaggtgtaaaatgaaaaaaaatcttattgaatctccgccaaatttggtcgattgtccccgacggtaaagacgcaactcgtttttggtcaatttgtttttaccccaaatcgttttattattccaactcttttatagaattgaatcgcgaaaaatcgaggccgaatcaattagaatttttaagtcaattgcgattcaccttttttggacgaaatttttatttttaatagaacctgaaaacatatttcctgctgttttctgggtagctagcttatcacgaataacatacatttcttccgataacaattaaaaattctcaaaaaacttaatatatttctttcgaaattcaaatatgaacattaaaacattagttcaaaatcgcaaaaattggtattgttgataaaaaatctgttaataaatttggggaattggagatgggccaaatatattttgtccagtcaacactggaataaaactttattcaagtaaaaattgggaagcgccgatattttagaaaacaaaattgagggcagtataaaattaaaagaatttcagagcataaaaaataaactaaaagcgaatgacgatgaaaaaagggatggaattgtgaactagtaaagggccgcttccttgcgatcgagttgatagttagttgaccaggatccagtccggaaggttgtctccgatgttaaaagggacattgtggcatgcatccgctgtgaattggacttcaagattttttttaatgctaacatggcgatttgcctttactcacaaagacaaaaaaaggcacctgccaattttgacgatgaaacattgccgttaattttcgttaattaaaaattatttgtcaaatcaaatgaatgaataatttgtgattctgtggcgtaacagtaatttgatttccagcgttgacaagagacaggaacagaaaggcaatttacataaaaaataaattttataattcagattaaagatcggctacggttcggaccctatacgggtttttgcgggtccgtagtccgtatttttttgggccgatacggacttatactgagtaagggttttacgggtttttagtccgtaagtccgtatgg

SEQ ID NO: 17623 - DNA, 1643 bp, Heterodera glycines
  unsure (1)..(1643): unsure at all n locations
gaagtttgggcaccagaaatttgggcaccgggaagtttgggcaacagagtaagggatttcaaaaaaaaatgtaaaatgtaaaatggttatataaatcattaaaatttagaaaattttaacaacccctgtgcttaaaaatttatattttcttgaaaattaaaaaaattatgtaagaaagctgataatctaattatttggtcaattcttacagctgtttaaacgtagaattaaacgtgtactaattattgtttgaacttagaatacccggattagttgggcccgaaatatcaaatgatcagggatgcaaaaaatatgcacgaaaagtggccaaaatatgcacataaatatgcaaataaagtcgtgaaatatgcaccaaatatgcacaaaaatcgtaaaatatgcaccaaatatgcactaaaaaattgaaaattaggggtgcaaattcaataaaaaaaaattttttttactagtgcacttgccaatgagctgctacatttcttttataaaattctctttagcaaatattgacattttttaaatcaaaaattttctcatgaaaaaaaatttgggggaagaatttttgagaaaatttccaattcttagtgctgtgtttttacaaattttcggtcgattcttaggggtgtatttttttaaaatttttttagatcgatttggtgtattttccgtttttattacattttttaacaaattttccaaaaaatggcgaaatatgcataaatatgcacaaaaagccaaaatatgcaaatatgcacaaaaacctcgaaatatgcaaataaaagtcccgatttttatacgcaaacacaaaaaagaaagtgtttttcctgctatttagagcatggagaagccaggaaaaaaatgcatttgcatgtttttttacatccctgcaaatgatccgtctaattatgtttaaacttataaaatttaaaagtcttgaacataccgagccttgtaataatacaaataggttatacatacgccatgtatgacattgatatagaatgaattttaatgagtctagcaaaataagcatgcttaattgagcggatatctttcaaaaactttcgattcctaacttgattataatttacggtgccaggaaatttcgacagtggctgatttcgacagtgaccgatttcgacagtggatttcgacagtggctgatttcgacagtgaccgatttcgacagtgaactattttcatttattttactgttttccgacatttccgacagtggctgattacgacagtgaccgatttcgacaatgaacaaaattatatttgtgtattagtcatttttatttaaaaaagtcactatttaatgggtgaaatttatatatgatgtagtaaaataaagcatttttcttttattttcaatgaggtaaaactcagttgtactgtactttggccgtaggccgttgatagtggaagggccggtcgttcactttatattgggaggtcaattntcttggaggtcaatttgataagagaattttgagaggaattgttttggtgttcccgaatgctgatggtcattctcgacttgtcattgctggtgttcatcatttgctgttccctctattcgttnttttccgaattcattgaccaatggctctactccgatt

SEQ ID NO: 17624 - DNA, 1642 bp, Heterodera glycines
gcttaaaaattagcgcaggacaaaaaaatcggtgggtgtgtgtgtgtttttacatttatgctaattttttccaacttttagcaaaacggcaacttgacgcattaattactcattttatgcggtaaaaaaaaggaaaggaggaagaggaggaggagaggaacaaccaagcaacaacaacaacatttaactcataaaaatacattttttgatcacaccattcattcatttacattttcatttcaaaaaataatctttttaattttttaatttgattaagggaaaacaaatttattgaaaaaccagaaggttatgttatatgaaaattattccaatgattatcatagacagtgaagtgatcaaataaaaaaactgattacagtattagtcccacccatggtgcatcaaatccgttcaagggaacatattctcaaaaacattcacctctcgttcgatttctgcgctcagctggttgagtgcatccagctttgattcacgggccagcaagtacaggattcgtgcctcgatttcgccgatctttgcgttgagtcggttcttggcatcggtcaagaattctccagcgaaagccgtgcctaaagcgggcagcaaatattatagaataaatgtaaaaacggatgtccataatataaataaatataaatggtcacttccaaaaaaattttttgctttaccgaagcaaaaatttaattcatttaaatcaacattacgactaattaccgattgttttggtttgcgcttcttgatggtcagacagtccattttcaacgccaatttcttcacaccaacattgacacgtacctaaaggggtaccgtatcataaacaaaagattatgtgtcgaaaatgatggaaaattcaaaaattaaatccatttaaataaacattatgataattaccgattgttttggtttacaattcttgaactgtagctttgcatgctcacaaaagaactccccacccgcgattctcttaggagtttttttaactcgagtcatttaatattttttgtagggagggaaaaaagcaaaggaagtgagaatgagatgagaatggtaatgaaatggcgaatggcatttgttgctacgatcggtgcgaaaacagcgatgatttacttggggggggagtggctgaggaggggttgtaaatatgtcaacacttttcacactgggattacgaagagagttaacacatcttatggaaaattaatgggctgtttttgtaaagacacaaaaacctaacggagatgaaaacacaaatcatcaatcattcatcaacgattttggacagctttattaaaaaaacagatttgagtgaaatgtcagaatgaaaatttctaagcacgcaacaacaaatttaggctcattaaaacaataaacccatcgttatcgacctttatatggtaaaacatcgagatgtagcccactttcttcatcaagtgcgtattgaagagcaagtaaacggtgtttccatctgatcggacttgggacagtataccattgcgattcatctcacatgcagtctgattcaaatatgtaggcaaatccttggggagcatgacgcccacacaaaatccgtttgcgatgcagaacggattgggagagcagaggatgaagtcatcagctagct

SEQ ID NO: 17625 - DNA, 1685 bp, Heterodera glycines
agttgatccttgatgcgaagcacagctgataacaattgctcattgacgaaaggcacttttcggagctcacaagtcgcattgaatttctcatttaacattgccttaatttaaaatatttgaatttaagtatgtaaatgatgatcgctaaccaatcgattcttgaatgtgttgtgctcatttttccttgactggcgcacaagttcaaactgccaattaattggaccgatcatcgagagccatcgcattttttctataatcttaatttggtaaaattaaactttattattatttggcacccgctcttccgtcgaacaaccgcatcataggaatacacatgatcagttcccagatcaacttaattgggagcggcttggaaaatttgactttttttaaaaaaggtgtaaagcacccatcagaataacgcttcattttggcataaaagtatatgtcgagatcagctagaatgatttgagcatttgatcggtacgagaaaaggtcgagaatggcgccaaaatatgcatgcacgccgggacctcgagcctgaaaatggacgtggcttaccattcaagacccgaaacaccgtccggatcatacacccggctaattcgacaaatcattctaattttttgctctttttttgtttgtcccgctctccttattccttccctcatctccttcatctcctatctctgtgacaattttttaaattgagtgaccgtataataaaaataaataataaaataatatatttttttgatgttaaccagggcggttgctttatatctccgtttatcctggcagcaatttgccttttaggacctgaggttaatctcattacgtttactaatttccgagcagtttaggtgccctgtcgtcttgtgcttcatgggtggcggtgtgctgctcgtcaggtcaacgttggtttaacgctatgatcaaacacagttcactgtgaaataaatattcctgttcaattttcctaccacatgcaacaattttcccttccgcttcccacccctaccatgccatcgttcatttaattgtatataaaatgctcatgctgctaagacccgtggatggcccagctggaaattttacgactatttacacaacaagcacggacaacgtggactgtttcatcaagacactgtgcagctgatacgccaaatcaaagcaccattggatttgaacgcatatgacgccgatacgtacgtgcccctcgtcatcagccactggaacaatgctcatcaacagcagcagcaccgttttgcactgttcatttttggcaacagcgggcactacaagccaatctacaaatatattgacagcacttacgacacaccattggctttatactttaacaacaatcatttcgatggtgtgcacttcctcagcggactctttggtggcaaaaagtattgtctggagtgtgagaagctttacaagaagccaaaggaacacgtgcaatcatgcaaagcacactgtttgctctgctcacgcgttggctccacgtttccatgttactcggatgatgatggcttcttcaaacaatgcaacggatgcagcaaaagcttcagaaacagcagctgctatgaccaccatctgcgttccaaagtctgcaaacactccaaaaagtgcaaagactgtctgggggggggaatgtggcggataacaacagaaaaggg

SEQ ID NO: 17626 - DNA, 3206 bp, Heterodera glycines
ttccctccacagtttactctgatcactgattaatttaaccgcttttcaacattttgaggggtcccgaattttcgcaattactttctttcgagattattgtcaattgtaaaaatccgttcactctaaatttaggcttcctaaatcacccccccccctccccaactttgatcgatcatcgcctcgttctccctctcacagatacgatcatgtgcgtcaccccgtttttgatcgccggcgtcggcgtcgacgacgcgttcatcatgcttcagtcgtggcaacatcatcgggcgattggctgtccccggcagcggctttcactcgtcatggtccatgtaggccctttaaactagcgttgaattagcagcaaattttgcggggataccccgacaattaggccatttttgcgggggtatcccttacaccgataattttgctatttttggagaggatattcctgaccacgaccatttgaaactattttggaagaaaatccctgacctcggcaatttggccatttttgcgggatatccctaactcggctccactgaccccgacaattgggctatgtttcccaaattaaataataactcactatttcttttttctactttaaaccccacacaaactcttattttgattttggtattttaggaagaaaaaaatttaatgataaaattttattgtaaacttttaaatatagaaagaaaataagattgagataataactctagaaatagtgaatctaataactaaatggaagggataccccgactctgcaaatttggccattttcggaaggaccccgacaacttgggcatttttgcggggatatccctgatcccgaccgataatttggtgccatttttggaggggataaacgacaatttgcccatttaaggggggcgggggtggagggatattcccaactagaacatttcctaacactggcaatttttctacttttttggcgggttttcccctacccccgagtggcctcggtttttcgaggctaattggattaagacttttgccgaaattgttgttgatcagaccaattaattaatccctgatcaattttctccgccgccatttcaggtgggcccgtccattacgatcacttcactgacgaacacaattgctttcggcatcggcttcttcacgcccacgccgcagatgagcctgttctgtctctgcacttcggtcagttttgagatggcaattttttaaaatttaaaaaaaaaaaaaattaattttaatgccaaaaaatcatgaaaattttaaaatagtgtcggtgaaaacaaatttttcattagtttgcgaacttaattgcaaaaaaataaattaattatttgtttgacaacttaaaaatttctcttctaccgaaaaaacgatttttaattttttatgttttttgtcacaaaacctcgaaaatttctttaccaaagtgacttttctgaaattttttttaaaaggtcggtcttagggggtgcaattttttttactcttattcaattttttatttaataaaattttacaaactttgaaaatactaaaaaaacaaattaaaaaagcataaaatatttttttcaatgtttaaaaaaattaaacgcaaaaatgtatttatttttgagcttatttcttaaaaatagagcaaaaaaaaaacaaacaaacaaaattttgacttaatattgaaaaccaatttttctgcttttaattttggaagggaaatttctgtgttttttgattattttttaatattaatcaaaaaagaaaaatttaaattccataaaatatcacaatgaataattgtatttgtgttttttgtattcaaaatcatcgcacccttaaatatcatatcgtttcctattttaccgtatccttttttgctgaaatactgtattattgccgaactttccaaaatcggtgcaaaccaaattttcactgacaaatgagtttaattgcaaaagtatttgaaaaccaatttttctgctattaatttttagaagggaatttttatgttttcaaaatcattttaatatttggatgataatttaatcaaggcacttttatggagtgccgtgtaaatggctcagttggtaatgcttctgatagacactgttgagcgctttcttcggttcgagcccgtttgcacgcgcaattttttattttattaatttgaaaatatttttatttttatttttaacattggttttttaaaattcagataaaaaatgtaaatttccataaaatataacaatgaatataatatactttttttttcctttccaattcacacgtttaaaattttatatcctcaaactaccgtagctcgttttcaaaaatactgtattacggccgaactttccctggcgcatttttctgatcacaaaaaaaagcttaaatattaatagagggatcaaaaatgtgtccttttataaaaaagaaacttggacatgttgcctattttttaaaattttattttttttttcaaaatttcttacagtattttttcctgtactctcacagattgccgtgttcatcgactacctgctcaccttcacgctgctctgtcctgtcgtcgttctgctctcctcccaccagtgttccgctgttgtcgttgctgatgaccagcagaagcatccgccgcttcttctcaccgccgccgcttctccgcctgttgtgccgtcatccgccggcgatgccgaagccaccggcaaaatgccaccatccaccgctgcgcttccgtgccgtcccgtcgtgttcatgccgtcatcgccgcggtcgtcgccgcttcatccgacgcctccgccatgggtgcaccgctatgcgcgcttcctgcactcggcacagggccggctggcggcactgtgtgtggccgcgctgatgtacgcggtcggcacaagcggagtgctcaggtaggagagggcaaagcaaatccatgcgtcagcatgtcggctgcggcgctatgccgtgccgtgcacccgtcggtggtgccgacaggcgcaaccccccggcggggaaataaaattgccaaaatatgcaaataaattttcaattttcttctaagaattcttgaaattcgattcagaaagtggaaaaatgattaactatgttaataaaaattagtttattaagaaaaacgaaactaaaataaagcaaaattcattaatttttaccagaataaaataaataaaacaaataatacc

SEQ ID NO: 17627 - DNA, 3494 bp, Heterodera glycines
ataattagagaaaatacggtaatactttcatgaaatattctcaaaacccaaatttgtgccaaaaggaatagggacaaaaaaagcaattaaaaggcaaaaggaagtgaaatatgccaaaggcgactcggtctttgtacgattcggtgccaattcctaaataaaagcgactgctctttccatgcttatttccctcacatcaaaggaaaggataggaaaagcaaagaatggacaatcatcggctgctcacccaccgaaggcacttacgcacttattagcattgctttttgtccctttactactaaaattcgccctttccctccaatggacgccttttcccccgcgtaattcacaaccaattagcgggcaagggaacctccgatggccgaccaacggatgcgcaaattgcgcaattcccgccccctcccccgcccaattgagtcccctggggcatcgcccgcacagacgcttaaggagcaaattggccaacagctgattgaggaagaaaccaagccaatgccaaggaatagctgtttttagatggagaaacaatgctttaggggagggaatttaatttaaatggaatcaaaatatttgaggaacaaatttaaaatagaaatggtgaaaagttgatgggaaatttctacataaaaatagaaatgtccaaaaaggctaaaatgcattttgagttcttaaaaatttatttaaggaggcgtgagatttgttcacaaccaatttaacgtttttgtattcagtggaatttactaaagaaaaaaaaagaaagcccttttaaaccaaatggccacttttattcggagttttagatttttggtaattgccaagtttaacatcggattggtaaaatatggaattgcaaataatttttattttgataaaatgagaaaaacaattgaaaatttacgaatgcaaaaaaactaaagcccgttttgaacaaattggccactaaagtcgcgcatcacagtcggtcagttcgttgtcagtctaaaagtcaaatcccttttttccattcactctcattctctcccccccccttttttaccccaacgcctccaaaatgaccatgcacacttgcgccttccccgcctttttgttgctggagggaagcgaaggtgcgtattcgacgccatttaacacagcctaagggaacattgaagttaaatggcaatgatttcgctgtttccttccctcactttccaaaggtatcgccggttgttgtgcggacccgactcagcacaagaaaaatccggattcttccagcgatggcgggcgcactgctccatcagcacggagaccgggtttttgcctgaatttcggggttttcaattcgtttaaatagcagcggaatttgctgtcgaccggcagagtcgagaacactttcccgagtcggcgcccgctcgagacaagagaaaagacctgccaaattgagggaaaaggattaatttaacaaaggcaatttgtgcaccttttctgtccgccttcacatccaatgccaacggctccaattgcccggccctttcacggccaaggccttggcccggctgccagcccatccgctgcagcaatttcaacccaattccgctgttaatctccggggctgttcgaaattggtcctgaaaagcaaaaccttcacaaatgtaaaaaaacacatttggcatttcaaaaaataactgccaatggacggagaaaaaaaattgatttagtaaaataaaattgccaaattttgcctttgtttccggcgccgttggcagttatcttttacgcattctgccgcaatttcgaagatggaaattaaattcattaaaacaaacattgcaatgaatattaaatgcctcgtcggcacctataaaatcgaacgtgtttcgaatgttgcgcgttagaaaagaaataaagaaacgcgcaacattcgaaataattggaggaaaacatggggagagacatcgaaggtgggagaaaatgctaacaaaaatggaatcaaaaaaataattaggcattaaaaagaaacaaaattcgattctcggtttacccaaccgaaaaaactcggaaaagatttaatgagaagaggacattttgtccttttttagcattttgtcccataaatataagcaaatggcgacagctcttcccattggtgaagagtcggaaacaaattctgaataaaaaaaggagcggaacattccttcaagaaaaaccaatgatatttattgaaggaatgttcatctccgcaaggacatccaaatcaattccgaatataaccttgttgtgagaactgagctcgacatagacctggaccggaattggaccttctggggttttgccagaaaataaattcccgaccgattgcgatgcccgagactgaaaacttcaaaatcggactcaaaattcacgagcatcactaccatcaacaaataacccaggtccaagcacattgtgatctcaaactgaagattaaaacggccaaagcaaaagcgactgtccgcccacctttttggcccaggcgtgaaaacgcgggtcagacggttccaattccttctcgctgagcacacgagcaccagtatggccagtaaattcgccgggcaatgagctgtcctgggcccacgaattcatctgaaatgggagtgaatgaatgccattgtcaaggcattcctcggtagtgaaactcacttccttgtccacccgtgccaacgcttttctcgcctcgtaatcatttgggtcacgttgcaatcgctgattgtagcgcaaccgttccgcgaccaattcttgaacactcttttgaggcttaagtacaaaattaattaattaatattttgggagaaaaagagtgccttcgtcagcccaatggggtcgggccgagaggaggccaaagagaaaacggcggaggaaggacgagcggagaaggccgaactgctcgaaaaggtggccaattccccgccggaggggccgtgctgctgaacagccgttgacagaatggtcgcctgcagtgccgactcggccttctgacgggcgaccttaacaaagcaattcgcctgaggcattttcaccccaaaaaacaaaaggacctgtgcctcgacaaaagtattaaatcggtccaaaaagtcctttccatggccccccgtcgtttccttcatcgtctcattgctctgttgaccatttgtcgtcctctgatcggtttgtgccggatttttggtcgttggcaataccatcggtgtgccagagtcggaagggacgaacgctaatttggtggctggcggcaaagcgggctaaatgtaaggcataaaattaaaatctaaaacggatactgtagcaaatgggtgttttttttttgtgcaatttatttttgctttccctcattctctgggttttgactgttttcattcaatgtcaccatcattgtcacaatcgctcgttaacttctcccaattcagtctctcttttcggaatgtttcccttttttaattgtccctccgcccattaagtgc

SEQ ID NO: 17628 - DNA, 3460 bp, Heterodera glycines
agtaatcccaaaaaccaacctttttttgttgaaaatctgttaacaaattgcacccaaatttttaaaatttcccccggcggcgcctatcggcaccgccggaccccttctttcccaaaagttttttgaaaaagcgctccgaaaaaaagtgatgtgaaaatcaaatctgaatttctaataatactcgatcatttagtccaaaatgattaattgtttgaaataattgaagaaaatttgtttgaaaattttcattaatttaatttgctttattttgggttttattaaataaaaaaccaaataattttgtattattttcacttgaaataaattaaaatttgaattttttttaaatttttaaaatttttttgaatttttaaaatttcccggttggtcccggttcccggtttttcttgcggtcccggtcccggtcctgaagaaaaatcgaggtcccggtcccggtcccggcttctcaggtcccggcaagtcccggtcccggttttggcaaaaattcccggtcccgtggcactctatattttacccttgattttattaaatttttttagcttataactttgtcaataatagaccaaataaaaccattttatgctcattttgaagggaaaattcggaggaatatttctaatttagtcaaaagattattaaaattgtttattggcaaataaataattcttgtgttattttatatggtagagacatggaaatagtacactaaaatgagagaaaaagaaaaaactttgtcctgggtcaaaacttttttcatagggtcagattttcttgaaattttgcataggcccatattttgacctcctctatcgattccctctttatttatttgcactgggagcccaaaaattggaaatcgcggttgaaattaatgactaatttgtgacttttaaaaaaattcattaccgtctgttcatttttgtggcacttagcagaatttgccttatttggaataatgtcacacagatagcaaaataagtgtactttagtcaactccccggaaaaaaatggcacaaattatatagccttgtcttggagggggtaccaccgcccggtagaatttgttaacatatttgttcacaaaaaaggttgatttttgggagattatttttaaatttttgcttttaacaacaattttcttcactaattttcactaaaatccccattcttccagagtattttttggtatccgggtacccggacctaccgggtcgggtaccgggtattggattttcaaaaaaacggacccgggtaccgggctcgggtattaaaaaaccgggcgtgcgtcccagtaaaatggaaacttcagtaccgaaaaataataaacgggaaataacaatttataagcaaaaataaaaaattcaaaaaatacatccaatcgacctaaaaattttcaaaaatacaccccctaagaattggaaaaatttcgcaaaaattcttcccacaaattttttttcttgttcaatatttgctaagaacatattttataactgcaatcagtgaataaaatcgtttcattaattttaaattattttcatgtaaaaaacagctatttaaaaaattacacccctaaatttggaactttttcgccactattttttgccacaattttggcatttttttgtcactatttagttaaatattttgggattttttgccactaaaaatccgatccctagtcataaaatggaattgatgaatgaatgtttgtatgtatcattagaatagtaaatttacaatttgattttaagttttgtactgatttgtttcgatttaaattatatttaatttgttttgaacagctccgccagccggactccgtcagttaggcccccgcaagttttcccactgtagcttttttctgtatcatccaaatccaacattttttcttttttttttgaaactttcatggaaaaatttatattaagaaaaaactttaaaatttcgactttttcgaaattttcatgtataactttttttagaaattgcctaatcgcgcgaagaattatcttagaaatcgtttctaaacatgttaagctttcgaatgataccaagattattgaaaaataattttaacaaagaaaaatgaatgaaataagagaaaaatgaatttaatgggggggggggaattcgtgctctgattgaagtggggtcatttaacgattagtcatgaaggtgaacgtgaacactaattagggccatttatttatgaagaattaatgacatctctaagtgggcagcgaaatgacttcgcccgtcccttcccatgcccttttattctctgttgggtcatttctttgcttttggcaaagagaatttataaaaatgcaagccatcagaagacagaataaatgcattttattaaggcagggctgccatccgtccttggattcggtgctgggcatttcctaaaaaccgccacccatgcgcgtttcctaaatccgccaatgggtttgaatacaaaaaatgggtaatatttataaatacactcaatttcaaccaaataaatatttcatgtatcatttaatagctttaattgttctctttcagagtataattttctataattttttccttaaatataaaaaaagttataaagcattgaatatgctatgtttttgaaatggtattgcataccgtttatatgaaattgttctttaaaagaattgcgctccgtctttgctggacattcgattttgctgaacaatgactcatccgacattttttactttgaaatttcgatcaaaaatttgggagggtgagagcaatttgtattttaaatataaaattcagttagtaacattttttttacgtttagctttcccatcgttttcggattcgccgtcaaacagcagacaaaattggacaaaagaatttacccgcgtaatggcacttatgcacgctcaagcaatggcacattttggattaacggatcaccaaaagggccaaatgccgattattcttacggtgttggcgatgttgtcggatgcggctttagtttggccactcggcaaattattttcaccaaaaatggacgtcgtttatgttagtaagagaatgaagaaaacccaaggaaacaaaaaaataaaaagtttttttcttgaaatttatgaaaaattttattctatttttttgcaacaacattttggagcgtaccgatatactcaagtgaatccttagaaattgttgatttgtttagataataggctctattggataattctcaaagaatttttttatgcaaagcaatcacaaaaaatgtaacaccctcttatttttcccactttttgaacataaatttttgcatgaagcattagaattgtcatgcattagtcaagtactaaatgctctgaaaagagacagtaacttatttatgcttttaatttttctcagattcctccgatttggtcgaagattctcggtttgcttctgctgctga

SEQ ID NO: 17629 - DNA, 1546 bp, Heterodera glycines
tttgcctttgtttcggtaaactaatttaatttaattaccaaatttatttatttctaacaaatttaatttaatttaattaagaattataatagtttgaaaatttaaatttttctttataaatttaattaataagcatatgtttttacaattttatttggtttaaattatttttttgcagttttattacaattttaattttattttgcaattttttttattttatttttatttaaagatgattttgttattcgctcaaagtgttccaataattgagggcgaaatgagtggcaaaagaacacatcaaatgtacttgccattcttggtcattagtgtatgtttttaattgtttactaattagacaaattaataataaaaattttcaacaaaaataattttttattgtattgaaaaatgaataatttaaataaaaatatatttgtatatattcagtgtatccaattggcattcacaatgattggaggaattgtgatgttctttacgctgggtagtaaaaaatttatatattttatattattataaatataaaatagatcattcttagctcaaaatctggtaacaattaggcaaataacgcccaaaaatcccacaaatttctgcggcggcgcctgtgggccactgaaaaatcttacacgtcgattgtggcattatgccggccattaatttgtcacattttttaaagaccaaatgcgtcaacaattgggcgggtattcaactggaataattctcggctatttgtttggacttctgttgccgctgttcattttcttctggtgctactccatcgtttttcgagcctacaaatttgtgaaggaaaaaaatgacgagaaaaaccggcacaacgccaagaaggacattcaaatttgatggtgtagagaatttgttaattaaatgttttctaattttaataaacaccgtttttcctaaaatacagtaacaaatactgtatttcttaaaatacaggcacccaactgaattagagcctccccttttgaaggggttgaaaaacaaagccctgggggttctattttaggaaatacgaagacaaaaataattcaaatctaaaattttcaatattgaaaaattcaagaaaaaaaaaattttttttcatttttttcttgaaactttcttatttgctaaattttttttcttaatttttgttgaaaattttttaaatttcgacgacgaaatttgtcccgtccaactcaaacgcggactctaattcaggaggtgggctgcattataggaaatacggtattttaatgatcataaaattgccaaatcatttgtgccacttttgtgtcagtaatatttaaaaaaataattaaattttgtttgaccgctcccaatttaaaatcacatcataaaattgcaaaaaaaatagcacatccaagatgaaaatttgaatcctatttcagccattcaaatccggactatccatcgacaaaaggccgacctataagtcatacattaaaatttgcaaattttaattttctaaatttaaaatttgaatcccggggttcgaatt

SEQ ID NO: 17630 - DNA, 2346 bp, Heterodera glycines
tcaaaaagggcgttatataaaaaaccatcaaatgaaaaatttcaacctaaaactgtccataactcttgtcaaagtcaacagaattaaacattcttggtatcatgcgatatccctaacatttctctattagctcatctaaatttcaaaaaatttggtcaaggttgagcaaagttatggccaaaagtacacaagcaaccaggttttcaaaaatttttggccataacttttttaaacctaacgaaatttttttaaattttgcagggtaatagaggacacatagggttaccgaataatagcaataaaataaaaaatgaaaataatttctaactaaaattttttaataaaaataaaattattttgatcatcaaaaattctgatcaaaactttcttacaacaaacaaaataagatgatcttgatattattcgatagctctctatgtgtcctcaattagcctgcaaaatttcaaaaaattttgttaggtttcaaaaaaggtatggccaaaaatgtctgaaaacctggtaccttgtgtactttttgccataactttgctctaacttgaccaaatttttcgaaatttaggtgagctaataaagaattttagggctatcgaatgatactgagaatgtctaattagattgactttgacaaaagttatgggcagttttttgttgaaaattttcatttggtggtttttttataacgtcctttttgatggcttttttataacggctcagcaccgatacgatttttaggttttagcttattttttcatgagctccccgtggcctgaaacgcacgaaaaataagttttttttggtggttgttaagctacttgtcgagttattcgagcctattttctaggtctttatttttagagcttaaaacctaaaaaatttttgaaaaaagctatttgacctattttggcgtgacggaggggatgagcggaagagcaagagaaataacgggggagatgattggaagatttcgaagaatgccggaagagatgaccgaaagagtaaaagtaccggagggtatgaccggaagaggaacaaaccctgaggaggtgaatggaaggaatacagaaaagccggaagagacaagaggacgaataatcagagcaaagcagcggtggttcatccgtgcccacataaaggtacggtatcaagaagggaccgatacagtaactgaaacagtatcaacaaaggatcactacagtaacagaaacgatggaatgaaggcaaattttatggtactcttatttggctatcggaactagcgaccagacgggatcgggatcttacgggattttctccggatcctgcaggatttaattcggaatcccaaccaaggagtacatcccggttgtttttttcaaaatcttcgggattaatcgggccggcatttggacgtaagcttgtactgctccaactccatgcatgaagttcgagctgtacaggtttgttgcgatcccagagaccaaatctaagaccatattcgaactcaacatacccgatttaccttgtttaattaaattcagaatttccaaaaccacttttaaaacattatgttacttggtggtcttgaaaaatgccgtttttggagaccactttcagtctcggctctccaataattcaatttttgtaattaaaattttatatttttgtgttcttatagtcctaactttgctctatttaatcactatttctctggctctgtatctcttttatttttctttaaatcagccatcaaaaataccgacctctaaaatgaccatttttacttacttaactctaactccctaaatacttttccattggtattgatctcttgccagaataatggcaacatattattgataataatggcgggtattttgaatcatgattgtgttttgttgaaattaaaaaaaaatttttaataaaaaaatttgggtatcaaaaattatgttccaccctaaagtaaataattattcttttctttttatcgtgttcttctaacaaccctctttctgtggaccacgatctatcatttgcatttttaattcaatttagctttttatattcatcaaaataaaattatcttttttccatttattctaattttattaaatctaaatcaagaagaaatcatttttagactaccatttaattataaaatttttattttttttcaaacagattcgtattaattttaatactttgaggttagatttattgtttattatttatacaactagtccacttacgctccaatcataaatccgatcagacgcacaaaaatttggcggctatataattgagggtatagttttaaaaaatctccagattcgctaatgtaaaataaaa

SEQ ID NO: 17631 - DNA, 1860 bp, Heterodera glycines
  unsure (1)..(1860): unsure at all n locations
caaagtgtgccattccttctgtttaaattcatgggataacactggtacaaaaatgacgagaagagcttgcaaaattcacaaacaaggaacagaactttttgatctctaaggaccgaaaaattttcaaaaatttcattttttgggttttttcaaaaaatattaataaaaaatgtaacttttttaaaaaaatggaaattatggaaaatatgtccaaaaattaaaaattttctattttactcagattcttcaaaattaataaattttagctatatttttgcatttagctattttcgagatttttagcttaaatttaacgaatttgaagaatttgtgaaaatgttgcccaatttggaaaaatttaggtatgtgcatattttttactttttatgtgcatattttgaaaatagtctcacaaatcagtgtcaataaaaatatttaaattgaattattttaaagctattttttaattgaatattaataataattttaaattttcaaataacaataatgtaattcgaggttcaacttttcttcaatgttttttaaatgctagcttcgtaccattaataaatgcagaataatttttgagtggaaaaagaatagggatgaaggaaaatttatgggaaaatgcatgaaatttatggggaaacgaatgaagaacttaaatttacgaaaatattgggtgaaatttcagtagaaaattagtaatttgtttttttttctaaaattgaaaaatccactagtaagcttacttgcaaatgaatttgatgggttcatgatttgaaattaaaatttttcgtttccatgtaattttttttggtcggagatggaatgctttttctcttttttattttattttttaaataatcgtctattaaantttatggcgctactttaaaagtggccgtttttggaaatttttcaaaattttttttacacatttttttttgtttgtacatgcttttaaactctttttaagcaaatgttaaagtttccagaaattctatcattcatcccagcaatctgccggtagggctaccaacattggacgaaataaatttgagatggattttgcacaaaattctgacgagatgttacaatttttggtggtttttcaaaaattgtgactcttcctgacggcacccaattcaatgtcaacacgaacaaatgtgaaggattttgggcccaattgaagcagaaacgaaaagaattcatggcacaagcattaaattgtccacatcttatatggaagaacaagtttttagattgaatgctagagctaatggaatgtctgtatttaaggcttgtgttgaattgttgcattgtaattataattttaatgattaatcttgttaattttaataaaataaatttaaaaaatgtgtaaaaaaaattttgaaaaaatttccaaaaacggccacttttaaagtagcgccaaatttattatttttcgacaccgatttgaatcgtataattaaatttaaatatttttcattttttggcacatattttagcttttttttgagttttagcacatattttggggatttttggcacatatatatgtacagatttggcgtttcttagcacatataaatccgttccctgctaattagataatttttatggtattttgtgccttttttcaagaaaataaccattttaaaaatttatttacatattttttgtacatacttttggcagccctactaatatgaatgatgctttttggcaaaccaaaagaatgccgtctaaagttttcagcagaaaaacagaagaaatcactaaaatgattttacacaaattttttgatcggctgaattttgagtttaaaatgaattcgccagaagaaagtgccga

SEQ ID NO: 17632 - DNA, 1105 bp, Heterodera glycines
tttttccttaaaagaggataatgtttgatatccaacaggagtatttcctctgaattttaaataattgaaggctggaagctgttgaattttgcaatatatgcatagacttaaccaattttttccaaaatatttgtctacaaatgctaacatcggatatgccattctatggatggcacttttccgacaaaaaagcgtatttaaacaatgcgaataagccaaccaataccaaccaattagcatcattaatttattcattaaatcagccaaagatccttcaaatatgtcttctccttcttcgtccgtctctctgcttgccatcgtcgctattttctgtttgctgtgcaaatgttgcatttcggcaccgcgtaattaatctttcttactagtaattaactgtaattaataattaattgcttttcaacagatccgtgctgtcccggcagtcaaaaagtggtttcgctgatggccaattacgttggcactttcgcccattccttttccaagtcatcgctttgttcggatgcccaaagtgttgcgggcgcattgaaaggccaactgatcggctgctcgaagggcggcgacgcaactcttttggccgacatcgaagcatctcttgccactcattctgctggtaatgatggactaatggatcaaactaattgccaaattagccaataattattttatttattttaattattttgatgtttttcttcccctttttgatgagtgtgcccacagcctcggcttcgtccgtgccatgttcgccattgccgcctccgcttcttcccatgccagcaacaacaacgaatggcaggcattgagtgcccagtttggtcagcaaatcagtgaaattgactcgaaatgtgccgagtttggcattggcattgccaaagtgccatatgacggccccaagggtaaaactaataagagacaataattcattaattatgcgatctcttaaggtgatcactcccaacgaaatgtgcatggcacggacagtgtaattgccatgcctggattggccggctcacacaaacaatgaatagaatcaatgagtcactgaatggaacgaaatgattgtggagttcgtttttgatattgt

SEQ ID NO: 17633 - DNA, 2561 bp, Heterodera glycines
  unsure (1)..(2561): unsure at all n locations
ttttttttaattttttattaattttttttattttgccaacaatttatatgaaatgtttttttgttccttttcatttcatttttttgttttgtcactttatttttaattttgaaaataaaatgtttccggtcaaattttggtttttcaaattgcttttcaaatcccatccaactccattgatgccgtcattaaactgctgaaggatgaagctgaaaaaggagaaaaaattatttttaacaaataatttgtaatttgcgggtttttgtcgacttttacaaataaaagaaatgnaaaattctttcaatgggttttcaatttttctactttcagtttttttaaaggaatgtttttttttgcacccaaaatggcaaaaagttgaacctggattttttgaaaaaaacacaatctctaccgaaaaaaaaccgacaaaataaatgttctcagaaagcatcagctgctgtcgtgtaaaaatagcgcaatggttaaagcgcgccacagaaatccatgattgcgggttcagccccacgagcacgcatttatttttatttaatttgacatgtttccacacagataattcaaataattattttttggtaaaatacctaactaattaaccaaacaataataattaattacagttaattcgaggctcggattggtctatcaagtaatataaaaaaaagttgcgctatttttttattaattcacaaataaaaatttattttataaattcttaataaaaagagaggaataaatgattttaaagagcatctctgctgtcgtgtaaaaatagcgcaatggttaaagcgcgccacacaggtttaatttatcgcgggttcaattccgtctgcacgcagttttttaatttttaatttgatgttttctcgcagaaaacatcaaatatttaactatgtaatgttctcctgtaagccttgtttttcctagacctgaattttcttggaattttgcctagtatagaacccaggtccaggctgttttcaaaaatatccaattaaaaaaaaatttgcaatcaccctgcaacagtctgtcgactcgctccagaatttgcatcttttggctgcccgaatttggcatttttgtcttggttgttgcttcatctgtggcattttgttgcactcggctccaactttggtcaaattcaagccgataggcgccctcaaaatgcatttgtcggcacgctaacgcgcactctccgccccattcatcgggcgaaattagggaaaagaaacggcggcggcactgctgttcttggcatttttgctgtggtggttcgccgtcatcggcaccagcaccaacagggcattgttggtacaaaaaatagacctgaaaacaaaaagaataaggaaacaattattgaaaaaattatttattttttagaaaaagaaaacattgtaaaaaactggagccagccggacgggggcatgccgcccaaaaaatgaggggttttatacacacattttccaaaattttggacaaaacaaaaacaatgaattagagacgctttaatttttcaccagaaattcctcttgtgcttgatgttttttaaattctaattttgaaaacggaaaagtatgtaccaaacctggacaatattttagtttgattattccaagtgacaaatatttttttttgagttaccaaaaaatggttaaatatgtaggtttcaaaacattatctctgttaattagatgtttagcttttccgcagcaatgaaatgattttttttaacattttttttcttttaaacaaattccaaaaaatccagctccaggcctggggatcaagcccatgacaagcctttcgagaaatttggacctctattttatgaatgtattttgattagcaaaagtgccaaactcaacttgcccggcactttcttcactttgcattcaacacaatgcagctcattgtcatgttgcgcttttcgcagcacttcaatcgcttgctaaacaaacaaccgtttttcaattatttatgccaaaaaatttttgagtcattggaatcccgattttccacaatttttttaggcttcggcacttatccctggtcccgatcatttccccccaaaaaactcgggagtcccgagaaatcaaaaattttttgattgaaactgtcataagaacttccgcccgtccgacgacacacttttcgcagaaattccatctgttcagcgatcatttccaactttccaaccgcctgacatttcacaaaatcacgcgcagattgaattgaattggccaatgccaccaattcgtgggcgtcagccaatggcacaacatttcttggcgtgatttgaactgccgagaaatatgtatgtatttttttgtttttgccgatttttttacctttattttccatgctttttacaacatcaagccgtgttttgctgttgttgtcaaccatttttacaataatattacagaattttgattcagctgaaaattaaaaagaggctgcttaattttctgattttcatacatatttggacacttttttatttggggtgaaaagatgaaaaaaaaaacaaatttttttttatt

SEQ ID NO: 17634 - DNA, 1356 bp, Heterodera glycines
ctcctccatctctaaaaaaaactcccccccccctccctcaaaaaatttttttgcatcactccctcaataaaatttcatttcccactttttaaaaattaaccctcaccctctaaaaaaatttcccaatttgccaggtgttggatgcgcgtgaccccctcggcagtcgcagtgcacaaattgaacaattggtgctggacagtggcaaacgcctggtgctgttgttgaacaaaattgacttggtgccgcgtgacaatttgctcaaatggttggcccatttgcgtcgccaattgcccaccatcgcgttcaaagcgtccacccaacagcaaactcagaagctggtcggcaatttatttaatttttaatttattggaatttgtgtgcattttattgcgggttcacttcattcccgcctcctccgcttgaaaaaaattatttttaatcaatttttcataaaaaaattttcataaaaattcgagaaaacatttttctagcgattccttttaaaattttaaaaaattcgtggttcagcataaaattgtgaggaaacgctataaaactttttcaattttttcttcttgcaattataaaaaaaaatctatgattaatttaaaaaaaaacaacaaaaatttcggcggcgagatttatttgggtgcttttttggaccaaagtttaactctttttttgtctctctctctttctatcttttttggttaaaaacaaaattttttttccttgtttccagggtcaataccaaagtgccaatctgtccggcacattctctgccaaatgcattggtgcggatttggtgatgaaattgttggccaattattgtcgcaacaaggacatcaaaacatcaatccgagtgggcattgtcggtgagaatagccattatattttacgcattttaaatttctcgaacgattttattgggaaatttttttgaggatttccaaatgttggcaaatcgagcgtgatcaacagtttgaagcgccggaagtgttgccaaacgggtgccatgccagggttgacaaggtaagcaatttgaacaaaaatagtgccgacattttgctaaaaattattttcggtcggcacaaaattgcctttttgtgttgttttgttttaaaatatccaattatggtatttattatgaacttatttatacaaatacctcagaattagtagaaaactgcaaaaaatatatgatggagaaggtttattggtgccaaaattttgaaataaatatttgggtctgaatttccgacacagtccagtagtgtcttgtccaaatccgccaaaatcggcatttttccaacaaaaaatggaataagtttcctaaagacaaatgttttaaataat

SEQ ID NO: 17635 - DNA, 2814 bp, Heterodera glycines
ttcgcaatcaacgtcacttgcccaaggttattttattgtaaaatgcaattaccaaatcttttatttgttttttttgaaagtgtctcaaaaggaaagaaaaaacgcggaaaggggggaaatgtgtcgcaaaaggagggccagcagcaaattgggtcgggcagtgacagcgaagagggcgccgtaggggcaaaggcgagcggcggatgcatcagagagaggggcggcagcggaaattgggtggtttacacaagcgcattcggatggaagccgagtggcgagcagcggacgcaaattgcgaaggatccgccgcgactcgtccacggagacatcattttggccaaactcaggccgggccaggagatcgaggcgaggtgggtcggcaaaggggatggactcacccctttacgatgactttgccattttcagttgtcattgtgtcaaaggaattggcagagaccacgccaaattttcacccgtcgccaccgcaacgtacagactgctgcctcagatcaaactgaaaaaggacaactttgatgaggagcaggcggcacgactccagtcaagtttttccactggcgtaattggaagggacgaacagacggggagaggtgagagagaagggactgatgtgaacgtacaaagggaagagacgtaaaagaggtgcacgtcccccccccataaaaaatttaaaaagaaattcacgttacaagtgggtgggacgaattgtcgagtttgagggggcaggggacgcatgtcttggagaatacgacgcttttcaaaaaaacaaagaggggtcttttgaattttatcaaaaacaaaaggggggccttttgttttgcaaaatttttttatgataaaaaaacccatgaaaatttgttatccggggttttagagggtcgctgatcacgaatctgacatctaattcgaggtcatttaccccaataaccccattaaataaattttcatgactatatattaaaaaattttgtaaaccaaaagggtccccccttttgtttttactttttgataaattcaaaagactcctctttgtaactagcgccgagaatactcaaacaatgaattgtctttgtttcccagtttatgtgcgggatgctcgcgctgacacttcgagtcgcaacgtgttcatacacgacgacctgaaagatgcggtggaaatgggcaaaaagaaaacacatttcatttgtaaggcgaacaccaaactatttgcactcaaatgctcataatcactttctttagttagcgttgaatcggtcggcgcattgccttctcacaaattggtcattgaagcgtgcaaagtgatgagggaaaaggtggaccatctgagagagcaaatcagctcaagattagaaatgctatgaaaacagtcgagaattcgttgttgatttattgtcttgataataaaagaaattttcagtgctttcatacaaacagagtaagggcatggttttaagggaataaaactagtccattttgaattcactttctggtattagaaaataactaaaaacacatgccccaacaacagtatcaataataaattacaatatgcttgttgagcaattacgatgaagtttcggtggcatttgcaagcctattcaatgcttccgtccttgagattgatttggtcatgtcttttttctgttctttcggctgactgtcggtcatcaccacacttggcatcattgggttaacgacggcgctttcacgcaacgcacttttgccttccccagaccatgggaaagtccaatttcggtcctgaaaatgatgattagctttgttacaaatggtcgatggttgcccaccctccgcggcattcgcatttcgtcctgcaattccgtaaccagcacattcagtcgcattatctcctggctcgtctttttgctcagctctctcaattcctcggcgcttgccaattccttctcctctttgtgtgtgaaataggaataagcgtaaaacaccacgacagtgtagccgaaaatggccacttgatggatcacttctgaagcctgaactgaacggatgctggaaattatctttttaatttaaccatattagctaattggtggcagaaatcacccccccccccaaaaaaaaaaatcagattatacgttaatttcaaaatggaggagcccatggtgacccaaaggtgtcatttaaatgtggacctgttcaagcgctgtctcttccgatacatttaccactgaagttggtgagccgaggtccaaatttttcattcgcaattttgtggaccaatttgtgatagctgaaattgacgacgattattctttggaactttctccggtgcacacacttttccctattggtattaacactctgttccgaaatgccgggtgttctttccccaatcccataaaatatccagtgatgggctttgacaactgtctggcgacgatcatataaatttggataattggaagacccatcgctgttaacaggtcgctaaaaaattgaaaattaagcaacaaagaaatgatttttactaggtcgttgcataaaaaagggcgcttttttagaaaaaaaattttataaataaaatatcaaaaataataatcataacaactgtaaatacaatatcactcaacaaaatagtttccctggaccctaacaacctttctccaacgagaaggaagtttcctaatgccgcgacggaaaaaatctgtgccgatctttgaggtcaggtactgccccaccgcctcctcgacctcggcgtcttcagtgaagcgcctacccagaagaaagttttgagagaaagaaaaaggtggtaatccgagg

SEQ ID NO: 17636 - DNA, 1280 bp, Heterodera glycines
ggcgtcagcaagttgaagactttgcaaaccactcagcgaatggaatacgtggcaagggaatgaaacgcaagcaaacttatgtggaccaagacatgaatcttaatgagttatacgtcacgcgaaacaatcgccatcctctgcaatatttgcgcgcaatttcccaccgaatggcagaacctctttaggacaaaaatcaatgattttttatgtttatagtttttaaaacgtaactaagaacctctttaggaataataattgatttatttttcatttttaaaattaaaaataatttttaaaaatttaattttggtgtcgtattttccgggtgtcgcattttctgttttttaaaaaaaatttacggtgtcgcattttccgccggtgtcggattttctggtgtcggattttcttggtgtcgcattttcagggagccatctcgacagtgttggtttcgacagtgattgattttgacagtaaagtttattttttaaaaaacttattctaatggtataagagggtcaatggcaactcgtacaattggcaactcatacacagtgcaactccgctgcccgtcatttcgtccccgcgtcgtttcgtcccctaagccaaaatgagtcgtttcgtccccaaattaaattatatttttaaaaggcattacatttcgtttttagtgcctattttggcattttttagagcctaaaaatccgatcctagttaatgaagtaataaaatactttattaattgagcaaataatataacataattgaaataacatagatcaaacaaattctaaggggcattcatcgaatcttccagattttcatagtccttcaattttctgtgcctggctgcaatgtcgtcgttgatgatggactcaatgagtactgtaccaacggcgaattttgctccactgtcgacggccatgatagtgttgagggggcgggcgagtcgatgccaaattgcaagggctgccgtgagtacgtatggtctgatccaacggacgaaaatgatgtcccagcaaacgcttaaaagctaattaaagaaaaataaaacaaaatgaaaaaacggacacgaaaatggagaaagaccaccaggacgaactccaaacgcattgtcaccgtcaacaagctgttgctgcgtcattccgatgtacgtcctcgcaaagcagagaacaaactgctccatctccataggggcggtgccgacaatgacgctgaatgcacgactgacgtaagttggcggcaacaatggcaaagataggacatttctgaaaaatttatga

SEQ ID NO: 17637 - DNA, 1345 bp, Heterodera glycines
tttagataaaaaaaatctaaattgattttttagcctagaaaaacttttaaaaaattctttagtttttttacgaatttttcagctgatttttttaaatttcataaattttttgaaaatttaggtgttaaaagtttggataaacttatttgttagtgaacgccccgtgaaaaaatggggcaaattatataccaatcgattcgtctcgaggagctaagcacggaaaaatatgtctcgagttgcggaaatgtttttgaaccggtttaaaactcgaaaatttgagtgaaaaggggggttcctgaccttttaaaacgctcaaattcggacaaatttagtatcattcgaaagctcttgatgagctaagtctaaaaaatagagtgccacgggaccgggaccgggccgggaattcccggtcatccgaggtcccggttcccggtcccgggttttgaaaagctcaggtcccggtcccggtagggcaaccgggaaccgggaaaaacaagcactggtaagaatggggtctgagtgaaaaattagtgaagaaaattggagtaaaaggaaaaaatttagaaataataattaatatattctttaaaagtaacactgcccaagtgtgcaaatggcctaatggctagtctccttgactttcccttcttccttcccctggttcaatccctctacaaaaattagattattttcatcctcgatctgtacagacaatttcggttctgggccaatgccgtcgcaaattttgattgtcctccaaattgtcaattctttttttccgtcaaaatgtttgtccaccaaagcatcgtaacggtaagaaagcaatgcaattttgaggccaagttcagcacgttcaaaagatggcagaatatccatccaaacgtcgccacaaatccaactgaaatgcaaacgtaaaaaattacttaaaaagagaaaattggcacttttttatagtttaagggcccaatgtaaaacaaaagtagggagtaggtaattttgaaaaaattacaaatcaaaagcctgaaaccgcaaactcgtactgcgatttgaggtaaatttctgttttttcacagtacgcaaaagttgtgagcaaatttttaaaatttacaaaatcaaaagccggaaacccaactcgtgccacgatttgagacaaattttttcaactttttgttcgaattcaggtccgggattcgaaattgctcaaaattaatgttggattcgggttctccgactcagaaaaccacatgaacatgttttcacgactttttagaacaaaacaaaatttctttcaaaaaggggggccaccatctatagtatttactagagaccggcgcgggacgggatc

SEQ ID NO: 17638 - DNA, 2411 bp, Heterodera glycines
  unsure (1)..(2411): unsure at all n locations
ccggccaagtgattttaagtgcttttttggtgtctttttctggattttgtaatttctttttttttaaataaaaaaataccacaaaaagcacccatctaaaaattggcttaaaaattagtcaacaaaatacactcctaagaagttatttaagatatttcctcgactttttcaatttttgtgtctttttatcattttcatgtctttttcattattttaaaatttatgtgcctaaaagtccgctcacttatggtaattaaaaattatatattttttaataaattaaaaattcaaatctaatatgttcatcttttgcttttactttattttctgagctgctggaggatgcttcttcttcgttgatttttataaggtgagcatagcccaaaaaattatatgtcaaaacattggacatattttgtcgatttatatgaattttggcatacaataaggcatggtaattggccaaatcatttttcttgtccaccaaaattgtgcgattaaaatacaattcgggtgggtcaattttgcctaaattgacggtgtacacctttgccatgtttgtccagtacaatttgaatcgaattcttcggaccattgttcgaatgtcttcatcatccggttggttttcattattttcattcgccgacggttggtactcattttccattggtttcactgaaattgcaaatgtgagtgaaaatttctccactttggcctcgtcctctggctcaattaaaatgccaaaacactcgccattttgaaaattttccggcaaatttttaatttctttaatttgattgtttatacgaaattcttccaatgcaattttggtttctcgtttcgccactgttttctcatatttgacacaaatttgtaattgttctgttgtctcacaacagcggaaaaagacattgggaagaacgaaaaatataaaagtaataatattaatacggtaataagaattgctttccatctttattcaattaataaatttttgggtaattgttgaaactaattatttgaatttcttaattttttaatgaatttttgacaatacatgataaaacaacgaaatatcttttgaagctatcaaaggatatgaaaatcaaaaaataaatatttttcagtatttttttaaatggtgatattttttaagtagaccagtaaaggtgttaaatacgaataactgaaaattcttttggtacttttctgttttgtgaccccacctgaaattttcaaataaaaagtcatttctagggtaatttggggcgctgatcacgaatatgacatttatttttcaatattccgaatcccgaacccgaattcgaacataaatttgaaattcataaattacaaggaaaacatatttttatgggttttcgaggtcgctgaatacgtactgggtctatgcctaagcctaagctgaagcctaagctgaagtctaagcctaagctgaagcctaagctgaagcctaagcctaggcctaagcaagctgaagcctaagcctaggcctaagcaagctgaagcctaagcctaatgtgcgccgcttgcttcgctccggtcgcaccactacttgccctcctttctccgcgtgctggccattggcgaacgctcctcggcctttaaaaaaataatattaaatgccaaatgtggtcaaattaacataaatatggaagggaaggccccaatcgttagttttattttgcttccgatttatgttttccttgtaatttatgaatttcgaattttggttcgaattcgggttcgggattcggaattatgaaaaataaatgtcatattcgtgatcagcgccccaaattaccctagaaatgactttttatttgaaaatttcagggggggtcacaaaacagaaaagaaccattctttttaataaaaattatcaatgcgaatgtcctgcttaatttgtgccatcgattttatgtgcatttgttgctttaggaaattagccgttaaaaatcgatgccgtttaaaaaaatacaaaatatttttatcataattttatacaattaataaatgtatgcacattatagttgtataattccggaatattgaaaatagaaaattagccgtgaaaaatcgaggcaaaatgattgtaacgggtttttgaataacagatcactacaatccaaatattgtaaaggatagacaatacaaattaaacatctttttcaaattcaaggactcaaattggaagattctaaacgattttcacggcgccagatttgtgctcaaagccaggcacaaatccaaattcagtcgaacatttcgttgcacttcgtgagcattcgctcattgtttgtcttctcatcttttctttggaggatttgccttagggccaatagcctccattttctttcgttgcttgcttgggaagatgtggactcnntaga

SEQ ID NO: 17639 - DNA, 1217 bp, Heterodera glycines
acgggtgccacgcatgcccattcgccaagccctcgctttccaactgagcacgggtgccacgcatgcccattccaactgctcacgggtgccacgcatgcccattccaactgctcacgggtgccacgcatgcccattcgccaagccctcgggttccaactgttcacgggtgccacgcatgccattcgccaagcctcgggttccaactgttcacgggtgccacgcatgcccattcgccaagccctcgggttccaactgagcacgggtgccacgcatgcccattccaactgagcacgggtgccacgcatgcccattccaactgctcacgggtgccacgcatgcccattccaactgctcacgggtgccacgcatgcccattcgccaagccctcgggttccaactgctcacgggtgccacgcatgcccattcgccaagccctcgggttccaactgttcacgggtgcacgcatgcccattccaactgctcacgggtgccacgcatgcccattccaactgctcacgggtgccacgcatgcccattcgccaagccctcgggttccaactgctcacgggtgccacgcatgcccattccaactgctcacgggtgccacgcatgcccattcgccaagccctcgcattccaactgctcacgggtgccacgcatgcccattcgccaagccctcgggttccaactgttcacgggtgccacgcatgcccattcgccaagccctcgggttccaactgagcacgggtgccacgcatgcccattccaactgagcacgggtgccacgcatgcccattccaactgctcacgggtgccacgcatgcccattcgccaagccctcggtttccaactgctcacgggtgccacgcatgcccattccaactgctcacgggtgccacgcatgcccattcgccaagccctcgggttccaactgctcacgggtgccacgcatgcccattcgccaagccctcgggttccaactgttcacgggtgccacgcatgcccattccaactgctcacgggtgccacgcatgcccattccaactgctcacgggtgccacgcatgcccattcgccaagccctcgggttccaactgctcacgggtgccacgcatgcccattcgcaactgctcacgagtgccatgcatgcccattcgccaagccctcgtgtcccactgctcacgggtgccacgcatgcccattcgccaagccctcggg

SEQ ID NO: 17640 - DNA, 2258 bp, Heterodera glycines
  unsure (1)..(2258): unsure at all n locations
atgttggggagtgataaaagatgattaatngatngantngggattgatcaananatgtgtcattttttaaaatatccttttcttaaaatgtaatgtaagaatccaccttcccccagtgaaatttaacgaattcaccaaacgggtgtgtgaatttcaattgtaatttctgaaattcgtttcgattgtagacgatgaaaatactcggtgctatatatacttcactaatcgatcctgggtcatcgacgacgttaactattcctaagagtggagccatctggttcccgataattgtgttttcgattaaatttggtgcataaatgtatagctgccttacacctcccgtcaaatccggcatataagtcgcctcttccgcgtgaaatagccttgtattcttaaatccgagcacataggctaggtgttttgacaaatctatatgggagacagcagcggaaagatagacaataaatttttgatcaatgctgtcgtagttaaattgaacatcctcattggctaatctctctcttttttgtggtcctttctcagcttcagatacttgtctattttcaatatctttacgtttaatatgctcaccgagcgcctcattaagcctattcactatcccgctaaaacccttttccgatttatcattatatccctcgagagttgatgtatatttggtctttgcctgtctggcgattccctttgcgacgtcggctgatttctttgcttttttcaagtcattcttttccacatgctccaatgttatgtttttggctttatctacttcttcttgaaaagacttaagttcatttcgggatgtttgaatttcggttcccatctcaaccattttgtcaaaccaaatttttatatcaggctcttctaaaatgtgaggatttgtttctcgtagtgtgtttagttgggtttggatggaattcgagatattgttgatctgattaaaatgtctttctacgtctctcccggcgcgttctgcggccctctttgcgacatcaatttttgaatctttggtatcttcagccttggcttctctctttccacgttgttttttgattttgtaatgatggctgaatgcctcgttaattttatttcccaggcccccggcggttttaaaattcatgtccggtaaataaacttgagtcgggacactgctgtcgttttcccatactttaataaactcttgaccgtttatactgagtgcggtgaatgagtaggggtaaataattgatgagagagctactgaccaatttgtgcccaattccaaagtctcggggagtcgtactgtgaattttgatgtaccgttccctggtcccggtgtgttcgagggtagcacaatgtaaggcatccatctattttcactaattcctggttatataatattccttttattaaatttccttccaaatcttcgatcctgtatgaatctggtgtcgtcgaattggcaacaacaattttaaacaattcttcggtaaagtttgggaggtatccctttgaaaattttcccttttccttggtaatacgaacgatatcaccgattttaaattttttcttttttaaaattttaaattccctatccttatataatttttcccagagcgcacgggcattttcaaaattaattgaagacggtttggctcccaatgttctattcacactgttgttaatgtttgttattattttgtctattacgtcgacccatcgaagagtgtctttctttgtaaaatatctgtacaagcgctcctttattgtccgatttgccctttcaacgactccggcgtgcagatcaggactatacattacatttttgatgatgaatttttcctcaaaatattttttcatttttcctgcttggaattcaagcccactgtcactatatattttcatcgggataattttagacttttcgaacacccgatcaaaagcctcgatcatgtcctcactcttctttgacttggccggtgcactgaagatcattcgactcagcacgtcgatgcagaccaataaatatttataaccgtcgttatgctttttcaactggtcaaatatgcacaaatcgcactgccaattggtatggaagccacttggtatcgtctttagtctcgggaatcttttcctgatgggcttgtgaatcgtgtatgttttctgcttttttaggaatttattaacgtcatcggttgtaattttcgggtcaatctttttgaccgtcattaaaaattttttgaattcccagcanaaacttgccg

SEQ ID NO: 17641 - DNA, 1104 bp, Heterodera glycines
aatagtgacattaggccataaaattttaaaattatgggtttgtttaagaaatcagaacaaattttggtcgctaccccaaaatcagaacatttctgacaaatcagaacagatccgaaccctgatttataaatgcttttctataaattgttaaaatctgatattttaacttttgcctaatttttcagaatttttttgcatttttttcgtgcttttttggcgtttttgtgactttttttggtacttgtgtgttatctgtgggccgattttcaaaaatttttatgtttttcgctataacttttttctttggcatccaaatccaagattgttgttataattcgaaagcttaacatgtttcgaatctaattctattagagtgccacgggaccgggaattttgggcaaacccgggaccgggaccttttcgagttgaaaaaccgggaatttttggctgggaaaaccgggaaaaaaccgggactagtcccggtcccggtcaaaaccgggaccttggtactcagttgtactcagttgtccgctaccaggtcccggtcccgtggcactctaaattctatgtatcacttcgcgattagacaattaccaaaaaaagttatacatgaaaaacatgaaaattgcgaaaaggtcgaaattatgaagttttttcttaataaaattttttccaggctagaaaatcatttcgttttttgtaaggctaatagagcatatgaagagctttcgaatgataccaacaatcttggatttggatgccaaagaaaaaagttattgcgaaaaacataaaaatttttgaaaatctgcttgtttgtaatacattgtaaattgaaaaaatccgcttattgtaatacctggcatttaaaaaaacgcattagtatatttgaaagatggatacatcgattattgtaattacaactcgccttttgtctccttctccccttgctgcttttggtgtttttgttgtcccttcaattcaccgattcaatcaaaattgccttttcagtaatacataacttaaattggaacaaatcctattaatatttgacagtaattataataataatgttacggtaggtacagtaattaaccattgctcatt

SEQ ID NO: 17642 - DNA, 3454 bp, Heterodera glycines
atgtttgtggatcgtttgttcccccttgtgaattctcatattcgctcatctatttgtcgaactttctacatttggtcggtgcctaatcccccataatcattaattcgtatttaaattaattccgtcaacaaatttcaaaatagaggaatgtgcaccgacaaatgcttatgaattcgtttgtgaaagttttttttccaatattttttcacgtcgacgttttgtcccacgatgtttcggctggcgacatttttgggtgtaccgatttaaataggagcaaattgcaaataaacatggggatgcgtatgttcaaaaaaaacaatttttgttttcgaaagggtctaaccatagaattctgaattttccgggggattttttattggtaaattgactcccataaaatggcgaccaccttttttgatgagcatcgaaaatatgcggttggaaaatcagaagaagggcatcaccgtctcgcgttttgtttctccgccgcttcgtttggtcccttcgtcctccgttcgcttttccctgtccttcttctttttcttcttctccttcttccgctttttctccttttcgcgtcctccgttctcttcggctccgccgctttttgctttcttcgcttttcgttcgacttctgttcggcaaattcacagtataacaatggtctttcattatcataattgcagataccatccaatgtcagttcgtccaatgaccgtttgacgcgctttcgctgtcggcgttcgtcggtggttttggcctcggactcaaattgtgtcgcagatgctgagtgggacagaaatgccgtcgttgtgctggtggtgctgctcgtcggttgctccggcaaatcgaagaagcgattggcgttgggaattgggcctaaagaactgtgtcctctaagagattatttacttccattgtcaaggagatttgaattggtatattcattcacttgtcaactcttgcactgacctggtgtcaatttaaatccgaccatttggctggcattcaaattgtttatttctcgtcccattattggcgggtcttcgatcagtttccgaagagaactgaaatatgtttggaactgaattaacaaagcattatgatatgtataaacaaaccattgcgaatccgcctttttgtttatgtgcgaaccggcacaaacatgtggcaaaaacgaggcgaggtcctctcgcggcttcttaacaccacagtagcggttgtacgcaccgctgagatcgaaaagagcgatgagatcgtcgcttcccaacaactgactctgagctaaagcgatgtgggagaataagcaaagaagaaccatttgaatgaatgcgtatgatggaaatactctcataatgcaaatttataattttttatcccaaagttacggggaagttcgggcttcattccataaaaaggagacaccagcgaaagttgagactgactgcctttgagcgaaattttagtgcgcaaaaaaccagaggaaatcccgctagcagcagcagcagcagcagcggcagcggcttgttgttggtccatgtggacagcacacttcggagttcaatgttttccaaaaatttccaattccgtccttattcttttaatctaaatttgaatttacgtgagatgataatgattaggtatttataaaaatcttaattttttaattctctaaaatcggaatttttgtgatacttgatgaaaaaccataaatcatagacaaatgatggcttttgtaaatctacacaattgccggaataagcacaagcatcaatatgggtccgctccagggatgcgcgggatgccgatttcgatttttggactcgggattaatttctgattgtcctcggcatacatcccgagaacggctgtgaagcacaacaaacacaaacaaataatcaaaaaacaaaaaataaaaataaataaatgcgccaaagcaaatttacaaattcctgaatctgcttattgtgtgcaaaatctcgtactttcctgttttgaggccacacccaaaattctattcttatgtgaatttctctgtcgtgaagactgcaaacacagagaagctgatcaatttgagaaattttgatctgcaattattgaaatttgcctcctcactagtgttacgcgcgacttgtttattttgcgcgcccttttgttgactttttaaaattgggtgtggcctcaaaacaggaaagtacccaaaatcttttttaaaccgtcaaagttagccatttcacagtcatctgagtaataatttgtcccattagaactcttttctttttagatttgtctgatttcaaattggattgaaacttgagagtgccgatcttaatcgaattttgaagataatttcagaattcccatatattctttcgtaaaatgccccaaattttggatggaataaagcttgactttcgtgatgttgtgagtttatcttatccattcatttcttaatggaataaatttagttgctaatgcccaaacgttcacagctcgccagtcgttcagaagttgacttgaacagagagttagttagctatactgcaaaattacatttttttcatgccttttagatttgtttttaagaactcgaaagcgacgtacacgggaattccaataattgcatcggtgggatagctcgttccaatgttatcagttttgggctgcttttatagaacatggacacagttggcacttttgaaatggcggaaacactcagccaatccaatttgttcactactggttcgaccccttacttttaacattgtcttcttcatttttagtacacaaacattacagtgttgaggaatggaaggaatttgctaatcgcgtcagaaacaattcgaatgtacagtagtgaatcgttttattttattaagggggcaatttcacatgcatttttagcattggaaattttttgtttaaaaaatcgcattcttttctttgtattgctagataagtacatgtaaagcggattttgccttctttaatttggaaattaatttaaggtgctcaacaatatcgctatttcgtccgggtcgcgttccgatgaccttaccaaaatgcgtgacatttgcgacgccgtgcccgaaataaaattcatttgtctcgacgtggcaaacggttatagctttattttttcatcaacattcccacttttaggctattctgaaactttcgttgactttgtgcgcaaagttcgggaggaattccgcacctccacaatttttgctggcaacgttgtaagttattttttatttggcacttttttgtcccctttttgattggattcaattcgggactttgcgagaaatgatggcttttttttaggttaccaaagaaatggtggaacagctgattctgtcgggtgccgatgtggtcaaagttggcattgggccgggcagtgtgtgcaccacgcgtaaacaggtccaaccaacagcaccgtgcccaacta

SEQ ID NO: 17643 - DNA, 1775 bp, Heterodera glycines
aaacataacgaaattttacgaaatcttgtagcttatagtgaacagtaagggctatcgaatgatatcaagaattaaaaattcagttgcttttcagctaagttataaataattttttatccaaatcataatgatggtttttaagtaacgattccgtcccctattattgggtagttcccttgtttaaagttttttttctgggccacgaaatggcacttctcccccatttgccgtactaaacataaagcttcttattaccctataagctgggcactgtgacgtccggccttggcaccgctcttggccgttaccgtaccacgctagcaagtggtactgctgggactggtggcaatgatattgccagcggcacagcgttcgtcggtccaacacttggccatgcgatggggctgctgatgccacgagggggcgctgcggtgccatcacgcagcggtgcagaaacgccgaattctgcgcacaaagtgtcacagtcgataagtgggcaaattttatttctctatttcaacatacaattaaatgtaatctaaattaataaatatatttatcaaatttcaattaatttctctattggtttggcgcataactattatcattttttttgttaaaaataaaaaatctcaaaaaatattgcaaattagcttaaaatgtttgaaaatgatatttttcaataattaggtttaaaatcagaaaacccgagttttacaatttaaattcaaaccaggctcaagaattttttttctcggcacttttgaaaattggccaaaacttttttgtgccattttgtagaggacaaataaggctattaaaatgacaagaagcaaactaaacacaaaataaccctttggaaaaaccctgctataattatttactgtccgttattattttgaaaaatttggcattttgaaaccccagtccaagaaattgatcattcaccaatctccactgatcagatgaagaagcgtcggatgagctggaagaaagcagcgatagcaatagttcatcttcatccaccagtgatctgttggacacaaaaagttttgtcagtgccaacaatgaatcggatgcaacaacaacaaatgctggagcagcagcctcgggcaatgccaacaacaaaaagcatacggttggcacagtgccaacaacaacatcaccaccaaatgccataacaatgattgacattgaggaggaagaaccactgctagaaaagatggacaaagacggtgtaagaaaggtgccagaaaaaacgggtgcatcccaaaatctcgccaccgaaatctcgctgatacaagatcaataaaaaacttcaaaaatagaaatgcaaaattctagcgattttcgaaaattatgatgaattactaattttttcaaaactttttcagaaaaatcgctagagaaatctttacaaaaattttttcttgaaattttcttataaaaaattatcgaagattttttcttaaaattatcttacaaaaatgtttataagattttaaatttaaaattcggcggcacggttttgttgcggcaatatttcggtcggaaaaatttcgtcccatctccgaaaaactctcttggcatttttgtggaattttgaaaaattgaattttagatagaaagtcaaaagaccagccgcggcagagccaaattgccaaaagcaggacagaatggacgggtcagtatttttttttttggcattttgtattaatttccattaaaaaatatcagttttgcaggccacgaccaagagcaaaatcgagcgggcc

SEQ ID NO: 17644 - DNA, 2235 bp, Heterodera glycines
ttcgtacaataatcaaattttaaaaaaatgatagtgacgcataatttcatcaaaataacaaaaataaagcaaattataaataaataatgagctaatgattatcaaaaataacaatagtaataaccaaaacaataaaaattcattcgagctttcggagaatttgcatcacttcagctgaacttggccaatgaagttttcgacaaactttaaatttgcataacattttattccactcctcaatctttttttttgaagaaaggggttagcccgtcatttttactaaataagaatttttttgtacgaaacgccaaattgaaacgttgtacgaactgccattgtacgaactgctattgacccgatcttctgctgttttgttttaggaatgaatgcggcagttcgctcttttgtccgaatggcactttaccaccgttgtcatgtcttcggtatttacaattcgtttgaaggattttcgactggtcaaataaaagtgagaaatgttctaaaagctttaaaacaactcatctgacatgtgcggctaggaattgtcttggtccgatgtgacgtggtggacaatgcagggcggctccaaattgggcactcagaaacaattgccgcacaaacacatcgaagcggtggccgcccaattggaaaagcacaaaatccacgctcttctgatgatcggaggatttgaagtgcttccggaattcctaatctacggtttctctcactttaggcttaccattcggcgctgattcttttccaaaatcgcagcaaattttctgcttttcgaattcctatttgcgttattccgtgcacaatcagtaataatgtaccgggcacttcactttctcttggtaccatttccaaaataaataaatatttatttttcgtcatttaggatcggacacggctatcaatgccatctgcccaaatggtggacaacattaaacaatccgccaatgggtccaaacggcgtgtttttctcatcgagacgatgggagggcactgcggctatttggccacggtgtcggccatcgccacgggggcggacaatgcgtacattttcgaggagaaattcacggtggacggtgggtaatccgtgaattctttttggtcaattttgtattttacagacattaaagaggacgtcaaagtgatcagtcagaaaatgcaaaagggggtgcaacgttatttgatagtgcagtcggagggcgccagccataattacgacaccacttttgtacaaaagttattcagcgaagagggcaagggagaggcaagtgctattaatgtaattttgttttttgagggcaaccagggcctttccaacggaggctacagtcggtggtgtccccccccccccctcgaaagccgaaaatataattaagaaatgtaccagaatttccttaaaccataaaattgccatttttggcaaatcttttaataaatcacacagtcgttcgttgggtgttttcgacttctattgcgtttgtatgtaaaaaataggataggaaggagttggtgagaaaattttttccaacccccccccccccaaacattgtcaaaattcgaccctccgttcgtcctctgccgcgatttgcccctcaatgggaaaaggaaattttaaaaattttgaagaatgaagacagatttgaaattttaggttaaaaaaattgaattctgagattttaggcgaagaagggaaatgaaaatttcgagaattacgaaaggttggaaactggaaaatttttctaaaacagacgggataaaaacttgtaattttgtctataaatatattttcttattttaaccaggaaaaattatcaaaagccagcattgtggttgcaacggccgatagccttgagaaatacaaagcggtgactaaagaattttctttgcgcacgcaaatgcatgttctgggattcaacaaaaatgttagcttttttaaaagttaaaattagctaataatttgtatttcaagtcgaccggactcctttcaagcattcttgatgggaaagcggaacttaccgaacaacaacaagagatttcccgttcaatcaacgccattacggcggatgaagttctcgtgaaggaattcctggagttgatgaatgaggtcgaaaaaaagaaatgccgccgatccaactccgaaacgccacttgtgacctagacggtattattgggtaatctcgtaagcaagggcgtatctaggcccccccccccccgaaattaaaa

SEQ ID NO: 17645 - DNA, 1920 bp, Heterodera glycines
gggactcaacccaccaatatttcactgggactcaatccaccaacattccaatcactcgggactcaatccaccaacattccaatcaacgggactaaacccaccaacattccaatcattgggactcaatccaccagcattccaatcactggcactcaattctcctacattccaatcattgggactcaatccaccaacattccattcaacgggactcaacccaccagcattccaatcactgggactcaatccaccaacattccaatcactggcactcaattctcctacatttcaatcactgggactcaacccaccaacattccaatcacttggactcaaccctccagcattccaatcactgggactcaatccaccaacattccaatcattgggactcaatccaccaacattccattcaacgggactcaacccaccagcattccaatcactgggactcaatccaccaacattccaatcactggcactcaattctcctacatttcaatcactgggactcaacccaccaacattccaatcaccgggactcaaccctccagcatttcaatcactgggactcaattctcccgaattcaaatcactggactcaatctcatcaatccttcagcaacacaattaccgggactcagttctccgacatttcaatcaccggaactcaacctcagcaacggaatacagaactatttaaaaggaatccagaaattgaaatataacccataaatcaaaacactatggtgtataattattgcccccaccccataaattcaaattaaaactgacctgtttaaaactttccacctaaatttgatccgcaagtgtcacgtcaatatcccaattgcatataaatattccactcgaacacaggcaaaacataagatgtagcatttatattgctttttctatccatcaaaggctttttctttcattttttattactatcataacatgctttttattcaaaacaaatatcaaaaaccaaatcagataagtacaaaaaacttttttaagtaacaaacctttttcattcaaacaaattctaatgcatttttttaaccaaacaattctccattatcgtttacataagcaaaacaaaagctttcacatcaaaatcaaatcaattaacaaaaacataatttagacaaataaataatgataaacagcaaaaccactaattttttcttacacacaaaaatgtgctctttcttttattaaatattttataaaataaaagatgggatataaataaggaaggggtgctagacaaatttactattgtctctcccttccatttcttttctcttatttcttttacttttccacttactctctcttttttcccactccctccctctcccacacacacgcacgcatccagcagactgctgctgcacagcagcacgcgtctgttcactgtatgcccctcccacccgccgctgcccgcgtagaaagacagtcagacagtgcactatttcccacctttccctccctctactttttttcaaattcatttttaacgcaaaattcaaacaaaacgccacactaattcaaaaacggacacatacacacactcaactttattatataggattattcacaattaattaaatattaaccaacgatttatttgataattccatttaacaattaaaaatgcactagcattttggttttaaggtttcattaatttcactaattttttttgtgtttactcaaatattttacagttatcaattttgtgtaagtgcgcagcttaattgtagattatcacttgctgtcttttttattttttaaggttttagtcccaaaaaggggcctccaatttctaagaatttttgtctaaaaaccatattccgttttttgttgtaaaagtgcccgttttttagggttattttcttaacttttcag

SEQ ID NO: 17646 - DNA, 924 bp, Heterodera glycines
  unsure (1)..(924): unsure at all n locations
tttaattagatatcattcgcaattagattatgagttccttcctaagattgccctctaaagtcttggagtaaaaactcgccttattttaaccactaaagaatcaaatagatttgtttttctagccttacgcaaacatttcgaaatatttcgccggcatttgtggaaattcgacactataaaagtggttttttgttttagaaccttagcgtccgagtaatgaggtacaattaaatcctaatttatgattaaaattgtgcataaaggtcaataaataattttcatgtgggagaccgaaattttttgattgtacaccgtaacccttttaagtccaatggccaaaataggacgataatccttggcaaaattagcctatcagtatttacgaaccttttctgctgctaatcgctacctttaattagatagcattcgcaattagattatgagttcgttattcaaattgccctctaacgtcttggagtaaaaactcgcaatattttatccactaaagaatcaaatagatttgtttttctagccttaagcaaccatttcgaaatatttcgcctgcatttgtggcaatttgacactagaaaagtgattttgttggttttagaaccttagcgtccgagtaatgaggtacaattaaatcctaatttatgattaaaattgtgcataaaggtcaataaataattttcctctgggagaccgaaattttttgattgtcaccgtaaccattttaagtccaatggccaaaataggacgataatccttggcaaaattagcctattagtatttacgaaccttttctgctgctaatcgctacctttaattagatagcattcgcaattagattatgagttcgatattcaaattgccctctaaagtcttggagtaaaaactcgcaatatttttaccactanagaatca

SEQ ID NO: 17647 - DNA, 1112 bp, Heterodera glycines
tgaccaatcgtatccatcgaatttggctccgccccgttcctcctctttttgtggccccgttcccggcccatattcattctgttcgggagagggattggcttagccaatcccccaatctctctccctcctcccactaattatcccgagaccgaactgggagtcccttccccatcccacatttactcatcatttactcataatatataattgtattgtgcgcacattactgaaataaagagcatattcaaatgccgccgctgggatttttggggagggacccgttgcctatttcaccctctaaagtcttggagtaaaaactcgcaatattttaaccactaaagaatcaaatagatttgtttttctagccttacgcaaacatttcgaaatatttcgcaggcatttgtggcaattcgacactataaaagtggttttttggttttagaaccttagcgtccgagtaatgaggtacaattaaatcctaatttatgattaaaattgtgcataaaggtcaataaataattttcctctgggagaccgaaattttttgattgtacaccctaacccttttaagtccaatggccaaaataggacgataatccttggcaaaattagcctattagtatttacgaatcttttctgctgctaatcgctacctttttagatagcattcgcaattagattatgagttcgttattcaaattgccctctaaagtcttggagtaaaaactcgcaatattttaaccactaaagaatcaaatagatttgtttttctagccttacgcaaacatttcgaaatatttcgccggcatttgtggcaattcgacactagaaaagtgattttgttggttttagaaccttagcgtccgagtaatgaggtacaattaaatcctaatttatgattaaaattgtgcataaaggtcaataaataattttcctctgggagaccgaaattttttgattgtacaccctaacccttttaagtccaatggccaaaataggacgataatccttggcaaaattagcctattagtatttacgaaccttttctgctgctaatcgctacctttaattagatagcattcgcaattagattatgagttcgttattcaaat

SEQ ID NO: 17648 - DNA, 1773 bp, Heterodera glycines
taataataataataataataataataataataataatacttataataataataataataataataataataataataataataataataataataataataataataataataataataataataataataataataataataataataataataataataataataataataataataataataataataataataataataataataataataataataataataataataataataataataataataataataataataataataataataataataataataataataataataataataataataataataataataataataataataataataataataataataagataataataataataataataataataataataataataataataataataataataatatgataataataataataataataataattattattattattattcgcctcgctgggttagaaatttcctcgatgccgtagttgagcacgtcgcatccgtcgtagttgaacagtcccgcaaataatgcatttgttaggttgccaacatcaaacgacgaattggcaaatggttggcgcagattttcggtgtaacctaaaaaaagaggaaaagcatttggaaattaaaaaaaaattaaataaaaatatttaatttgttttttataaaattcaattggcccttttttgtgctttgcccacctttaaataaaagccaatagaagccaatgccaatgatcagaagtgccgagagaaatttggccacgctggtgaccaattgaaagggcgcgaccaccgaacgaagtgagaaaaagttgaggaaaatgatcagccaaacggagcaaagggcgatcagtttgcgaagagcgaacgcagcggccgaattgtgctgatcagaggcgtccatcagcagcgagtcaaggccaaggccctggacaaaatactcggcgaaagtgtccgcctgaatggccgaatagagcggacagatgagcaccgacccggacaccatgaacatgaaggcgagcggacgcctaaaattggacggacaaataaaagacggacaaaagggacacttggccaaaaataatattcaaattaaaaaagtgtaatctgtgctcaaataattttttaaatgagaaaatcagttttgaaggttggcttcgtcttttaatgagcttttttcatttcgaaacatttaattgagcgccacaaactctgaccatttgacgtatgagagataggcaaaatcgctgcccgaccggcgaatgctcgtgccgagttcgatgtaacagaaggcgcccaatgtggtcgcagcagcagcaagcagtgaaatgagcagcgaaagtccaatctgacaaggaaaacggagttaacaaatccaaatgtttattccattgcccgcgacagtttgaattttagtctttaaatgggtttctttgactttttggtttcagttttttcgacttcttatgaaaatttctcccctgagttgctcccacattttctaatttttttgggggggggggaagggtggcatttaatagttttcaaaaataacatccccaaaactcagacaaacccggaaactttgaacaatttgagcactgttctgggcaatttttaatgttgagtcggtctttcactgacaatgaactggcaatgagaccattaaacacctatttaattttccatttcataccgaaggttataagttgtatgcactaaaaatgcctaataactcctaaaatatgcactaaaacccct

SEQ ID NO: 17649 - DNA, 1175 bp, Heterodera glycines
atgacgaaaatgccgatgaagcaaaatggaaatgttttggtctgagaaaatacagagaaactaaaaatagtgactgttttatcatgggaaataagccaaggaaaaagggcggctaatgagggaaatgaacggtaaaagattaaattaagggagaaaaataattaaatttgaaaatgatttgatattggactcgttattaattaatttatgaaactaataaaaatattttttattcttttagcaaaaattttcgatcggacgaaatttgatacataaaataaacggacgatggtaatgagaaaggatttttgtttatttgaatacacagtgatatcgttcaataatgaatttcgaatcggaatttgttacttttttaatttccaaaatattattatatttcgtcatttttaatttgtcccttttttatttttaattattttttttgtctgatgggtgttagtcccgcctcggctgtgtccaccgcgctgaatttgttcacaattctgtccctgccaatgggccaaaaggaattggacacggacatggccaaaattaatacgtaacttaagcaattataagccaaaatcttctgctggtttcagacacatgcatgaattggtgccaaaattatttgtcggttatgacagaaacgcacggccaatttcaaaggatggcaaaccgattgaggtacaaaaaagcaaaaaataaaaataaaatgttaaattgaaatggatataatatccaattaatttggcctatctttctcgaatgagcagagccaattaatgattcatttgcagatacaaagtttgttggtcgtggatcacattgaacaattggtgtgacaattaatttgcccatttttaatttattatgctaaagttaattaagaatgaggaagaacaggcgttgaatttccacggcacattaatgctggttgctcatccaaaataaccgggatgttaaatgagagtcaatcaatcactttttttaaagatgtggcgcgacgaacgattgatttgggaggcggcggattacggccaattaggcagtttggcattcaccggcttcgacgtgacgcgcttttggtcgccagaagtgataatcaaagggatgtgagcactcaaaatgctcatttttgttttcttatttttctaattttcgaacaattccat

SEQ ID NO: 17650 - DNA, 2869 bp, Heterodera glycines
cgggcccgaaccgctgagaggcagggcatccgaggacaattggtgcgaatggacaattgacccaccctcttggggaatggttccctttgtaaatgccatctttgtctgtctcccccctccaaaaggaattatccctccgaaatttccgcgctttctcatcgtcttcacatccccgacatggacaacgcactgattgtgcaagcgctgaccgacaaaagttattttacgcgcaatgatttggacgacgaagcgatgggagacgacggaccattgacgacggaagttgcgagagacaaatccaacgaccaattagtggagaaaggtgctaccaattctcatcttttcgttggggctaattttccccgaaaacccattttcaaggaatgcccctctttcgtcatatcgtactcacttatttgcgcgcccattggcctttggctcccgaggtaaacatttagattaaaaaatctcatttgatttgggctccaagtacaaataagtttattatttataatcagaacgccaaaactttgcaaaacttaaattttcttgggattttcccttgtaaaaatggaagagccgatctcgagttaaaaacttaagtttcataaaataaacttggaatcgttagagggggtcaaaaaactagcctaggcaaaatttcaagaaaatctgacccgaggaaaatttttttgaccctagtgaaaatttcaataaatttaactcttttttagccaagtgcgctatttaaagccaaatcaaataaaacttacaatattctccagaattttctctttaaaatgaatataaaattattatatttggcctattattgtccgagttataagtctggaaaatttcataaaattgtcgatgttgtacgtaaccaacgctttttgaatatgattttttattgacacgaaaacttctattaatgcaaaaataattcttcctttcttctttaaacgaagaaattgaaattaacacacaacataaggaggactcgaacctgagaccccccttttggtgactaacgcacagaccactaagacgaaaaaaccaacttaattgtacttggagcccaaaattgactcgccgtgtagaaatgagaaatttatacatttccgaaaatggattttaacaattttgtggaaaacataagcaatttgtaaattattttcagttcattcgggatcaaaaaatcagatttttaacaatttttttgcagcatgctttttcaaaaaaaattttgaggaatgggcgacgggatgaggtcgaggcggtgccgataagatcgtttttattataaatgcaaaattaaagggaaagcaaacagattgtttttattgaatgaatgctttcaaaccagaaattaaaacagaccctcaaaataaatagtcttccgagcctcgttgaaaactaattttcaccttttgatcgaaaaccccatccgtttagctcttaacaccaatttctctctccggtttcattatggcccctttccaggaattcatcattgccgtggccacccgaatcgcccccacttcggcgctggccgagttggccacccaattaggcctccaccacgtggtcagaaccgcggagtttcctcccactcagcaaacgctccagtcgacactgttggcccttatcggtgccatggacgtggcaaaagcgcgcgacttcgtccgccgttttgtgctgccgcgactgtacgaagtgccgttggaggatgtgctgccgttccggcatcccttcgccgtgttgggcgattatttgcgcaaatggcaaggggtgcggcgaagagacttgcattctgtcttgaatttgatttgtggtttgcttgcaggcaactgacatcgaaccgcgtacaattgggtcgggtgctgttatgacagcaacgcctttttacgaagtcgcgatttacgtggacaaacagcaaattgttggacaatgtgggttttcttagctccatgattcaatgttaaatccgttgattaaagcgggcggtgaattcccttgggttgcgttggatttggccgctcagaatggactgcttcgcctgtggcgagtggctgaccatccgcgcgtgttcccattcaaatttgaggaagtgtacgcgacccgatttgagcaggcccagcagagaaaccatcggctgagcgacgtttgcggagaaaagtgagtgggcgagggagaggcggcaaaaacagagccattggtcgcgatgatgcgaatgaaccttactgtttcagcaccgacttgagtctgtacacgcccgaagaactggccagagacccaattgacatggtcgacatgtgcaaccagtactacacgaagatacggcccgatgtgggcattcccctgcggcgaaggcaacggcataagttctcccgtgggacgatcagtcggctgagtaggcgatttttggtcaagcccaccattttcaatatctgaacacaacccgacacacttttgttgatctgcgacgaatcatgatcattttgctttttgtttgaattttaattaaaaaataaatgagtgaaggaagacagagaaagaaaagaatatattgaatttgaatcgattaattttgtgaaatttttaataattcaaatatttgttcccaattgttctcatttgtccattttgccattccgatgtctccaccaaaacgtgccaaagtgtcagccgatgatgatggggagacaatttccgacgacggggagccgtccacgtccgcgggggcaaagcgaaagcaaaaggcgtcgaaaccacgccagcggaaggcgcacgaggcattcattttgctggtggacgtgggtcgttcgtctgccgaaaactcggcgggggcacagagcgatcacgg

SEQ ID NO: 17651 - DNA, 1410 bp, Heterodera glycines
cagatagattttgcactaaaaatcgtcttttaaaatgaacacaaacaatgtggccgtcgcggtttgtgctcttttttgtgccgttgttaaaggcggtgtcatgcggtcggaaacagcaccactgctaattgccgagggtagaaaaaagcaaatttaatttaatttaatttctgccaaaaacaaccggttttccgaatatctaattaaattaaagttgatggtaatggaaaacgaatttagaaaccaaaaatgttgccatggtggaggcggtgttgccgaaacatcgcgaaacggtaatgaggattcaaatgggcggttaaatgggaggtaaaaaattaaaaatttcataaatggtctgagaatgtgacagcaaaacagcattcaatcgacaccaccggcccaaaattaccttaagattttcaaaatatgacctaaaaatggcaattttcggtgaaaatttgttataaatggtcaaaaattccaataaaatttattttttttagagtgtgcgtaatatgcaaaaggatgagacgcatgtgatgcaaaatggacgcaataggaccaaccatgacgaagtgcactccgtcgacgaggcacacgaccatgtcagtggtgcagtaggcgatgcgcatcatgatgatgtaaatttttattattatggcgatggaattcggtaaatggtctcatgaaaactatattttttggaataaaatttgcaaatctgatttttaactaaagtgaggattgtctatcggccaaatgctgattttgaaaattttcagtagggagcgcttgggaaaaattggagtagagagaaagagagagagagagagaaagaaaaggggagaaggaaagagaaaaagattaagagaggtgaaatggtgaaaatttgtattttatgtaatatatgtattaaaatttttcatgtgcgttaaaatgaatttagacatatgaaattatatattataaatgcttataggtgagcagtgtgaccgaatcggttctgccactgtatacttttttttgcatctgcatttatgcaggtatttttataaaattttaaggacaaaaattaaaacaataagtttattatataaggtatgaaaatttagtattaaaatgactactattattttctgctggccgggttttgatgaaaaatttcaagttcggtgccaaaaacatgattctcatccttgtgctaattgataaatatattttgaaagaattatagttaaagaccaccatttgtccgggttacggggtagtctaccatactctaaagatgaaagaacaccttttgggtgggtgccagtccaaaggagcaccaggtttttgagctgcaagggaacgtggccatttgaggacagatttttcaatatttactaaggtcacaactttgtatcaaat

SEQ ID NO: 17652 - DNA, 1565 bp, Heterodera glycines
cagagtcgtcttcgtatgtttaaatggtgctaggccgaacctaaaaatatcaatgggacgaacctaataaataataaaagatagtgataattattatttaatttattttgcagaatagtaaatcataacttagctaaaacttagccaaatgaatgaaatttggtattgagctatagcactacctatcctcctctattttatataattaaaaaatctacaaaaaatttacaaaatttgtaactaaagaatttcaaaaaaaaattaagactcaataatcttgtccctcttttctatctcaataattctttttgaaatttaaatggataatagactctttgtgttgtctaataatataaagaaattaatggttgtgagcgaaaaagttaccaaaggaattatggatcatatttttatggtcatataaaatgtaagtcatttaaattatgaaaatcgttgcaattaaaaaagtcataccactcttgatataattagatagctcaaagatttctctattattctgttcaaaatcaaaaaaaattattagtttcaaaaaaagtagcattattgattgtgaaaaaaatttgctaggtttttaatataaaagatgaagagggcacgtaaagctttagctcaataccaagtttcattaatttgactgagttttagcgtaattatggtttattattttgcaaataaaatttaaacaataataaatttaaatcttacgcttgtcgaggaggcgggtgaggtgcgagtttgctggacgggtcggttgcgcttcggctgtcggtttgcacacgctccgcgacaatgttgttgagcatagcgaatgggacggggtttccgctcttggaatggaacttgtgagatggacagcccctttagacttagttggactgtcctggtggacttcgggacaatcaagcttagacaactgcaaacaaggaactctgagttcctggaatgttgagaccgtagagaaaaaggaacaccttcggaacaaacacttcttagacaagaagtagtttatttgtcggaatagcacacaatcaaaggatgaaataatgatttttcgagagtgattctaaagggaaatattcgggtttatatatgggatttggacagggagggaaaattctagaacacacctgaaaggaatggaaaatggggtaaaattcgggaatattaatcaaaaaatcacaagggaacattcgagaatcttcttccggtcctccacaggacttcctcatttctttcctccgggcggtcctccgggcggtcctccaagcggtcctccgggctgtcctccgagcgatcctccgggctgtcccccaatttccacgcgttcagtcgatagcggcgacactccgggcggagacgaaagttcacgacgcagaaccgagattttgaggcgcaacgactgcatgaatgctgccgcctggcgatgttccagcgcgtcgcggtcggctctttcctgttcgttggccttcagcacttcgcccaatttgcgcgtccactccacgtacaatggccgattgcgccccctgagcgatgacttcgtcgat

SEQ ID NO: 17653 - DNA, 1236 bp, Heterodera glycines
acgcaccaataacactttataaggtggccgaaagctgcttccaagttgcggacgacgcgaagagacaatcggcggaacacctaaaagtgacgacggatggccccggagtttcacaggcgacgactgccgcccttcgggagaagccaatgcccacggagaagccgcccagtgacgccgaggaggaggagagcagttccgcagcttcatcggacgaggaggaagaggaggacgagtcgtcggttggggtggcagtcgccaaagaaacgcgcgaggatttattcgcgagggttcgcgccaaaattacggtccgtttatgtgagacaagcagtcctaacgatgagcttggaattgcacgtttcagaagcgcaaggaattggccaattccaaacgcagtgtcagtaatttgaggtcacccgttatttgtgtgcttggccacgtggacacgggcaaaacgaaaatgttggacacggtttgagaaggggacaatccgcatgatgcagctatataatgaatgacactttctgcagatccgtcgcagcaatgtgcaggagggcgaagccggcggaatcactcagcaaatgggcgcgacgcgagtgccggggcaagcgatcaaagagcggagcaaaatggtgaagaatgtgagcagtttgatgatgttgcaaaactgaggagcattttcaaaaactcatttttagttttgcgctgattcaatgcaaatccccggctttctgatcattgatacgcctggccacgaaagctttgcgtaggactcatctctcacgggatcatattttaaacaaagaccaaaatttaatcttttgcatttttcggttccccaaattccctttcaaaagatttgattgccttccccttttttggttgtttcatttgcatcactatagaaatatgcgttcccgtggttcctccctctgcgattttgctattctcgtcgtcgacattatgcatgggttggagccccaaacaatcgaatcactgaaactgttgattaaacgacaaacgccttttgttgttgccttaaataaggcctgtttaaaggtccatattcacaaatgggaatgcgttttttaggtggacagattgtacggctacgaatcgaacccgcgcaaagatatttggcaacatttgaagtcgcggccgacgaacgcgctattggaatttaaggaacgattcgacaaaatcgttggagaattttctgagccaggtgccataagagaa

SEQ ID NO: 17654 - DNA, 1472 bp, Heterodera glycines
atgcgcagagactcgcgttttctgaggaactcgagtgcatcgtcatggaggtgaagaagcaaataataagctatcaacgaaatgccagtcattgtttccaggtccgttctttgccaggattaggcacgacgatcgatgtcattctgatcaacggcacactgagagtcaatgacatcatggtactgactggaagtgacggaccaatcgcaacgccaatcagagacttgctgatgccacagccgctaaaagaaatccgagtgaaggcgagtggcagggacaaccccaaggcgtaccctcaaaagggctgaagttattaagaaaactcagaataggcaaaccatttttcatctgtagtaacccccccccccataatcgtaatctttgtcaattttttcccagaatgattatgaacattacaaagagattggaggggcgcagggtgtcaagattttggccaaagggttggagaaagcgattgccggacttccgctttatgttgccacaactgaggaggagttggaggtgttgaagtgagtagacatagcagccaaatcagagggaattcggccgttattttcccttaagggaggacgctgaagttcagcttaagcacgcgctcatggcgattaagaaaaagtcggaaggggtttatgatcagcccaccaacctttagaaaaatgcttgtcatcgacattaagcttttagagacgatagacaagtatcgttagatttggagaacaaagaaaaaagttatagtcaaaaaattggctggggccgaaccgtgcggggccgaactgaggtaaaccgcgtacaaataaacatgcattgacgtggtgcctttataattatcactaaaaatggattaatgttagttttttctgaatttttcattacaaacattaagttcaaacgacgcagaacgaaaacggcgtcaattcgacgacgaacaacaacagaaacaacaacatccgctgctggtgaggaacagcggacggcggtgttggaaattgagtcaacagggcccgtcaaattgaaaattaaatgtaaataatcaaaaatattgttccataaaaaatttgggaatttatttttattgccttttacagtgccatgttggagaagtagcggatgttcaacgagttcgcctggtggtgcccactcatcgcagcaacagaaacagcatttcaatgtgaaacaacaacggtgttgttgggacaggaaaaaagtgcataatgaaataataatgactaatgcaaatcctttgaccctttgtccgtttcggacaaagaaccgacaagggagtaactcacttttagacagatggcatttatccgaccaatttatcgttttgatagattttttaagtagcaaatcttgcttcttcattttgggttttatcgaacgattgattgaaccatttgtttgtccgttctctgagcgcaaattaatggctgcacttcattacccccgtc

SEQ ID NO: 17655 - DNA, 3258 bp, Heterodera glycines
  unsure (1)..(3258): unsure at all n locations
catatttgaaaantcggccgaaataaaaattaatcctccattatttcaacacctaaaaatatctattcgtgtacgtcgttcgctagccaaatgttcaaaaaaattttgtgaaaagatttatatatgaatttttcaggttttcaatacggttaaatagaaaaatcacataaaaaattattattatttaaacaaccaagttgataattttattaaaatttttcaaaatttaatcttgaaatatcggcaggcactaagttcgttctgcaattgttgcaccgaagttcgaatactaaactgcatcacttacattattcgggtccttcttgttcgaattgaacggcaaaccattaatttcaataaaaagttgagaacaattggtccaacgtacaatggagtaaacagtgtcattaatggggggggggagataattaggaaattattaaataattattcgaaattttatgtaattaatttatttttttgtgctattaaaaccattcacgaattttgaagcttcaaagtgtttcctcgaatctgcgttgacagacagcaaattatcaggaagtgatctgatcattttcactatgcttcgaaagaggaacatacatttggcaacctgccaaagaaattaaatgatttgacaaaaaattctgacagttttatgagccatttatgcttaaagagtgatcagccaatgggaatttgaaaaagaaaaaataatttttttcttttttacataaatttttcctttaaacactcaccaaatttttgctttgactaagccatgagcccatacgattgaacagaaaatggttaaacacttggcacacgtgaatttgagcccattttttgtcgaaaggaatggcaccgataatttcaaaaagtaattcatttggaatttttttcaccattttttaaataaattattttggcggagaaaatgccaagtgccagtggttttttgtctgatgatggcatcggcggcattcgcttttacgacacgcctgaaaactgagtcaaatgccaatggctgatatgaagatggcagcagcggcattcattttaactcaaagatatcaaatgccaatggcttatctgacgatggcatcggcggtattaactttgttcccaaagaaacgtctcaaaaaatcctattatataaattttttttcaaattaataataatttataatgaatgactgatataaagccggcacattcgtcatcaaatttacctctggaataacacacagacatttacatttaagcttaaatatttttttaattatttttgtaaattggttcacctatttttattttttacgtaggaattaatgcccgtgttatttctctaattgggccgaaccccctcccccatatttgtaattaattctctctttggataagtcgttggttaaaatagaattttaaattaaattgaataatgaaaaggataattaagcactaaataatttttgaaataaattaggataattttttattcaaagcgatttaaatgaaaaatggcataggcaaaatgtaaaatgaaaagccttttgataaataggaatagaatggatcatttgcaaaagatatggcaattatgtgataatttgtttgggcggtacgattttgatgaatgtttggtgtggaattacaatttaaaaaattaattaattatgcgtatcaaaaacagagataattattgtcaatgaaaaggttattttgtgttttttgctattttcattatttttaaatctgtcaaaaatctcagacaatggcacattttatcctcaaaatttcttgcaccggacgacacacttcactgggccatgtcgccccgcctactcaacgttgtactttgggctgatatgcatgtgtttggcggagatgactggaaaaacattcacattggcaccataagataatacaaaaaatatttattaatgattttgttttaattggtaccattttttaatcgttttcaatgtgagttgtggtaatattttggccttttttgatgagtgccatagaaataaatatttgaatattttaatggattttggcttattcttatttgtcctcctatttgctaatttatgaattgagagatcaataaatagtcattgttttgttgattaaattatttttgaaacaaaaaattacattttccaagttgaaacacttcatcgattgtcgtgctattggcctggcaacaaaaggtgacgattcgcgaacataccagcatcacttcattcgcctgtaaattaccagtgattggataataatattgtatgtacgaaaaacaattttttatttaactgaatcatatttcacaacaaattaaatagttataaccaattttttcggttaaatgcacccttattttggcaaattaagtttttaaactccccttttaatctatgaataataaaaataacttattgcattaaagaaaaacgaactaaaaattttacataatttggcgcgtttgaatcctgcggaatgacaaagcgagtgccaatgtttggggggaaagttcctgtgcttgtatgaatgagaagcgctaaatttggaattgttggattaatattaattttctccaatttttacaaaattcatttaattctttttttaccctcgtaaaatcggccggcttcgtattcctttgctggcgcacccgtttcagcactcctcttttccgcccctatttttaggatgattgtcttcaggcttcgcatcgacgattccgtgtctttggtctgaaaataattttaaaaggttcgtgttatcatttgggagaaaatgcatttttttaatcttagggccggtcccaggttttagagaaaatgccaaaaattttcttcatcgaatgtttttcctttaaatttgagagaataggcaccctccctccatattgcatatcgaagtgatgcactttttgactaaaaataaaatgaaaatgattgaacattgactaagtggtcttaaaaatgaaaattcgagattttaccgcaacatttttgcttaccatcgattgcttcaaatccttgatagggctaattggctgcattttgacggagaaatgctctcactcttttcggcaatggcaaaattttcactcagtcacgcacgtctctcgcactctgacctgtaaatgctttacacttttggcaacacactttttggtaatggcacaactcacggacctactgatggcactttttttgcagatggcactttcactcagtcccgcac

SEQ ID NO: 17656 - DNA, 2446 bp, Heterodera glycines
  unsure (1)..(2446): unsure at all n locations
atcgaccggctgtacgagacgtttgtgcaaatgccgtccgttcggcaacaaagtggtggtctgagcggcgactggcggcaacagacacccgtgtnncgagcatgccactcgtgaggaccaagtgggtacgtcgatcaagatgggagcgctcttccgcctgttcaaaaagatcaggtaatttgtcaaatttttgttttttacaaacatacttatgttattagcctaacgatcaacatgcgaaccgcagcgggagaacaatcgttgcgcgattggctacaagaaatcggcaatgggatgcatcgagtgggtacggacagccaaggcttcaccaaccaactgcgcattccgcccgaacttctcgtggacgacctcgaccacacaattcacttctgcttcccagaagcactgtttgacgacccgctggccaacgctgacgcaattgcccacaatgccatcctctgtccaaccaacaacgacgtgcagcacatcaatgaggtagcgcttggcagaatgagcgggtgcggaagggaattcctgtccatcgacgaacctctggagccaaacgaagaaatgcacaatttccgcaccgacttcaacatggaggcggtgcacaatgaaatgccatccggaatgccgccccacaaactgaccattaaagtgaactattttttgttttaatcatttttaaccaattaatccaggtgggtacgcccgtgatgctgatccgcaatttggacgtcacccagggactgtgcaacggaacacgacttcaagtgatgcgcacttcggagaacaacctgttctgccggattctcaccggaccacgagcgggtgcgcagaacatcatcgccattccacaaattcaattcgaatatggccgcgcacgacaccaccgtggactacgcttccgccgtctgcagtttcccgtccgcctttgctttgccatgaccataaacaaggtgaaatacagattatttaaggattgaaatatataagcacaaaaaattaaaggcacaaggacagacgctgcagcggatggcgctcgtactcaacggccggcaatgcttttcgcatggccaagtgtacgtcgccatgtccagggtcacgcagatggacggcatcagggtgtacgcgccgctctgccaaagtgggtacggaacgcacatcgagaacgtggtttaccacgaactgttggacttggagccgcagcagccaaggacaccgattcgtggactgatcgacgtggacaatgacatggacgtggcaataccggacgtgggcacaagagtaccggacgtggacaatgacccggacgtggaacgagataatggaaacgcagcgggtgcgaacgatcaagaaccaaatgatcttgatagttcttttgatgatttttttgattgattattttttaatttattttgctgatttttgctttttttgctttattatcaataaatttttgtctgcaaaattttatgtgtaactcttagtaaacctttagttttaaatcacaccacctttttgctattattcaaacgcttaacgcactcactcggctaattttaaaataattagcttcaactgttcccagctggccccggtgttgaaagcggccccggcgctttcacagggccccttggggccctggttcactctataagggtaaaatgtaacttgaaatgactttttttgaataactctcttcaagttggtcggatcggctccgaacaaaagagcactactattttttaaggattctgcatcgaatggtgaaaaccattttttgaaattttcacgtaaaaaaaagtttcttcagaaaatttttgaaaattttcggaaaattttagaactgttcgcacaaaagggtccatatctcggcggggagtgccgaaaccggcttagcgatgttttggaggataaatgtcgacactcgggcggttcgaatgagctattaagcatctttctagcataaatttaaaattgagttttgctctggacacgaattaaaaatttttggaaaaatttttgcctcaagaattaggggggatacgcagggattctgaggggttgatgggtaattataaaaagatttttacactggaaatacttaaaatatgatgttattacgccctacatgcatttgggcattacatgtcaaattcacattaagatacttgatgcggaatcatgtccagaatccgaaaaaaattttttttagaaagaacaaaagtaatacatcagaaagtcctaaaacagtgtaaaaagatgtttgacgntttaattttggatataacttcaagtctcaccaagatactgcatgtgcatcttggtatgtaaaatagtcaacttttgaaccactcaggaacaactaatgaacaactgatgaacaactcttgcacaaattctgcactactcttgcactaattaaaaattataaataaataaa

SEQ ID NO: 17657 - DNA, 1676 bp, Heterodera glycines
aaaaaaaaatacaactttttttcatcattcactaccctctaaattgccttttattttaaaatgattacacgttaacccttgcaatataagagtaacattattataccactgtcaattaacaaatcacattaaaaattttacgcttataaaccaattttcaacaaataattagaattttttacctcttaatttaagagaaaaaatacaatttttttttcatcaatcaacatgagtaaggtttgcctttattcaaataattacatgccaaaaaaacattgatcaatttaattaataatcctaaagtgtgtgtgtgtcagttaaaacattatcaaaattattgtttaaataaaatagcattcatcaaatgtcaaatgttaacacaaatggaaaaaatcacacatgtctttcagcggtgcgctcagcagttgccgacgagtctgtgactggttcgctgttcttaaacatgaacgaaaattttttttgtttatgtgtaacaattcgtaaacacctcttgcagagcagccgccccaccaagctgaacattaacaccaccacgactctgctccacttgtacaatttccggctgggatggctgtagagaaaataaaaaattagcaaaacataataaatatgatttattgttcaccacagggcgactctccgctgccgactcatttccctgttgttgttgcggcggcagcggtgggggcaacgacaaaaactattttttttttttttttgtaaatgtaaaaaaaaattgacatttgcagtttaatggacccttttattttttgtaatcttataataataaatcgaaaataaatgccggtgatcagttttacccctacaaactaaaaacaatttcttttttatactccacttattttttcgtcaggtcctttaaacggtaaaaaaaaatttgaaaaaacattacatgttgtggtcaatgtatgaagccaggttgagtcccaaacgaaaccacacgccatttgcaatcattctcggtggcaatgttcggcagttgaagaaagagtacgtgtctcctatgcgcagcatggccaacaattcggcctgttggcgccacgctgacgcctcaatccgggccccctccgcgtttccaagtaaaacatttgcaaccggcaattctccagcgggggttgactgtcgctctcgaaaatcaacaacaataaccgacagacgaacagggctgtaatataaaaagcataatttaaaccaaaaaaaaggagtaaattacggaagaacccggttgaaagtgtcgacgcaaccgttgagaaacgcagtgctcgttgttccatcaacacaaaattgtgcaatgtttggcaaatatctctaaaaaatttatttatttttttttttttgcaaaaaaaaaattgtgtatttactccgctttgatattgcgggtggtggtattgcggtggtggtggcataaaagggcgttgcggcacacccgaggcatttgaatgcgcaaaaaattgatgatccaaatttgggttgtgctgtccaactgaaattgccgaataactttgaatttcagttcacaacaattaccaaattgctgtgcagtgccaaattggggatacgggcgaaccgggtgaacgccaattgtctcggctgaacccgccaaaaaattgttgtgctgctgaacacccccagca

SEQ ID NO: 17658 - DNA, 1354 bp, Heterodera glycines
ggcccggtgaattgctgtggtggaatgcctccaaaaaattgcgaatgctgctgcggttgctgtggttgaacactaccagcaacgggcccagtgaattgctgtggcggaatgcctccaaaaaattgcgaatgctgctgcggttgctgtggttgtacactaccagcaccaccaccagcaatgggcccgggaaattgctgtggcggttgcacgcccccgccagcagcaacatgctgtactgatggtggtggcgcagtgaattgatgtgatggcggcggaatggctccaaaaaattgattttgtggtgccagttgagaccacaaaggctgttggatggcaccaaattgttggccacccggttgatttggagtggcatgctgctgatccgagcccgaaaggtttgacattgcactaaatttttaacacataaaaaaatattataaataatgaaagagcaaaattatgaggaaaagaagcagcctaaagaatcaattttcaaaaatgaaaaaggcggaaccattgggagggccaagggtgagaaaatttgccaaaagaagcatcatcttttactgatgaatcatttttattttggaatatataaacattaatatggcgctgagttgaagggtgtgtgaaaaaaaaaaacaaaccgtcttagcaaaaaaaaaataaataaatttaaaacggataagttaaggattaagtaaaaaaccgacattttgtaacttatccgttatgtttaaaaaaaaaagaacccgagtaattcaaaaaaaaaaaaaaactaactgttttttctttcaacattgcgctttcactgatcagccaggcgattgaccaaggcgatccatcccctggggcaaaaaaaaaccgcttcgtctgtttttttctaaaaaacaacaaaattcgttaaggaattaaaaattaatttttaaacctgcaatttgcttgccccgcatgccgtcaacccaaaactgaagggcaattgcccttttccaaatacgggcaattgcccctttccaaaaataaatataccttaataaattaattacaatttactttgaaaaaaatggcggaatttttacaaaaagaaaaaaaaaagagaaagataataattaattatatgaaagtgaagaaaaaaatcgcaggaatttcgcttcaatacaaaaccttttttttttgtaatgtatttaattaggtaattaaccacaaatttgtaaaatcatttaaataattgtttcaatacccttgggtttcaaatcataaattaaatcatattttaaataaaatcaatattaaaatataactaataaatattactatatgttagagacacagaaataatcagcctatacctttt

SEQ ID NO: 17659 - DNA, 3115 bp, Heterodera glycines
  unsure (1)..(3115): unsure at all n locations
tctaataatgactaaacttttttatttttaaaattacccacacctttttttgttttcaccgattttaaaatattgactccttttactcgtttttcaatggtttatcaatttcctgattgttgaggctgcgggcaccaagggcaccggaaggcagagtgcccgaatgcgccctgcgttagctgcaaaatggtttaagcaaatttaaaaaaatagtaaaatttttcatcaactgcttgagaattttgttctgaggagagctgctgagactgccgttagtgaccggagggtccagactgcagtgcgggaacagttttgtgttttttgtatttagtttttttaacatttagcttttagtttctagtgcaaaatattaatttttattagaatgggcatgtcccttccacttgcaccaaagtaagggatatgctgccgacatattagcgcatcccgggcccacaccgtgaacctgcacatttgcgggtctggggtaaatttaagcactaattttgtcttttttattcgataattctgggcatgcggaagaagactgcagactgtgaacgtttatgacttcatacagagcattggccagataaccaatatgtgttttatttgttttgaggttcaagagttttttcagttgtttttttaacggcaactttcggcaggcagggcctcgcccaatggaagtgacagaagcgcacaaacagcgcacagccgtaccacccgccaaagccaaacaccgccagcacatttggttgtcaatgctgaacatgaaccgcacgacaaccaagctggtctgttgatcgctcaacggcaacctaacgcacaacagcgcgattggtttggacggttcaatgcggtgacaagcgcacagaagctcgacgacctgttggcacatttggttgtcaatgctgaacatgaaccacacgacaaccaagctggtctgttgatcgctcaacggcaacctaacgcacaacagcgcgattggtttggacggttcaatgcggtgacaagcgcacagaagctcgacgacctgttggacgagttcaccaacgccgtccgacaacaggcgcaagcgactttcacacaaaggcccgctcaacaacaacgacggccaagacagctaccgaaccaacatggcagacgccgcaaccaaatgaatgccgatgatggtccgccatttgatactgtcgccgccaaaagctgtaccgcgcttcacgcgcgagagcgtaccgggagattactgagcaggcgtcatcactgtgccagctctcggctgaagtgcttcatgggcatttcacaaacgtgttcggccccagcccgcctgtcgccgagcaaatgcccaactccgtgccatttcacgagccgcccggcgacaacagcccgttctcagccgactaacaacagtgaagtgcggctcaagcggtgcagtgcagcaacaccgcaccgggacccgacaacatccgctacgcggtgtggaaaaggtttggcccggctgccatatgctcactgacattttcaatgccgtcaaacaacaaaagcacattccaacgagctgggcagctgccgttcaacgacagtgctcattcacaaaaaaggagcccgtcaggacgtgaccaattggcggncaattgcactgtcaaacacgattgtaaagcttcactcagccgtgcgcgcaaaccgggtgggcataatggtctataagcggatagccaggcgcaaaagagctttatgccccgtcgacggttactcggaacagaatttcatgatccagggcattcttcaggatgtcacatgaatgtgccattgcgtggctcgacctgacaaatgcgttcggctccatcccacatgaagtgatcttccgatcactcaaatggtccggtcttgattacccaacagtcaacatcatcagactactatacaccaacaacgcgacccaaatacggcacacaggcggcctcaccgacgacatcaccatccgttgacatatgccgacgacctggtgcttgtgtccaactgcacacaactacagcaattgttgacacaaccggacaaattgctgattgggcccatccggttcaacccgagaaagtgcgcgacttaggtcatcgatgaaaattgcaggattgcccagccgacaacatttaccatccaaggcggacaaccaccagcaatgaacattgaaaacattacgaacatctcggcgttccaaccggctaccaacgagcacaatccgccggccacatcattcagaaaatgtccgaacatgtcgacaacattgaccgatcactgcttgccgcgtggcaaaaatttgatgcagtaaacactttcgtactgccaccaatcgccttccatctcaaaaatggggaaatgcgcaaagccccgctgaatgcgctggacaaaaagatcgtccgtgcggcaaagcggtggctgaacctcccgcagcgtgccggaacagagccgctttacctgaacatgccatgagaggtcttgcactgacgccgctcaacgccctcgccgacctgagccaaattggtcgtggcctgcggctcctcacctctcacgagttggccgaaacaacaatggacttactgtgcaccgtcgttgccaaacatctgcgccgggcaccacgacagcacgaattggccaagtacctcaacggttcaatggacggcgacatgaacaatgggtcgacggacatatcttcgacttggaaaaggctcagaacggcaacgaggcgactacgaacaagagttggcgtcgaatggtcggtcaacgacggctcaatgcaactgctcctgaacgggttccaagaccagccgaaatcagccgagttctgcctgcggtcagctatccgagacttttaccaccgccgattgctgtccaatccagaccaagggaaggcacacagtgtgacaagcgttagtgctgcctcaaatcactttctagcacacggcaacttcacccggttcgctaactggcgcttcatccaccgcgctcgcctcgactgtgccccactcaacggcacgcgacgattcggccaactgaacaacaaaagctgcaggcgctgtggtttcggcaacgaaacactcccacatgtgctctgccactg

SEQ ID NO: 17660 - DNA, 3131 bp, Heterodera glycines
gcaaagacacagtccaaaacattttcgccaagcataaatacgacaaaggcacccgaattggtacaaccgtatccaccgggggcgtttgattacggtagaaaacgccaaacgaaggtgaccatcggtttggattcgcttttctccgtcccgttggagctcgaaccgacgagagcccgacctacgcgctagaagtctccactcgttgctgcagcttcttcaggtgttcgatgccggcacaatggcaacgcaaccgcgcgcaattttggcacgaatgcatgaacagctgagagagttgcgcagagagggcaacgcacaagtgtctgttgtggctaacgcatgcatgatggtgagagagagcgagagagagaggagagagagagagagagagagaaaagggggagagagagggcgagagaaaaggggagagagagagagagagaaaaaagggggagagagagggcgagagaaaaggggagagagagagagagagaaaggggtggaggggagatgttttcttttcattttcttgcagagtttggccgttgcctctggacaacccgagtttctgttcgcctccgttttggccctcctctgcgaatccaaacgttgtgtgccgttcaaccaagttggccgccttctttttacctttcgccctgttgctgattccaatgtttttgagctcgccaacagtacaagccctctgccccgaaactttcattctttggcactttccgtccatcggcgaattgtcggcacaaagtcgggccaaatcagtcgatggatcagcgagccgttggagcagcgaccgattgtgtgcgaattcgacgtcatttacacgggaagtgcgcttattgaggaccgatcagctgaagagggcattcgccggggatgtttagcatctgatggttttgtgagggcgaagtgcgacgacaaaaagccgccctttttttgtttgtgtgaaggtgcctatgtgtatctgctgacggtgtacggcttcttcaaacttggcaccggactgtgcgaaacgcgtgccggcgaagtgatggtgtgcaacgagtcggtccgcttcagtgacggctctgcgctgtacgtgtccaacgggtcgctgtacctgcgccaccggcactctgcgcgcctttgggtgttggacacggaaactttgcgcgaaatcggtccattgtttggaaatgtttcccatttttgattgcttttcaggtgagatcctgctcccgtccgcgctgatcagtcagggccttctcttttctgatgggcgtcagttttgggtcgcctctttggacgaccaatggcatttggcgttcactccgttggacgattcgtttgggcctttgcggggagacaattcgccaaacgaagcggagggcggtgatcgatggacgtcaggcgaaaaagccgcgaggacgacgcaattacgactgatggactgcgaattctgtgcatttggcgaattggaggagacgcacgatcaactattacgctccattcccgaaaagcttcgtggtaattaatgccgaattgaaattcgaattccatttccacgtttggcactttgccctcactttaaggggtcactgccgacctccaacttggccccggcgttgcctttctgttgtctcgttctggcaaagtgtttttcgccatctcttcgtccgattccgactttggtctttgctctaaaactcctttctgttggaatcgcctcgacgtgccggagtcaattgtgtcgatggcattggacagcaacagcaaaacgttggtcctccgttctggcgccgggaatttgtggttggtgggcgaacagcgaacgaaggcattgggcaaatcgccaaaagcgcagcaaaacaaagagtcgtcagcaccgatgataagacgaatcaaagtgccgaacaagtgctgattgacatttggcactcatttggcatcaattaaattttaccaaaggaagaaatgcgtgtccctttctgtcgcgtccgttggcggcggttctttggcctttgtcaccgaaatgggccgcgtctttctgctcggacggcacgtgctgaacaccgctcaacagtcccaagtcggttttggcatttttggtgtgccattcgctttgacttttttttttcggcagatgcctttgctccaattgtcgccaaatgcgaccgctcctcagacggtgcccggcatggacaatattccgctcgcgcaagtcgcactgggcaaaacgcatttggtgggaattgcaaagaacggagcggtgtacgcgacgggactgaacaaccaaaaccaatgcggaaggacaagcgaaggcaaaccgcaaaatgagcaggaaaaggcacttaatttgtgggggggggggaggggaaacgaaaggggtggatgaagagaagagatgaagcattgggaattgggacggacattggcatggcattccaaatgccattcttttgaacttcgctcggtactcagtcgctcctttggcattttctgccaatccgtcctcacttccgccgcccttaggccccttcatttgctgctgatgcaatcgtttcgtccaattcgcaatcggtgtcctcctccacctcgtcctcctgctgtcagttctgctccccctcccaacatttgttcgtcgacgacttggcctttctatgcgtccgttgtggccaatgttccgtgaggggaatcgcgtgtcctttctccaactacaaaaggacggccggcacggcatgcgcttgtgccaaaaacgggccgagttgctgcgttcgttgtggattgtgcagagaatgtgcgcaggcggacaaacggtcgcatgcgacacgcggcaaacaccagccgagtccgaaggcggtgcgactgcagcaccaattcacgggaggacgcggaaaagcacctttggcacgagaggaggaggaattgggcgactcggaaagggtgcgaagagagaagacagcgccgatggcacaatcagcagcaaccgcagagacagccgcaacatccacggggactgccacaagatccgccggagttaccgcaacaacgcgaatctttcctctcgagcgggtgctgctccaaccacagccgaacataaaagtggccactgtcagcgtgggcaacttccacacagtggt

SEQ ID NO: 17661 - DNA, 1290 bp, Heterodera glycines
  unsure (1)..(1290): unsure at all n locations
cttctgattttcattatttctcgctttggttcaattccccaccgggataaaatatttttcatatttactttaccattcattattttaaattttcccggcggcgcctatcggcaccgccggctccccttccttcccaaaagtcttggaaaaaacgcgccgcgaaagaagcggtgttgaaagcaacaaaaaaaaaggttaatcaatttacatggcggacccagacccccttgtattgcaaaaaatctgaattttagtgttctttatcctgaatttgaaaaaaaggctggtcaacctgaatatacatatacttctgaaaaattataatgctaaaaaacaagcactcgcgtgaaaattgaataaaaattttgtatttgaaaaattttgtccaaaaatttttacgttggaaaattaccggtttttaccggtaccggtatcggtaccggtggaaaaagttggtaccggtaccggtaccgggttttgcattaccggtcagtaccggtaccggttttttaataattacctattaccgaccaactctagcatttagaatgaagccaaacccttcgaaaacagacatttatagcctttttcgctagaacaatgactattttgttgccaatatgggactaaatttaaaatttttggtaatattaatgctaaatgttatggaattttacttcttcccctggctacgggcctggcaacttgcctgttctaattttggcacgcatatttttggcattcacggcgaattcattcatttttcctgcatcagtgttgtcgctgtccttagccattttttcaaattgcttcgccataaattttgttgttgcgatcagtttattcagtttcgcttccttttcctttaaaatattcacaaaatttaattccttttccgattgttcgtcctcttcttttgtttcggtgtcgaacaattttcaattagcaatgaattttgcttttgtggttcgctgttctcctttgtatctggtttttgttgagatgatgcttcttccgcgtgagaaacctttaaaaaatgtgccgtggctaagttggttagagctttcggtaaaatcaatcttagggccctgatgagggttacacaggttctggtacccggtcgagcccagactcggatacccagttttttaagactcgctacctgaaccaggcttttcttgactcggaaatctggaaccttgtaaatatttttttctggatctacatgctctanagtaggcaacacattttttgttaggaacaacatttagactatttttatatattttt

SEQ ID NO: 17662 - DNA, 2021 bp, Heterodera glycines
  unsure (1)..(2021): unsure at all n locations
gacaaatttgcgcctgactcaatttgacccaccgcttttttctttgaagtcctccaatttatcttttgcctcactgatgatctgattaaccaaattactgccactataaaatacatcggtttgaattgtagcaattttttgatataattgctccatggatttgcgggtttccgtgtaactgtcaacgttttgccaaatgtccaccagcccaatttctggcaccaacgtggcgaaatcggtgcgcaattgattaatccatatcaatgcagttggcaatgtgttcgttgattggtcaattgaaattttgttgattttgtccaattcatacataaagtgcgaatttgaggcgtcgaatttgttgttcttttggttagcatcggaaatataatttttgtgaattgcgtacgacaattcgcatctgacattttggcgaatttcgtttgtcaaattattcaaagctctgcttagatttgcactgttttcttaatagttataattggtgctaggtcacttacaaaagtgcaaatttggctgcttcataaaaaagttaaaaaaataaaatcaaaaatctgatatttcctatgatttttttatcaatttttaattataaacatgttaaaatttaattaaattgatgttaaatacacctaatttttgttggatttcgaataaaaataactgtaaaatttcttagtattaactaaatcattagtcagattacttttaaattttttaatattttaaagttcaattacaaatgaaattaaattaaaaatgaactcaaattatataaaaaatggaaatatttgtatccgtttcaacttaagctaaattgcttaggtctaggcctttgcttagactttttttttttttgtaaaatttataaacccatttaagcttcaaaatgatctggctacggatttttttaatattaggtaaactttaatcatttttattcgagtttcaaaaaactcttagaagaatgtgttttaaacatcaatttaattaatttaatatgtttataattaaaaaattgacaaaaaatcatagagaaatcagatttttgatttttgcactttttgtgaagtgaccaaccatgttataatttcattttatattaagggcccagcgggaacgcgattcccgtgggaaaacccgggaatcccgttcccgtatcccttcccgatggggctaagtccatgaaaaaatcgaactcaacaacgaagattctcaatttaataaaaaaaaattttgaacaaattttaaaacgtcaccaccatttattgagtgattttaaaatgaattatttttttttaagtaatgtcaattgatacaaatattttcaagagatttttaatttaaaattattcttaaagtaattttagggtgctaagtccgagaaaatcgaactcaaccgatcccaacctcggtttttaaattctaaaaacaggaattgaatcttgaaatccataaaaaaatttgaataaatttttaaaattcacagtttaataaacaaaccattgaaaacgaatttttttaagtacttctgaatataataaaaatatttgaacaaattaagtaataatgtcgagctcagggtttcgtaaaaacattattttattattgaataccctaaccataagccgaatcaaaatccacgagttttttttttaatttctgaatttaggttgaataattttctaaattgtatgttctcattaaaatcattaattatttgcaaaattatttgaatatttatttattttatttatttttaatatttcctaccatatttggccaaaatttccacttctctgatgtgttttcggcatttcgcatcccaaacaacaacttcattgaattgatttccgttcacttccggatgaagaagaatgatacatgaaagcaaaaatgttaacaaaattttcatctaaaaaggccgataatcagaaaaaaaaactttagttttgtaattttaataaaaattagtgcaattttaattatttaaaaaaaactatntt

SEQ ID NO: 17663 - DNA, 2864 bp, Heterodera glycines
cttttggcaaagtaaatatgaggtgcggaggtgacgaccgaccgccgcaataaattttggcattttcaaaataatttaacgaaaataacgattatagatgctaaaaaagccaaattggtttttaggtgccatatttcaaacaaaataggtattttaaaatgttttacttgctcagatttttattgtgtttttagtgcttttacgaaaaatgctatacacagataaaaatccgaacctattgataattaattggatttattaaacatttatttttttaaaatgccaattttaaatgttttatttttggaaaatgaaaatattttcactttattgtttcaaaaatattttcactttattgtttcatattcttctttttttctccatcaaaattgggtccgtttttcagaattccggaccaaagagtctgctactaaaattggttggtatgaatttttcaaacatgatttattttggcattaattttttaactactctacctacaatttttttagttttcagcagccattttaattttttggctcttaaagtcgctaaagaacaaaacccgaataaaaaattaaattccaataatttttaattcgattttataagcattgcaaaaataattagattttaagaaatttaattatacactttttttttcttttaaatttattaatgacatttcattgaaaagatgtgatgatgaagctaatattaaaaaatggaaatcgattcctgggcttggctcataagaaaggtgctccttcttcgcttggctattaggttaatgatagcctccggcgtcggctgggagcaattaaagccaaatataaaggcccgttttgtgtttcccatatcatttcgccttttctgtcacgcgatttcctgtgaaaattcttaaataaaagaaagacataaacaaaatgccgaaaatggactaaaattttacaattttattattttaaatgtctatttaaagcacctcaaatttttaaaaatatttgaccaatatttttttgtttaattgttccttttatcacattataattaattaatttaaatcaattatccgttaattaaaatcctttttttatttgtcttaaaacgatttgcttggatactttctgaattttcttacagaattaagttaaacctgttaaaaaacttaacttacttttacatttaaatttgattaattcttgaaaatttaaatatttttattttattttattttaaaattttatttaaaatgtcccattgggtttggcacaatgtgtggcaggtgagcagcgccgggtgggccgagtgcgactactgcttgaactacgacgcgcgcagctgttgcctggtgtttctgcccattgggttggcactcctctttttcgtgtggctgttttctcaggtgaaataatttcaaatttttgtttagagaaaaatttttctaagattttttttcaaagagaatttgctaattagcaatttttatttttaatcaattttttattttaacctattttcatataaattataataacatatatttttatataattaaaatttttgttgcctagtttttctgcaagggaatcaaaaaaaatatatttttttgttattttccagtttaattaaataaaaaatatattgaaacaaaataaataaatacatacgatttcgaacaaaaaatattgttcattatgaatttaatttagaaaaaatgctagaacatatataaaagcccttaatatcctatattattattctcgcccggatttttaaacacatttaggtaattaaacctcaaaaattcttaaatttagcatgaaattatcataaaaaagcaaattatcacaaaaataaaaaacccaataaatttcagcgatttttcgaaaattagaaatttaaaaaacttttagagccttagatttattgcaaatttattgatttagtagatggaaaaaaatttagactcagttgacccccccgccgcccatgtggggggggggcttgtctgtgttgaaaaagtttggtgattagaagctgtaaccaagttcgaaatgcagttttcatgtttccttttgtttgccttagggcgtaagattttttaaattatatttattttttaatttaagaagggccatttcgcggttggcctcgtcattgtccaactgttggctatcattttgcttggcatcgccctttttctgctgttcatggcctttcatcggtgtttgcgccggcttaaggcacgcaaaaagtgctgtacaaaacaacagcaacaaacagttgaagaagcataagaaactaatcaataaatggccaaagaaaaatcgataattaatctttgatcagctcagtaaattatccgatgaatgaaacagacaagccgtgaagaggaaagaaaatcgaagacaatgtccatttttgaaattggaaaatttatataaaatatatttttcttttacaatatatcttttttattttttccttttttttgactaaattaaacagatgctttatgtacatttatttataaatatttgtcattgaaaataaaggcgatccctaattgattaattaagattcacttattacattttttttattattattttcatttgtataattttcaggtcgttaattaagaaaaaaagaaatagagagggggggggggcgggtataataaaatacggtattaaaaattaacctttttttcatgctacgcgcgcccctttctcttttacaatagattctatagtttcccaaatattgattatgtttaaaaattttacaaaaagggctctcgaataaagcaagaaattatttttttgtaatacaagcaagggtggtttacccaaattaca

SEQ ID NO: 17664 - DNA, 1709 bp, Heterodera glycines
cattctgatgttgaattgtcgatttaatcgctatgtgttgtctctcaattatgtttgctctaccataataaacgataaagcctcttctgtgacaaacagtgaaaatgaattgccatttttttgtagggcttatatttttaagttataagaattgccataaagagactaggctcaaaaaacccaaaaaaaatttcttgtctaagaaaattgaattttcgtgatgaattttcgagaaaatctggtatattgccgatttttcatttgaaaaatcataaaaacatgtttctagtggttttcggggttgttgatcacgaatctgaccatcattttgtgcaattccgaatccaggagccgaattcgagcaaaaagtcaaatgttaaaatgttcgaataaaggggctgtgataattgaatcgcgcgccactcaccgcaaaagaaatgaaatcattccaaccccaaggcggcgtttcattgttaaaaactttttttccatcgaattcttccttaaaatcccccacaccgctcttttgagagataattcgaaatgttgccgaacattcgcggctcaaatttctatcttaaagcaaattaaagattaattaagttcagattttagcgtattttcttagcgtcattctgggagtcgaccttcaaaaggtttaacaattaaaacaatttttaattttagtttttcatcactcaatcgaaaacttttgagaatgaaaaactgacaatgagcatgaccttggaaaatctttggataaaaaaacacttcaaattgtacgttaaatttatttattattagtagggctataaattatatgcttttgcatattttttctgcgcatatgctatgaagaaaggggttcaaaaatagcatttctacgttaaaattttttgatttggtgaaggtttttaatgcatataaaagcatattttggagcttttagagaataaatacatattcaccattttcaaggttttagagcatattttagtcatttttggcaaattttcataagaaaaatgcaataaaaacgaaaaatacaccccccaaggatcgacttttgggaataaaaaaatacatacttaaaaacgaaaattttgagctttttgcaagaaattttgaaaaaaatttgtttatataaaaatataatttgttttggtatattataaaaattttaaaaaattcgcaatttcatatataaatttgaacaccaaatattttatgcgcatattcggcaatttttagtgcatacaactttaaccctattgattaaataattattttcaatagagctattaattacaccaagttatagacaaaataatttgtaattctttatataattttataagcaaacctttttcagtaaagtcgcaccaaagataaaagctcaaccatttctcagtgctttcatttttcgttataagtgccaatattttccatggcactccctttatatacacagtttcacttttacttccacttccgtagatttctcgcgcaaattcggataatttttcaatttccatcgaaactgtgccgttggatttgtttggatcggaaacgaatttctccgcttttggctcatccataatgacatcaatggccaatgtcactttgtcctcttctttgttgtaaaatccttggctcgtgtccaacaattccttaatttggatggatttatttggagatgcaaaaatttg

SEQ ID NO: 17665 - DNA, 1175 bp, Heterodera glycines
  unsure (1)..(1175): unsure at all n locations
ggataattaattagaaattaattcattatgaaatggttcatagaagagttctgtctgggccgggggcctttttgaattaaaaaggaaagagacaaacgataaacgatttatttgtcgttagtatatgtcgtttaggaagattttttaattaaaacataaacaattgttgtttaacattaaatatagcaaaacacacaaggaaaaattaaaaaaatatattaaaatttcaaatttgaacttagtaaagagttaaaaaaaattacacaataaattgtaagtattttaaataggaatgttataattaaattatttggcattttaatttagtaattttttaagtttaaactaaaacaattaattgattctctaaaactagccataaaaatataatccattactagagctcggataaaaaggcaccaaaaatcgcgaaaaaggcactataataggcaccaaaaaattgaaaaaaggcatgaaaaggcacaaaaaaggcatgaaaaaaggcattttaaaaaattttctaaggttttttagggagcaaaacacgtaaacttaaccaaaaacttaattttggtcatttaaatggttattaaatattttataatgtttttcgaataaggaaaatttttaaaccgagaattttttatcaagaaaaaaaaaatgaattttggcgatcaatttttgagaaaatttttcaattcttaggggtgtattttctgaaattttttcaattcttagggatgttttttctgaaaatttttcaagtcatttcttaaaggtgtattttcccgattttattctatttttgatggaattttcggaaaaaaacgtcaaaaaggcaccaaaacggcaaaatgccaaaaaaggcatttaaggcacgaaaatcacgaaaaaggcaaaaaaaggcataataaaagtcaacgtagaagcctcaaaccaagtggaaaatgcgttttttatgcttaatatatcgaaactagtgcgcagaaaaaaaggcatatgcctcaaaatccgagctctttcattaccaacgctttttgtaaattcctcttttggcatgagtggaaaacgaatgttgaacaatgtcgggccaagcatttcgcgccgattttcagcagaacattcgatgccattttgacggcactgttcgtcgncccaacgaagtgactaaattt

SEQ ID NO: 17666 - DNA, 3005 bp, Heterodera glycines
  unsure (1)..(3005): unsure at all n locations
gtgggaggtgaagaagagnattaagggacagagggaatcgcccccagaatacatggatgacaatgagaaagggacgaggcattggccgatcattgatagaataaatcaacttttgaggatgatcgtcaccaaccaccgcaacccatcagcacatgtctcatcagtttgatccgtttcgaataaatatctccacattatgtgtttatagatcaaaatctgcagaagcaggaagtcaaaattattctgcggtttgctggaagacaactttttgatcatttatcggggcaatgattaaaagataactctcgttaagccgaacagtcgcaaattgaatctgcgtagagagagagagagcaattattattttaatagccgttgaatattaaaaatatttttcaaaatcaaaacaccagacaaatatgcgacaataattgcttttgttgaaaaaagatctatttaattggaatcgcattaaacgtgttaaaatttaattaaattgataataattattttccgttttgtgtggattttcaaatgaggtgggaaattgtagttgcaccgcctgttccaaatcgaattcacaacattacaatcgttgaaactttcaggaaaattcaactaaaatgttattgaccctgactaatttttgcatcgaaaaataaggcggcgagaaagccataaaacaaggtgtggcgagttggccccggcgagttgagcacagcgagttggccgctgcgagttggacgtgaagtgaattgactatggcgagttggacggttcccaaattccttggattccccccccccgtccccgtccgtccggctgcgacgattttatctctgtctctttccctctctccctctctcttttccgcgttgtctctctgttcgcttcctcttcttgtagttcatctgctgatcactgatcaccgctcgttccctctcagttcgatcaatccccccaaatttactggttctcttccctctccttatttgtgttatcccttcgcttttgtacctctcttagccccactttccgatggtttcactgacgttcagcagtgtaaagtgccgcctttctttacagcgagaaaacgtcgaaatgaccaaatgcttaaggggggggggtggggaagagtgatccaaaatattcggcaggtgtcgatgttcttccaatggtttgagtaagggcttttttaggggggggggcaaatcgatggtttggcgaggatcaaagggagcgatgagtgatttgaactgaaaatttgcattcgttcacgacaaattcagcctttttccgaattcgttttaataaatttaagaaaatcccttttttgtctcatttcattttttaattaacgaaaagtaacgaggaaaattgaccacaattcgttttgccaattgtccctttgtcctaatttcggcccttttgaaaatttgcgattattttatttccatcgctttacgtatttgtacatgccgaacagggaatattaattttgtttgttgatcacttatcataaaaatatgcaaattgaccatcaaagggaaggacagccaaaatgtttatgggaaattgggaagtgccgggggcaaaaaggggggggggggaggggagggagagcattcgttgtcgggaaaagcatttggtcgaattgaacgctgatcaaatccaaatttaaattcacatttaataaatttaaatactgattaatttttaatgaactgttttaaaatcaaataccttttggcactttaatatcaacaaaaaacattcatttatctttaaatcgtttatacaaaattctgtaataaaattaatttttctgttttacgctttttctaatcaaatcatcggtcgtcggcgttttgtgtgtcattccgtgaccaccgatgccctcccgccgcccccttcccctcgttgtccacaattcattttccgccgcttgcccctggcaaacattcggcaaatttttggggcgaaggtccttgagatcgaattcaattaatccccccccccccccttcaaatgtccaatgttccggaagaaaactgcgcaaaaaaggatgaaagttggggagggggaaatgaccaccgattgctttggggagggggggggggcgcaatcgtaaagttggacaaatccaacgaattttggacagtttcgtgcattgcttgtccctttttatgaccgaggcagtcaaatcgctttttggccatccgtcgcccgcgccttttgtcgaaactttttaacagaattattattatttttttgtcataaaatacttctccgatcattctctgccggtcatttcctccgattaacttctgatcaatgcctttcttccaccctttttgtgatcaatgcctttctcttctgatcagtgcctttctcttctgatcagtgcctttctcttctgatcagtgcctttctcttctgatcagtgcctttctcttctgatcagtgcctttcccttctgatcagtgcctttctcttctgatcagtgccgttctcttctgatcagtgcctttctcttctgatcagtgccgttctcttctgatcagtgcctttctcctaatctcccccctcctaacatttcttccaattaacctcgtcagagagagcggcacttttttgtgcctcggcagtgacccgccccttctttaattgcaattccatcttcgccttcccccgtgctattgtgcctcctcgcgccgtgcgatccgacacttttcccgcctcccccgcccctccgagtccctacaaaatcatttctccctccccatccccatgaaggtcagcagcctcagtcggtcggtccgtcgccccccccccccccggggatgtcttctcgtcttctccctcattcttcgccaatgtcttcttcttttcttcttcctcctcctcctcccctcaccttctccgattttcatcactttgactgaattgtgctgctgaagttgcgaccattcaaatgccaactcaattttcccaatgttctcaat

SEQ ID NO: 17667 - DNA, 2864 bp, Heterodera glycines
  unsure (1)..(2864): unsure at all n locations
tttatcaatattttaataaacattttggcattttgaacccccgcattttttagttcaaaatcttttcacaaacaggctaacatccaccaaatttctccggcagcacctgtcggcaccgcctgacttttttaggtaataaacttcgaaaatcgcccattttgtaaatagtttcacccaaaaatgctggaatgatgaaaaacattatggttgacaattgttttttcagtaatatgcattagcagaggtgccagatgaaaattttcaaatcagcatttatgctaacaaaaaaaaatcagaatttagggtcaaaaatcagcattttgaaaaaatttattccaaatgcaaaaagtcaattaatttgttttttttgcggttttttccaataaaaattttgggaacaagggaaaaaattttgaaaatttgagtgcaattggttaactcattttcaccaaaatgaccaatttttgcgattatagcccttttttaagaacaaaaataagttttatgggctaataggcgtcaccgggggaaaaattagaagaacttaaggcttatatggcgttttaaaaatgtgcttatttttgacccttttacaaaaatgcaaaataaaatacattttcaattttttatttctccaagtttctcattttgaattaatcttttcttgtatatttcgggattttttgtaaatataaattctcactccagtgatgtcacgatgcgcgcgaactttaaatacatatgtttatgtttctaatttggcaaacgagcaaaaaatagcgctaacacacattcatcattcattcattttacgcggatcaaaaaccaggcaaaagcgtaaacgagctttaaatgttattgaactaagctaatttcaagatgggttttgaagttatgccacaaatttaaattttcacaatctttcacagttttctttatcaaattctnnnnctnnatggnctnnnncagctnnntnccgggctgnnatgttcngggttgggtcgnnccgttnnnntcnggcttttttnnnncnttttttnnngnnnntnnnnnttgngnttttttggttnnntttgtttgcgtcnttntcnntttgccncnnttngccgnngggcnttgncntgnnnttgcgtttnnnccngtgntcntggcnncnttnncctttncgcgnttctnntccccctcccccctttttcgctttntccgtcctttcccccttcnttgtcccntcgtccgctggctgntcggtccgattgcgatttgatttagcgacgggcgatcatcgtcagtcagtcggcgatgtcgcattatcatttttgcaaattttttcccttccgtttcgcgccccgggagaaggacgccgtccccttcctccccccctccctcgacgcctcgcgtgtccgcgctgcaaaatgcgcgaagttagcgagccgattgtatgctgcgatggggtggatgtgcaaactcgtttccgccaccgcctccaccctctcccccgcttcctccacatatctttcctccctccccgccctttctccgcccgtccaactttttttaatgggcctttctttaatcattggaatttgcccgatcaaaattcaaattgtcatcgatactatttttgtaattgaacgcggagattatgcgccgccgttcgatgtttgtgatttggtttgactgctactgattcatcttccgtcccgttcagaacagcagtagagggaaataactaatctttgtgcttttgcgggaacgcatccgttcacagtgatctctctctctctctctctctctctctcactctcgctctcgctctctctctctcgctctctctctctcgctctctctctctctgatcactcactcttcgttctaatcattcacttgtcgaggacactccatcgtcttttttgcgggtttaatccctacaatgatgttgctgatcgccatcacatcatcgttttcatcaatcgttatgtgcttcttgtgcaactgtcgctggtactgcgcgttgcgatcaccgggcgacggaagttgcgatcggtgaaaaaatgtgtaccaccgctacaaattagtggtaattactttacacacactctctctctctccgcccaattgccaaatgtttcccaaatgtttccggtgttttctgctgacggcgttcctcttttttcactgtgtttaagacgaaaatatgggccaaaaattctcttaaaaaccaattaagaatcagttggagaaaatatcaacccaaaacatgaattgtaatggaaaaaagaaagaaagatttataaaatgacaaagtttgaataaatagaaaatgaaataaaataaaataaaaaatatttaccaaactgaagagaatctcttccttgaaaataatcagttcaaaatgatcgtgatttatcatatatatccgacattggaataacaagaagtgacctgaaagaccatggccaaataatggacttagtttcccccccccccccccccccaaaaaaaacacgggatcaaacagcggcggcattacctcggcttggattggatacggtcccggccgtcgatcttcccttatgcccatgtttatttctaattctcaagtcaagaaaatccctgtgatgtaactaacaatttggtgatctcggtcggacggctcaattagtgcctgaaggcatattttaatgagttgatcggcattctttgcgcaatgcccacaggggattaaaagtgtaattgaccttgctgcccgctgcttcagcgcgtcaatcggatcagaccttctcgaaatgtgcgattcggttagccgnnggggggggacgatctgatcggcgccgcccctcccccgaaatatatcaacatacaat

SEQ ID NO: 17668 - DNA, 714 bp, Heterodera glycines
tgatgggttaacatttcttagagcaaaagaagcaaatggccaacccccccccccccctaaacccgggaagccattctttatgcaaaatgagaaaaacaattcagatgatgaacatttttacccgcaacaacagcagcagcaacaatcgttggcacagctggtggagaaccgcatacagcttggcaccgcgattgatgagggcggtgagaagccgccgccgcagcagcagcagcagcagcacagtcgcgagttggccatggccatcgtcgacccaagcggtggcacgacgacgacaacacccgcaacactaacagtgaaggaggagcagcagccgcagcagatgaacatggagcatcagcagcagacacattttgtagctgctccaacgtcgtcgtcagcagcgggcacagcccaaacgatgcctaacgcagcacaaccgcagcagcagcaacagcaacagatgaactcgttggaaagtccatgcggagggtgtcgagaattgaaacggtaagttaaaaaaaataaattatcttttcaaaattattttatgagaaatggaaaagttggattttgtgaatgtgactaatttggaacgttttcacatgtaattgcgtaatacatttaatgccttaagtgagaattgaaaatggcgaatgaaattgttgcgcacatttgtgggaaagtggcaaaaacgagctgtcactttagtgaata

SEQ ID NO: 17669 - DNA, 2901 bp, Heterodera glycines
aaaaataatcgataagcaccaaaacccgaccccgaaattcgaattaattctaagatataggaatattacttcgtacaatagttgaataaataaaaattcatttaaattaatgaaattgaatttttctgaaataattgatggtcttttatttttcttccattatttcgcaatctgcacgtgactttacaatttcgcaatatgggaccaaattaggtcacctgtcaatcaaaatttttttattttgcattttccctatcgatttcgcaatctacacgtgacttttttttgttgcatatttcgcaatagacacgtgactttctgccattgcatcgaaaatttatcgtttgtcaacgaaatattcctcaatgtcaatgaaaaacaatcacgtgccaggtgtcagctgacacgagccattctgcggccactataaaagccgcccaaattcacttctccattcagttcaaccaaaagttggattttgctaaaataaaattgtgcgctcttatttaaatatattaaatttaatttaaaaaatgacttcaaaacgcaacggaaatacggaacaagccgggccgtcgaccaaaaaatgggattttagatcaatcgggtaagtaatttttaataatatatttaagagacaattttaatcaataatttttcaggaacaattttactgaagaaatggaaaattataaattaattgacgaacggtcgacgatttgcgaaaaatttggattcacgaagaacattacggaatttcggatcaattcggatgtgagacgccctgacgaagcgatgagggacgcaatcgacacaatgattaaggcggcttttaagactacggaagaaaggatgaagcggaaagtgcggatgtttggagtggcaataacgggtgccgggcttgcttccccggtttgggtaccgtacagggcgtacccgcagaacaatgcggatgttattatgcaggagattaataagttggggcagagcggggacggagatgaaaataagaaaacgcttttgttgtcggagcctattatgatgaaaattacttgcgtcacactgcccagtggagaagggccgaggaatgtacataaatttgatttcggatttaaggaacaccaacggataatgtaagtttttgagaaaaaaaagaaaaaaggaaaatagaaaaaaagaaaaaattataattatttattaagtatttcgaatgtggataaattttgtttgttttacgcactggcgtcgtcgatgaattatttaattatggaccgttttgcatttaatcgatttatgaacaatattatgagacagagggacgcagctactgagcttttacgtaattgtggaattgatattaacgaatatagctatggagtggagcacttatcgagggttcagaattatttggtgggttctaaaattttggaaaagtgataaattaatggattttcaggatgagatttaccctggaaagtaccgagtggtggcatttgaaaagtcagctgatccacggaaatcaatccgtgttttgtggaagggccctataggacgtgaaaatgtagtgccgatatttttggagaatggtcactgggatggtctgaagaattacgtctgcttttttaatcgtgggagaaaattctgtaaggctggggctttagagttgccgctgtccctttacaatttaatcgttttttcgagttttaacaattactctttttctctaattctctcctctctcctatagtgaatgcgcatctctctgcccaggggggggggcccacatttctgtcctaatactactgagggcgtatggaagtacgaacagttgcgccagttttgcctggagctcagcgggttggccgtacttttacaggttttgttttttgacttattgcgaaacaatttcatcagagatgttttttggattttaaccatgtgaattatcaaccccttccccaaataggagcagtgtcaccccgaaagttgcacacaaatgaccgcgactgagcagtggatttgtgagtcttccttattgattttctgtctcaaaatagttagttgagcttggcttaggcctgggtttttccaggttatgtacgaaaaatcttaatttccaggaaaatacttaagaatttgctctttttattgttgcggtttagtcggttttacgcgtcctatgaatgaccatactcagtttcttaggccataacttttttctttcttgactaaggcctccattcttggtatcaaatgaatgcttaaactcttggtaatcttatgtataactaaattctgagctaaaggcaataaacaaaaaattatacttgaatatactcgaaaaagttgaatttcgttttctcattgtaatttcttttataatgccagtatttgttcttttctttgcatttatcgaactttaagctttcgtttcataccaagaatcatgcattgatcaagtatgaggaatgcataaatccgactagaaccattgttactttttaaaacaaatttcaaaaatcaaggcccgggccatgccatgcgttgatttttcctggacctggatttttgtccatgtccaacatgggattcagatctaggcccgggggcttttttcaaaatgtcaaactctattattatccttccacttttcatttcttattttgtcaaaagttttgtgcgcggcgcacaaaaacccgaaggagtgcagtgccattgactacacgcggcacactttggagggggccgcctctctgctgaacagcaaccgctacttccccagcagagccaccatcaaaaagtcgtccatcgccaaaattggatcggtgtgccgacgactctaccgaatcttctcccacgcctattgccatcatcgccagatttttgactcatttgaggtgg

SEQ ID NO: 17670 - DNA, 1696 bp, Heterodera glycines
tatatgagaaatgtttttacgacagatgttcagaaaaactattaattaaaggaagtgaaagcagacagagaacatttcccatgcgttttgggcgacattaaaagtctgaaaatttttggtctttgaacatttatctgtttggatgaagcggcttttgccaaattaattttatacggaacaaattttgcattcggtttaattacccaagtttgagatcgcaaaaaacaacaaatttctttcctaattaatcgaaatgaagcgaaccaacgcatcaaacatcactccacctcgcgccaaacgtgcaatgccacctgcactggacctggaccaaaacactgccacactcgaagagcaagaacgccaacgcaccctggtcttcattggcctcccggaaagcaacgccatccgcccatcggagcgtgttcaggaagacagggaagccgccacaaaaatcctggaccatcttgaagttgaggccgaaccaaccgccgtctttcgactcggccggttcgacccccagcgaacaacacctcgcccgctcaaggtggtcatgccgacgcccacacaccaacatgtggcactcggaggatggaagtacgagcgtgctcggctccgttcccaacagaacctgacccgtctgttcgtccgtccggcgctgtccaaagaacaactcaaagaggaatacgaagcgcgtctccgaaaacgccaacaaaacccagctccgatggcaccggcaactcagctcccacagacaaatgccccgactcccgttgtcgaagatggaccaaaccagaagaagaccagtgatgacattcccaaacaaccggaggtttttgacgaaacaatcctcgtctgttatgaagcactaaactcatttccacccaccgacaaaattgttcaccaaattcaatcgctcaaaaaacaataccctcatcttttcaacaaatagttctaccagacctccaacaatttcttcaaataaaaatatccctcaaaatttccctaaaaattttacccaaaaaaaaaaaaaaaatttttttttcctcttttacaacccctaaaaaaacaacaacaattttccctttgttggaggtctgacttttctaatttctgcttcttcattcaaaatttcaattatcttttatcactacctttcatttcacctcatttccgccaaaagtataagtggcacatgcccttcttttggttatttttatttttgaataaataaataaaaaaaaataaaaaaaaaataaaaattggccaaaaaaagtgaaaaaattttcaaaattgtactcttttaaactagcgccgaatttttaaataaggttgaaaaaagcagagaaaaggtgaaaaaatgtgttgttaagagattggaatttcgaaaaatgctcgcaaaagaaaaaaaagagagcttttttctgtacacattgaagttgatgaaccaacagtggcccagtgaccgacaaaacactatgtgttcaagccagcacagtgtttgacaaaaaagctcattacgccaattttttcttcaaataatatttctcgtctcctttaccttctctcattgcttctctctttcttttctattcattttacccctctctccctacttcttcctcctccttcttcttctctctctctctccctccatttctctctccctttacctcttgtaatctcatctctctatcct

SEQ ID NO: 17671 - DNA, 3129 bp, Heterodera glycines
tttgggtatttgcacaaaaatgcgagcgcccttccatatcaaaccggacgcacagcccattttctgccggcctcggccagttacacatgcagccaaagcagctgtcgacgacgaactcgaccgtttgctcgcttgtggcgccataaaatctgtggacttcagcaaatgggcggcgccgattgtggtcgttaagaagaaatgtggcaatgtgcgggtttgtattgattttgcaaccgggcttaataacagtctggaactaaaccgccacccgctcccacgcattgatgatatttttgcctcgctggagggttgcacaatttttagtcaaattgatttccgcgaaacatacctccaagtcgaattggacgaagagtcaaaggagctggtgggcataaacacacatcgcggtctttttcagtatcaacgcttgccattcggagtcaaaagtgcgccaagcatttttcaaaaattgatggacgaactcaccgctggccttcacggagtgttcgggtatttggacgattttatcgtgggcacgcccactttggaggagcacgatgctctcctaaaacttttctttggtcgcctccaagactgggggctccgtgttcatttaaataaatgcaaatttctttgtccccaaattaagtttctgggcacatcgtttctgccgaaggaattcatcccgatccggcccggtcagcagcaattgagtcaatgccaccaccgcatgacttacaaactctccgatcgttcttaggtgcactaaattattacggacgcttcattaagcaaatgcgtgaactccgtgctcctctcgacgaattgctcaagaaagacgttccgtggcattgggaggaaaaacagcaaactgcgtttgaacaggcaaaatcgatcatgcagtccgacatgctcctcacgcactatgatccgtcaaaaccgatcatcgtcgcagcggacgcaagcaaagatggaatcggatgcacgataagtcacaaatttccggatcagtcagaaaaggtggtcgaacatgcctcccgttctctctctccagcagagcagaactactcccaaattgaaaaagaggccctttcactaatttttgccgttcaaaaatttcacagaatgatttatggacgacgcttcacactgttgaccgatcataagccgctcatcgccattttcagttcgaagaatgggatcccaatctacgcggcgtctcgacttcaaagatgggctctcattttggctaattacgattttgaaataaaatatatctcaacgaattgttttgggcaggtagacgttctctcgcggcttgtggcaaaacaacgcgagacggtggaggcggaagaacgagtgatcgccagcgtcgacaaaacttcacttccaatttcagatgattcagcgctcgatgaatctgaaacggccgctgtcgaatacatcttcatggccaacattgatcagctgcccgtcaccgcggatgaagtcgccgagcacactcaattggacactacgctcaggaaagttttcgatttttgccgtaatggatggcccaagaaatcgcctagtgatttgtctgcctttttcactcataggcacaaactttccgaagtgaatggttgcctccttttcggggaacgtgtcgtcattccggcagctttgcgtcagcgaattttggccgctcttcatttcactcacccgggaatcgttcgcatgagggcattggcacaacaacatgtctactggccccgcatggaccttgacattgaacgttgggttcgccactgcatcgactgtgcgatggcggcaaaaacaccaacaaaaactacactctctccatggcctcgaacaaataaggtctatgagcgcattcatatggattttgcaggcccatgttctgacggcaatctctacctcatcatcgtggacgcattcactaaatggcccgagacttttcaagtgaaaagcacttctgcggacaatgtcatcgttcaactcgagtggctcttttcgcgatacggttttccacgtgaaatcgttaccgacaatgggccaccctttcattcgaaagatttttcccatttttgcaggattaaaggtatcaagcaaacatttagtccgcctaatcacccacagagcaatgggcaagccgagcgttttgttgacattttcaaaaggcaaatgaagaagtgttcacacggagacaaaaagtggatcaccaattccctgttagcctaccgcaacacaccaaatgctgcactgaaaggacaaacaccagctgaacttttccttggccgttcacctcgaacacaactgtcactgctcaagcctgacatttcttgctcaaatcgcaatcaaaatgactacacaaacaacatgccgaagcaattcgatcgcaaacatggtgctcgccaccgaacatttgcaattggtgacgatgtgctcatcatcaactaccgtaacaacaaaaagtcttggctacagggtaaagttgtctcaggttctggtgttatttggaaaattaaagtccccgtccttggtaacgtcattgtgcgtaggcacactaaccaaatgcgtaattttttccaattccccaaaaaagtcaaaatggaaatggacccggcacacagcatggttctcctggtcttgttcaaaagcgccacgttcgtttcgctgatgaagtggatcaaaacggtgccattgctcgagaccaacaacaaatcgccgatgtcgccgacaaacaaatcgaagtccggcgttccaaccgtcaacggcgttcaacaaagaaattggatttagacacttcaaaaccgcgttatgattacatttaatgatcgttttactttcgcctacccattttttttaaaccaattcaaatttaaaaggggaggtgtagagtacattgtaaatattcaaatttacgccattttcggattactgtaattccactctttttcctttctctcgctttcataaatacccatctcttttcactcatcaattgacttcgcttttcattattcaattcccttctcatcgctcgtcttctactccgactttttatttatttacttctgacaaataaacttatttaattttaagttgtgtccacttttggacataaca

SEQ ID NO: 17672 - DNA, 2882 bp, Heterodera glycines
taaccatataaaatatcatttttttaatatgtgctttcgcgctcgaatttcgctcttgaaaacccctcattttttttttttgaaaatttgtatcaatattttaagataaatattttttattcgcatcgcatttttgaccctttaaaattcaaattttataccggacactgttcagaatgtgttgcacaagtacagccacagtattgccgatttgtgtgcctttgttcgcacttggcaacaacggctcaaccatttgttgggtttgctgcaaaagtcggacggtctctgtggccttgagatgatgaacgtgttgtttggccagtggacattccagtgctgcatcaacgactggcgttacaggtttcatcaaaatccagacattttttggtctgacggtgcggaaagacgacaaaaatttttgaaattttttttacgaaattgtcatggaaaagtactacaaattttttcaaaaattggccatcgatcggctttgatattcccctgaagacaaaaactacaaaatttcaatcttgggggtccgaatttctaataaaaatttaaaaatcggtttccttactccgaaaaaaagaagtttttctagttcctaaaattgccgagtttgccgcataaaattatgccaatacatattgctcttccgagctaaaaaaatggaaatttggattttcctatactcaagtctccatggctgaaaaatcgtgtcaaaaaacgaaaaatttatttttatttttttaaatttcagaacgattgagactgcgctgcttgccggctccagcgcaatgcaccaactgctggtcagttggctgctcgacgccaaactggcacccgcggcactcacccggtggttcattcggcccaaatttgtgccatcatccgacgacccaaatgagtcccaactgcaacgcccgcgccattcattcaacaactccgtgctgtccgccgcccagctgacaatgaacggcagcgcgaacgcgctcaacatgagcatcgccgccaacaccaccaccaactatcaaaatgaattgtgcctttttgaagcgccgccgccgacggcggatgccgtcatcatggcatctgcaacaacaatgactagaaacagcgcttccttttttggcacaaccaccgctggcagcgatgcggcaagcattggcaccggcacgggcacatttgttgtcgctgctgctggtgctgttgttgaggacagaaatggatgggcttcacagcagcagcagttgattttgtctgtccagcttgacactgacgtattgccagcaccgttttacggctgcgaggagcttctcaacatggtcagttatttgattttgattatttgcgatccgccattttctgagtgagtcccctcccgtgcgaaggttttaaaaaagtttaccaaaactctaagaaattttcagcaaaaaatttttttattgtctaacatttaactaaaaaaattttactttaagtctgaaaatgggtcaattacgcagacaaaaattttctcggtttaaaaaaaataatttttatttttaagatcatggatattggacgaaaggtatgtcagataaataatatattttttaattccttggtcttactgatgactcgttgagagttttattttttgaaaaaatgacgaaacaattcaaattttttgtgtttttcaaaaacaacctattgttattatttggaaacgaataattgctcttaattaccccacccacgccggtacaattaagtccaattaaggtgcactttctcaaaatgttgcgtcccgcccatgccaacaatgagcagcaacaatcgctttgtgcccaactgcccaccaatgtttggtgcactccgtccgccatcggtcgcatggccaccattttgcgccaaatgcacgcggtggtcagcgaggaaatgggccgggaattgatgggacggcaacggttgatggaccatctgtgcctggtccatggctacttcttcatgttgcgcggcgattttgcctccgcacttgagcacatcctcttgtaagacaaggcatcaaaaaaaaaatttaatttgaaaaaaaaaaaattttttttaggttcacctcgaaaacattaaacaaaaaatttttttgtaaattaaaaaaattatgtaccccacaccagtgatgccaacccgaaacccgaggtttttctcaacccgaacccgaaattttttgagtgccgacccgaaacccgaaatttttctcaacccgcggcatcactgccccacacagctataatgtgctttttcaagcaaacaaattgtgtttttcaatgcctttttctttgagttatacgggtgctaaacaatttttttcaccgtcaaaagcacggactctccgatggcttatttttttttgtttgaaaaaaattttccaaatttttaaaattaattttaactgttaaaggaattttgtttcctcgaaaaaagcaaatatcatatcgtgtcccgacatttgcggtccagacatttgcggccccgaatttgcggcccgacatttgcgcctttgtccaaaatctggttcaaaactaagttttttcaatcactgatcgcataaatagctttaaataagcgattaaaagtgattgtacatgatcatttgatcttcaaaaaaatgttgaaaaaataataaaattttcaaacaaaaaattattgatcataatgaaccataaaaccgtgttttcttaattttaatgcttattaggctatcaggggttgaaaaaattcaactttgagtccgattttggacataggcgcaaatgtcggggctcctatcatattattgataaaattcttaaaatgttgacttgggcaacacattaatccaagatttaaaattcatttttttt

SEQ ID NO: 17673 - DNA, 1836 bp, Heterodera glycines
actcgctctgatcaaccagtgccccctccgtgatcaatcgcaacccttcgcagccaatttgagcgtccactatctgaccaatgatcggttgcgcgcccggccgacggcttagcgtctgtctgagcattcgcgcagtagcggcagcgccatgttggcgcgtttccgtctgctgttgttgttgttcaccggctcgcgccggacgacttctccatggcgccgtagaagccggcatatagcgctgcgccgagtaggcaagcggcggcgccggcggtggtggcattggcgcggcgccggccgctgtcacggcgtcacgctcgcctcggccgtcgcgcaagaacagcgagatttgtggctggctgctgctttggcgcgactgctgcaccacctggcgcgtcttgaagccgaacggcgactttggctgcatttccatcgcggcacgaagcggcgcgcccgcggcgatgacgtcattgaacgagggacggacgctgggcggaggatagtatttctataatgggagaaggaagaatggcatttgattgaaaaagtttggcacactgttggcactttgggtggcattgattcgaaaagtactttggtcgagaattcaatgatcaatcagttttgatcattcgtcaatgaccgaatttgaaaaaataaaataaaaatgcggtagcctaacttgccggagatcagtttcctcgaaattgcaattccaaaattaaaattgtgacaaacatgaacttttaatattagggcaccaaatcaaacgaaaaatatattttttttgaaattaaaagaaaaaaaataaaaatggtaaaaattttcgtaaataaaatattttaaaattttgattaacgaaaatttatttgatacacgagatttgcgcctatatcaaaaatcgggttcaaacttaagtttttttcaatacttgatagtctaaacagcattatataagtgatacatagaaagtgactttgtctgatcatttgaatttagtattttttttttttgaaaaaacattaattattcaacaaccgaattaatgctcctaataaacaaaaatactgtgttttcttaatttttaatactctttagtgtttagataaaattttttatttgccattatattaaaccaatccattaagacattgtccaaaagaagaaattggtgaggtaccataatttgcttacggtaccagccgatactgtaaaaatcggatgaacaaaaaaaaagactgaccgggatggtgcggctgattcgaatgcgcgggcacgcgccgggccgcaattggtacggggtcggcaccgggaacggaaaattgggctgtccctgcagaaagccgatttgccggaggcgaaatgtctggaaaaaaatggggccgggggattaaaatggcacaaattgccccaggcaatgccgaattcaatctcactcaccaacatgccgacacattgacggcactcttctgtccggcactctaatgtatgtgcagactgaaagaaaatggcaaaaaaaaaattgaaatttttaaaatgagagtttttgaaaaaaatttatcccatgaattttcatcattcgatagatagcccgacgtgttttttataagcgcatcaatttttaataagaatttgggaaaatccgagttgaaattattcatgaaaattttggcaaagctaccgggcctttttagtaggggccaatttagtgcggcgcattttgacacttaataacttttcttacaaacgaccaaattccacaaattaaacaagcctcaagaaagttaaggccagaaatgtttgaactaccattgattttcgaggacttcatgccataat

SEQ ID NO: 17674 - DNA, 1163 bp, Heterodera glycines
  unsure (1)..(1163): unsure at all n locations
acaaataaagttttattgaatagtgattacnagaagccccgattcgaaagtgaactgcgtagtgttgcaacaaagcaagctgctataaaaatataataaatctcaattaatttaaattttttaaatttatagatttttatattactttgaaactacaaatatttatttgttaaatttaaagaattgtaatttaatatttaatttaatccattttgtgtagtatcagtttaccaaattaattttgaaatacaaataatgttgtacctcttaaagaattattttcaaacaatttataactactttttttgcatttttttaacatttttgcgtttttaaaaactatttttgtagattttggcgattttttatgacttttttagtcgtaaattaaaaactttacattctgatataaattgcgttaaataataatttatcaaatacattaaatttataataattcttaatataataattatagggcgtaattttgaatatttagcgtacactatctaacctaataaattaaatggataataatttcaatgaaaacatgaaaaaatatatatataatatttaagttaaagaaagtcgtagtatataagcgacatatacttatatataaaattagaagaaaacaattctatagccagcgtgaattatgactcattgtattatgtaaacgggaacatgtaaataatgatgaaacaaaattatttatacgagaaaatttaaaattttatcaaaaatttaaggaatatattaaatttacaataacataaatttaaataattaatattataaaatgggaagtaacataatgcagggccattaatagagagctaccattaaatgtatcagaagataattttaaaataaactgccaaataaactgtcctttttgatgttacagaaagtgaagtgaataaaaattgaaacataaatttaagattaaaacaaaaaaaatcaaaaaattattcgatagaataagaagatttaaaaagagaagataaacgaagaaattaatttcatttcacaaatgctataaatatacgttaaaattaaagtaattaaaatctaaattaaaaaagaaaaaatacttagactatttgaaaactattttaatagtaattatcccgtcacatgaccggctcanaaatttaact

SEQ ID NO: 17675 - DNA, 1815 bp, Heterodera glycines
  unsure (1)..(1815): unsure at all n locations
cgatgatttgaaattcctttatataaaatttggttacacctaataaaaataaataaataaataagtttcttatgaataaatggtaaatttcgtatgatttaaacatataattaagtaaaatttttgggccggtcaaattcaaatggttgtactcgttcgatgaaacggctgtctggttgggcccttccggtggcacatntaaaagaatgcaagacggtcatggcgctgaaaacactggctgtttgtgcaagaccaaaaacgatgattttgaattgaaaaatttatgaagcctataaatattttgatcaaatgctaataaaaactgtctgctgcataataatcaaattagaaaagtctacagaaactgttaatctaaacacggcataaaagcttagtaaaaaggtaaaatttaatttatcaaaataataatgaatcacaataacactttttattgatataaacggtataaatataaattgtataagcataaaaaaacatataattaaaattaaattgcaaaatgctaccggaatggaaaatttcaccgcaaataaattgcaacctacaatggtaacggaaacaatggcactatcaagtgaatctaactatttttttacattcaatgaataaattttaaatttctagctcggaagtaaaataaaataaaataaatgtttcattatttggaaaatataaatttaactaattaaaagactttaaaattgttgctaaaaaaagaaaaaatttaaccctaatattaaacttataaaatttacaacaattgtaaggatgtcttttcatagccaatatttttaatcattttaaaaaaaatcaactatataatgaatgatattttaatttcctagtttaataataaataaaaactttgaatttcaattcaataattatgcattatttcataatttttattcaatagaataaacaaaaaattcttaaaaataccaaattttatgagtgagaaaagataaatgtagagtactcaatttttttattacaaattttcaataaaagaaacagaataaactatagaaaagaaaaatctctaacttattttttgaatatatttgaaataagaaataactaaatgatcatagaagcaaaagttaaatgatcaaaatgagaagcaaagaataataaatatatggaagtaagttgataataaaaatttaaagtcaagtaactgatgtgatgaaaataaaagaaataattaattcaataataaaatagcatcaatttaataatcaaacatagtcataatttataaaactattagatttaaaagctgtagaatggaactaaaacctatagacattaaaagtttaaaaaattaaaagaaaaaaaaaaattaaatttttgcttctgagtaaattgaataattaaataacttaattggtgcaaattgttttattgagagaaaattaataaacaagaataaataaaattaattatgcataaagctgaagtaaatatgttggaaataatcttagtggtagtaattgaattggtcgggccagagatcatgtcgggaaattccgtcaaaatatttactatttctacttatatttatttataaacgaaactaaattgaattaattaaagaataaatttttggattcaaagttcaaattatcttttttgcattatttataataagtatttgtccaggtctcgcaattcaggagtgtcgcgaatagcgaatagcgcgtaaatttaaaacaataatattatgaaaatgaataaatagtagcaaagtgagtactagaaaatttaaaatattaattttaaattaaaaaa

SEQ ID NO: 17676 - DNA, 2084 bp, Heterodera glycines
  unsure (1)..(2084): unsure at all n locations
tatcagggctgggcgtagctggattttcaattacggaatccgtaatccgtaattagggttattttctcagttacggaattccgtaatccgtaatgatgggggtccaaaaaccccgtaatttcccgtaattcgtacttttaaaaatgttatttttttttaaaataattttcaaaattttattaaaaaacacagtagtccttttaaaagcatattaaaaagactggacgtgtccggcagtgcggatagacctggtctaggaaaattttgaagatttgagtgcaatttgtaaaagattttgctaaaaaacaattcaacagagagcttccaatattaatagacttatttttgaagcataaaaaagggaactgattctgcccgtttggccaataatttatgcagaaagagagggtgggcggtaaagatgggttgggtccaaatggggacaatatcgctacacctttatggggtgtgccttcaaaacaggaaagtaccaaaatttgtgggtctgccgtccggaactttattaatacattaatgtttttcgttttctttcccacctaggcctcatggccgttcatcattccatccgcaaaagtcctccctcctaccttttcaaattaccgatttttatgacttttccaaatttgcgaaaaaaagaaaagaaattttgcgtgaattgcttttgagcccttttctgctataaaaaccgtgaagttcttgtgtttttttgttgccattgaagtggaaaattccgaaaaattgcgttatttaatgagtttttcttattttctttgggatttcattgacatacgacgacacgcaattcccattttttttcattatagtccatgtgccatttagtgcaaacaatttgctaaatagtaaagctaattagtaaaatcttaatttttcccactaataacttgtaattaaaaaaatttatttatatagaaatattaattgaaatgattaaattaaatttttggaaccccaggccttctggccgtccatcagttcgtacacaaatgtccccctgtttttttgacattttcccggttttgtcttagttacccatcactcacatctcatacacaattttgctttaaacatagtgctcgaagactttactaaataaaattaaatcataaaattttaattttttctactttcataaattgaaaatgaggttttgcgaatttatatacttatgaaaattaaaacaaaaaatttttttataaatgcattttgaaataccgttttccaaaaaaatagatatcaaaatcaattttcaaaattttgcactacttttggatttaatatgaatttgtgggccaaacgcattctgtggcatttttaatttgtttataaatttaattaacttctaaataaaacaaaaaataaattattaattccaaattagccgttgaatttaagggaacaatttatttgattaaatcctttttaaaaattatagtaactaacctaaaaagtaaagaaccaaatttctttgttaatttttcaattaatgaattgccatacttgggcatagatgtttgtcggtgtcggtagaccaaagggtaatcaaactgtctagcagttgtgaattgcggaatatgatacgcatcatgaagttgaatgataccacctgcaaacattgaaaaatcaaaatttatgtttttattcatttaatttaattaggttacctgttttggcgttcttgatacaagttatgcgagtaaattgacacccggatataaaccatcaatggtgtctgtgtcctacaccaattcttcattaaaataatttcaaatgaaaaatgtctaaatgttcgtaaattgtttgctgattgttgtgcttgctacacattgagttgaatcaggtggatgctccaatgacccaattagtattaatcgtaaaaagcaaaataaaaatttgactaattttgaagagcattttcccattgtagaannagtaaaatctaaaaaagatttcaaaaaattaaattcananttatattaattaacattaaaaaataatttgtatttcatattaattnnagaaaaaaaattacattaacacattaa

SEQ ID NO: 17677 - DNA, 3690 bp, Heterodera glycines
catatgtttggggtgtaatttttaaaaatttccccccccccgaactttaggggtgtatttttcgcttttttgcattctcttgtgaaaatttgccaaaaatggccaaaatatggactaaaaacgccaaaatgtcgaaatattgatttatccccgaaaacccccaaaatatggatttatatggactaaaaaccttccaccaaatcgaaaataacgcaaaaatgttatttttaagcccctttcttcatagcatatgcgcagaaaaaatatgttaatccatataatttgcaaccctaattatagatagttaaaaaactagaaaaaacagaatttcttttaaaaaatgcaataaaaaatgatttttctttgactcgatgacattttttggcgacatggtcaaaaatttcaaaaattttacacaaaataattctgtcgaaaaataatccccccttctccatttatcccccaatctctaattatccccccccctttctgaagaggttgaaaaataatcccccatgggggataattagagcaaatacggtactcgtgggtttcctataaagaaaatatgattcctcatagttttttttaaattgatacatattttatcattttttaaatgaaatcctaccaattgagcttaataatcgcaaaaaccaacctttttttgttgaaaatctgttaacaaattgcacccaaatttttaaattttccccccggcggcgcctatcgtctaccgcccggacccttctttcccaaaagttttttgaaaaagcgctccgaaaaaaaagtgatgtgaaaatcaaatctgaatttctattaatattcgatgatttagtccaaaaatgattaattgtttgaaataattgaagaaaatttgtttgaaaattttcattaatttaatttattaaataaaaaaccaaataattttgtattattttcacttgatataaattaaaatttgaattttttttttaatttttaaaatttttttgaatttttaaaatttcccggttggtcccggttcccggtttttcttgcggtcccggtcccgaaaaaaaatcgaggtcccggtcccggtcccggcttctcaggtcccggcaagtcccggtcccggttttggcaaaaattcccggtcccgtggcactctatttctaagtgaaaaatgttgatttgccattctctactcctaggccgctctatctaaccaaaatgctaaaattggtactttttataatgattctataagactaaatttattttataccattttaacaaaaattgttcgcatttgcaaattttgtgttttttgatatgttagagacatgaaaatagtacgccaaaatgagagaaaaagaaatagttttttaaacagctgtaattataaataattctgggcttcaaatatttttcattatacccaaagtttgttcataattttcttctctatcgatatgcaaaatttggtgtagatttaacatagggaacaaaagctacacatagaaaagtaaatgttgttctttacattattaagaatgaagagacagtacataaaactgagagaaataaagataaaaagtaaaggtgacagaacgccaaattttttttataattgtccataaaatttatttatcgccgttttttttcttttttaccatccatgaagtttattaaaaaaaaattttttttgaaatctgtacacagataatacataagtaccaaaaattataaatgccttttttcatgcctttttcgggattttcgtgcctttttttcaattttggtgcctattttagtgcctttttcgcgattttttggtgcctttttttgcgagctctattcattacatttaactttttttcctaacgttaaattgcataccgatagagaaaatatacctatgtgtaatgagtgtatacaggcatttattaacctaattaacatgcaatacttttaaggaatctcacccaatataatttgtaaacacttaaaactatcattctcctgagttagtatgtattatttattgccatcaaaagaacagtacatatttacaatacacgaaaattggttgtgagaaagcagtaaatgaacaattgcaaatgggaatctgtacatggacattaaattggaagtgagtcatacatatatatgccaagggatcatcaatatatggacatgggcgagaacgagggcacaaatgggaatctgagcatcaaattgcatcgcgtcctcaatttggcgggaagaatgtgacgtcgtggctcaggtcctccgcgattgttagtgctgctccggtgttcatttgattgtggtagcgcggcaccgagaacacagtgacaagacgttcgtcggcgaaatattcaatgccctcatgcaccagctgaaaaaatgggaaacttttgaagaaaataaatctgtccaccctgcctacctcatgcgcccgaattatgtagttgaggttgagcagctcgcagatccggaagaccacgtcctcgccaaagacgacgccggccccgcgcgggctcggctccacaccgcggatgtcgagcattggatcggcccacagaagatccatctccaacgacgggctcggcagggtgagcagcgggcggcgtaattcgttgagctgctgcaagctggtgatcctgtcagaaatgccgccatgcatgcctgaaatgaagagaaaaattaatttgagcaatgaaacaacaagtcgatctcacacagaatcctgtccccgatcaggcccacgtacggcatccaggcaaaagtttggttgaacatgtcgaagagccgtcgagtgtccgcttggtggtagcgctgctcgatctccgagtagaagccatatctaaaacaaggctgaattagtgccatccgttgccaattaaacgttgctcgactcacaactctgttgatgttactgcactcgtggttcccgcgcaacagcgtcacactctccggatatttgaccttaaaaaatgagattactgccccgtaattctttgcctttccaaattcaccttataacagaagaggagcaccaccgtttccagcgattgggggcctctgtccacgtagtcaccgaggaagaggtattttttctccggcggggggcccagcgtcgagaagatccgcagcaggtccgtgaattggccatggatgtcgccgcagacgttgacgggcggttgaatcctgacgagtgtctgctgctgccggaagacgtccatcgtggcatcgcaaagctggcgtaagtcgtgctccgtcacctgtaaaaagggaagggaagaataatgacgattttgaaaagcaaaaaacaattacatctaagggaaattgcccgtaagtggagtttctgactctgtagataaggccgtccacttgaaggctgaagggcactgccatcgcgcgttgctagcagccgtccgtccgttatgaaatgtgtccttaacgttgaaaagaccgccttatatactcaattttcggcttattattttctaatttttcggtcgcataaatttcgttataaatagcagcaaaaaacaaactcacagagccatttttgcaactttgccatttcatcagcccttccgtcgcttccctcatcttcgacactgctcatcgcaattgctcaatgtccctgctcaaaaaaacaccgttgttctgcgtagccgaatgcgcaatattcct

SEQ ID NO: 17678 - DNA, 2174 bp, Heterodera glycines
tatatttgagtctaatgacgttttttcatcttgtataggatcgcctcggctacccatactcttcactatgttcataagcgctgtattcggtttccggaaccatgaccattttctttgtgtgcttcattatgctgttattttttcaagcaaatgttgggctaaaacgctgagaacaggcacaagaatagcaccaagggcaattccgctcccttgttgaagtttttgccgagctgagttctcactgcgagcgcgtgctatggccctgtaatagtccgcgtattgtgacaaccgtcgcttctggcttgaatttaaacgaaaattaaattttaaaatatttgcgcaaatttccacaagggcaagtatttgttctgctgatgctccctgtagtagctcgttttttcgtttatcagacctagtggccgcaagctttttaaaaaaatctgtattttccctaacgtaaggactaaattgatacattttggattttttctacattcatgtctttatatagacaatgcggttagtgtaatacgttattcgctcggtaaatagatttctctgcgttcgtccgggaatattttgctagtaagacgttcattttcctgtgcattaggatgcatatttataaccaggtagctaaacggttgacttgttgcatcgttatatgactccataaaataatttaagcgctttggaaacaattgagatccgactgtccgtacctgaagttgcccggatgggttacgtgtcagcacaagatagtgactgttcgcccttgctgtccgaatatttcgcccatacaggctctgagttacgaaaattacgtttacgttccaattatgcgaaccgcgtgtaaacaaaagatccaaaaaatcattgttcatattcagcatcaggtcgtccagcacaagtaggagaggtttaggtttactattaatcaatgcctgatctggaatcccattatgggtttctattccacgtttcatcagatcgatgaccgaatcgttcatttcagaataacaatataaaactttttcgggaggtgggttaatcagttcattatggtgtttcaacaacctcatcagccaatgggttttaccacttccagtggcgcccgataatataagagtgaagggggcgttaaacattttttaaagttcaatttttctaattgtaacttatttatatagtgtttgtcctcaattttgtatgggacatatgccgcacattttgggcacatccaacatttttctgcccaagggaggtgtacggtgccaaaatgcaatagactttgtgtcctacatcttttacaaatttcataatgacatgggcagtaatgacaacattttacttgatgaatacaaattttgttcatttttaataatttgtaacaaattgaaaaaaaaaacagaattgtttaaatagtgtaaatatgtaggggcagttattcgggtttcatgatgtattcgagccattgtgttaaatcagccgaactgccagataattctactgtttccttctgcgaccactctgttgtcaatttggctgttttaaacagagtctgcgggtcggactcggatatttttgtaggtggtggagatttctcacatgacaaatcgttttcaaaagtttgaggggctcgttggtataaacgatgacgatttttcttgtgggaaatcttcatcaggcggttcgatttttggttgtatgagcggttgttctcgttccatttgttggtccggcggtggtaaaggttcacgctccaattctttatcaaccgataattgtatatttttatccatgagtgtttatgtaatgggtacaattatttaactattaattgtatatctcttaaaacgagctgcttatatagtgacgataggggcggggtccggatcctttaataggacatgggcaggggtctggaccctttaataggacaatgggcaggggtctgagggtacttaataaacagggggtaagggggtctggacgacccctgtccgttgattatatgcagaaatgctttaaattacaggggcaggggtccccagatccctgcaatagggttgtagggggcaggggtcccagaccgctgcccatgtgataggttgcaggggcaggggtcccatgtaataggttgtaggggcaggggtcccagaccgctgcctatg

SEQ ID NO: 17679 - DNA, 2759 bp, Heterodera glycines
  unsure (1)..(2759): unsure at all n locations
ccccccccccccccaaaaaaaaaaactaaattaatgaacagaaatcggattaggatgctcaataaatgcaaaattcncaaagataattatttctttattcctttcgctagcatattgcgttaaaattngtaaaaaaatttcctacggaaaacggcaaaagtgttgaatctaaacagctaattttagaaaaaatcgaaccaaaaaatggcaaaaaaggtttatttttggcaataagcagctaaaaattcctgctttttctccctaatgataaaactttaaaataagtttggcgattcgacttcgctgctcaaaataaagtttttatgggtctaaaataagaacattttgaaaaattaattaataaagaccgagaatggtcggttagttgctcaaatgttcataaacataatactaagaaaaacaaaaatagttgcaaaatttgtcctaaataaaaattcttcgaagaaaatggggttttattaaatatatttatactaaaaatctcatccctgctcatgagcaaaaaaggaaaaataacctttttgggcagtttttttctcattgttttgttcttgcgcttccgtttctgtcgaatagtttttttgcttgggccacttaagatttgctgattttattttgtcatgcaactaaaattaaatggtaaatgaatacttgaatgtgttctcctcgcatcaatcgatgcaaggagaacaattttgtattagtggtaaaataggagtcgcttttttcaaggtcgctttggcggggaaaaatttttgtggggcggctggcaggtgaaagaatggagtgaagctactgatgaggagggaaaggatggagggggggggggtgaggggtgggagggaattttggaacggagcaatcggccacatacactactcatctcgtgttctcaattatttacattagtgtttccagttgcaccttaaagataagtgataccacaaatatatttttactaaatattcgttatgctaccaaattaatgactcaattttatgcaatatgttttgtaatttacgccccaaaaaatccgaagcctattgtgagcacaataaaaagtatactttatatattacaaaagttttaataagtttcgtacaatttctgttaataaattgtataagtaatacacatttttattttattgataataatttgggaatttaaaaagaggaatttttggaaataaaattttgttcataatagttattatttgcaacaaatgtcctcatctatctttgatataattgaatatttagataattaaaaataacatatttaattttgaataactaaaaaattaatcttaaagcaataatagatgaaagatatgacattttcaccaaggaataggtaataaaattgtaaaatgtttctttgaattagagaaaaattaatgtgcaaatataacttaaaataagccaataatttattatattataaaagatagaaaaactcatttatacacttaaatctatcgagttgagtaataagtcctgtagttaaattagaagattaatatttttacataaacattgtcaatcaatatctatccttatatttcgaagcccattcttttctctgtctaatacactttgaccagcaaatccaatttactattatcaaaaatagcgattaacaaaaatgggtccccaatttaacaaaattcagcaatccgggataatcttaaaaattctttttcaacaaaaacgatgttattcgctgttttatttactttcattccctaaaagtcaaaccttgaacattataatttattattaacaaaataaaatattaatattttggttagcaatagcatcaataaaataaggtataaaaagcaaaatccttcagtttaagtaaaaaattatttaaaaactaaatttattttttaattcaacataaaatttttaaggagaaaggaaaaacattaataactgaacaatctttcactgatctcatttgcttttttatatcttctcatatgaagaaaattaaaagaatattaaataaaataaaataaaaacgtcaaatccatcaacctcaagcttttcaatacgaaaatgaactcaaaagccaagagattcgagcatgaccgagaaacgattgtttcatatacatgataatgccttttacgcaattatttatttaatattaattaatttaaaaatttttaatctctttttaatacacatatgagaaaaagcctgggttatggtttttaaactggattaaatctgaatacagacaagccagagtggcacgctcaaacgatatttgacaagaaataattataaaattctatgttgatcatttgaaattcaaaatcaattgcacccaaaaatataccacctaaaaataataagaaataaacttaagattctatgattttcataaaatttattaataccaaaattaacaaaatatattaataaaattgtactaaaaacaaattgaataaagaaagtaaataattttgttttcaaatgattaaccctaatataaaactaataaaacacaaaggcgctagtttaataaaataaatttaattaaaatttatatttgaaacaatgctgccaatagtcaaaattatttcttcattgcgttgcacaacaatgagtttaaagcaacgatacattaggtaatacataatctgcattaatatatactctatngaaagctaaacttaccacaaatataggatgaaaatcccctaagagacatgttgattaaaa

SEQ ID NO: 17680 - DNA, 1758 bp, Heterodera glycines
  unsure (1)..(1758): unsure at all n locations
acatttgagtcccgggcccatacntcgtcgggggttggtttagcgaaaaattgcctaagagcaaatttgtagagcttttaagctctatcgaacggtgggatatatgcccggaaaatttcaaaaattttcgagctaggccacctagaaattttcggaaatttttttttggttgaaaatgggggtgaaaatttttttcctgggttattttgaggtgctgagcacgaatatgatgtttgttttacgtttcagaatttttggaattttttaaaaattctttattttttggcaattttttggccctcgggattttggcctaatatttgaaaattcatatctggcctaaggtttgaccaattttgattaaataaagcattaaaaatggagaaaaatcaggagaattttatgggttttatttagattctctatcatgaatctaaaaaaagttattccggaagttctggaaaaattcgaattttcagaaaaaaattctgaactcggttctgaaagatgtattggaaaagtaaaataatacaaaaatccgcaattttttgctctattttataaattttattttagctttttatcacttttttgaaaaaagttatagaaataaaagtgattttgggaatcgggaccaaaggggtgagtgtaggatttttgagtgaaaaaattttttcatcaaaaaccttcaaaaaacatgtctttagggccaatttaggccgctgatcacgaatacgtgatcagattttacttttgacatcgttaagacctcagaatccctgtgtgattggggattctgaggcatcattttgaggggggagggggcaggttcgaagccgggcggtgtacattatttttctaccatttttttcgtgtttttcaatttttattcatttaaaatattttttgagttaataaataaaaaattatatttaaattaatttttttttaatgaataaattttataagtttaaatgaattatttttttaattgatagaatttcatgtattttttaaattaaatttgttaaaaaatattttcattttaatttaatgaatttactaattactgttgtacctcttccaatcactgttgtacctcttctaatcattgttgtacctcttttaatcacttttgtacctcaaaatttaaataacgggcgctaagcgcccgtccaaggccgcgaagcggcctaacaagctaaaaaacgggcgcgaagcgcccgtatgagttcaacgaatttaaaaaacgggcgcgaagcgcccgactgaggccgcgaagcggcctcaatagcccaacaaatttagaaacgggcgcgaagcgcccgtctgaggcctcgaagctgccttaatagcccaacaaatttagaaacgggcgcgaagcgcccgtctgaggccgcgaagcggccttaatagcccaacaaatttagaaacgagcgcgaagcgcccgactgaggccgcgaagcggcctaacaagctaaaaaacgggcgcgaatcgcccgtatgagttcaatggatttaaaaaacgggcgcgaagcgcccgtctgaaccaacaaaatttaaataactggcgcgaagcgcccgtcttgagcctcgaataacctatagcttatctaggtagcgaagctcccaaagcgcgaattttagaattttttaacagttcgcaaatatttgtgcaaatttttgcgccacagaactttggtcgaatattcgcaaattcatatctagcctaagggttgaccaattttacaggaataa

SEQ ID NO: 17681 - DNA, 2541 bp, Heterodera glycines
ggctggcacaaataattcccttccccccccccgctctcgttcgttcgttcggcggcttctcaaaaacaattttcaattagctgacgcgacggctggcacaattctcttctcccgtttttgtcatttctttacgaattatgaatatattttctagaaaatgaaaaaatttctttttttgacaattataattctgttgctatcaaatactcatagttcgaacaaacagagacatcggaaacaaagggcagtttcggctttagctcgtttgacagtggctttatcacgtataggcacctacattaaagcccacccgtacattaccgcctcgacaattttgatggaaatgggctcagtttccctcaacatttatttgctaatacaagaaataaaaggttaaaaatctttattttttgaaaaatataattattttagcttgcgaagagaaacagatcttaaaggactttttcccatttgtgctcactctgaattcttatgaattcagtgtgaatgttgatgactacaaccctggatatatttttggaaaaataaataccgaaatagggcgaccagtggaagagatttgttttgcaggtcagccacaaaaaattaattcgttaaaaaattcatttaaagcaccgaacaaagtcacccgaaagataagaaaccgaaaagatgacctcggcattttgttgctgtacgcaattagacagcaaagtcggctggaactttttgaatgtccttgacggatttctgttcccgttggcccttgggaaaggcactttaaataaaaattagaaaaaggtctactgtagttaaaaaatgtattgtggtttgtctattgtgttgtggttagtatgggctcaaaattctgcgcctcctcgcggtgagtccggaaacagagttaatttttaaaatattaattaatttttttgcaatggaattaactctggctaaagcagacgtaattttgtctaattttgtggcttagaattaaatttttaaatttttttttgttttattgaaatccccaaatgtcgggtccctaaatgtcgggttgccaaatgtccgtggttttcttaagtgtcttttgctcaaatgtcgttcggtccccaaatgtcgggtccccaaatgtcgggatccccaaatgtcggatccccaaaagtcgggtccccaaatgtcgggatccccaaatgtcgggatccctaagtgtcggatccccaaaagtcgggtccccaaatgtcgggatccccaaaagtcgggtccccaagttgcaaatccccaaaagtcgggtagccatgagaaaacagtggcaatgcgcgaaacgcaaattaatttaactgcaattagagtgaacagcaaaaatgaataccgaaatattaaagaaaatataaaaattggcgaatgttttgacatttccatccctcagcaggaaaataataaaacgaaaaaaatcacttttcaatttacaatttatgtcaaaccattagaaaatgagtaccaaccgccggcggatgaccacgacgaaaacccatccgatgaggggccgtatgaaaaccgaattttagacatcaaaatggacgacattcggacaatggtccgacgcaacaactttgtgatccatgagcctaatccgtcaatggtgtacacgttcaatttgggcaaaatcgatccgccagggtttttgtggaaacgcaaaatttttgttttgccggagaatgatttgagcaattaccatgcttttttgtatgccgttgcctacagaaatcaacggattcaggacaatttgaatagtaaaatttgcacgaaactgttgggatatgcgccatttgtgaaaattgacaaagaaattgcgcccacctttgaaacggatgacaaaagggtggaagtaaattttaaaatcccgaaaaattagtggccaataaatgggaagacactaaattaaatggatatttattgtttttaaaaaaataaaataaaaatagtcgcaaagttattaattaaaagaagagtaagtgaaacattttttcaccttcaataattttttgtgcataaatttctttgactaaaataggtatttacactaaaatattaaaggaaataaactaaacatttattcatttttataatttcagctaaataatgaataccaattaacaataccaattgatgcgagcaatctgttcaaacattacatttttggcttcaatttggttatttattcctatgaaaaggtcaatcattatttatataagcattgaaagcggccggcaaccagaaggaattagctaaacaattcgttaaatttggttcttaaggattttgcgtgaaagatttttctttacaaccaaaacacataattagtgccaagatttttagttgaaaacaaaaatccataaagtccttcaaaatcgttgcaaaaaaaactttttgaatattaaaatattgtttcaatttattacttgcttttatttcataaaataaattttttaaatttttattaaaaaaacccattttactcttaagacaactattatgataaaa

SEQ ID NO: 17682 - DNA, 1521 bp, Heterodera glycines
  unsure (1)..(1521): unsure at all n locations
ttgacgggtttaatttcaatatcaacgagttttttttatagttattatccccgacaagcatttggtcaggcattttcgttccccgacgattggggctaaatacaaaatattttgtttatgtttgataattcaaataaattattattaaaaaatgattttctgaaaaattactgacggtaatgaatcccacaaatttatatagaaaaagtaacaaaaataaaaaactacaaattacaaaaatgcaaaaaaggtcataacaataatatagtagttgcacatccatttatagtccataatgctttgatagcattactaattgttcctccattaccaataatttctcacattttgtctccaatttcagtgtttttgaatcaaaatattcacccaaaaatgcatccaattgggcttcattaataaatccgcccaacaaagcctgaaaaattaattatagaacaaatacaaacataattttccgtataattttttaaaattaaaaaaaattgaaaaaaatttgtatggttaaaaggctttttagaaggtcagttgaatattaattatatatgtatatagatttattattagttcatttttattaaaaataatttttttttttgcaaaaaatagcctaataaaattttttttttatttcttcttattttattaatatgtaaaaaataatttttcaaaattactttataaagcacaattaatttgggcgcatccgtgccaaaaacgataaaagcgcgcataattggcgcaattaacggaaactcaggcccatatttggcgatcagaagtgatttttgctcaagttctgcccatttttctttgtctcccggttccatctgatcgttggcaattcgtcgcaccaaaaattcaaaaaatgcgcaaaaattctcctcatttttactttcttcagggttatccaacggttgaccaattaattgggttaattgggcatttaattggcgatcaaattgattggatattaattggcactccgttggattaaacgcatcaatttcgggctcaatgttagccgaaaaatgaaactcatttttggcttcatcaaagattggattttcacgaaaaagcagctggccaaacacaaggccgatgaagcgaagctgttcaccggcaatctccggtggtaataacttgaatttaaaattaaaattatgctctttttaatttataaaattcattggtggtgtttcatttaaggggttaaaaagaaaaagctggaatttctaatctttataataattaaagaaatatatgtatttaaatatattagcatttgattttttaatatttaaatatttaaataattgataaattaagaaaatgggataactgatttaagattgaaaaatgaaaattgattctcttttattaaaaataattacaaataacaacgataaaattgaattttatatattttttanatagaattattttaaaaataccgaagtattcacaaatgaattttctaataatcaaaaaaggcatttaatt

SEQ ID NO: 17683 - DNA, 1485 bp, Heterodera glycines
gcttcattctcaaaatttaaaatgatttaatcagtcaaaaaaatgctcgaaatcaaattaggtttaaatttggttttttttatataattctgaaatcaagaaaagtgttattattattttttttatttgtgaaggttctccaaaattccttaataaaagtgtaatctgcttagaaattttaaatttttttttgctgcattatttccccaaaatttttttgttgaggagggccgggccggctgtggacagcaggcgccgcccaccaatttttttagcatattttcattaaaaaaattctttaaattgccaaacttatgccaatttatcaaaatttaaaagattctgaggattttccccaaaagcctcaaaaatcctcaaaatttctcaaaaagccacaaaaatcctcaaatcctcattttccaaaaaaatcctcattgacctatcaaaaagtcacaaaatgaggataaatcctcagatctggcaaccctgtttttaacgcaaaaacaaaaccaaaacatttccatttttcaaatcattttttaacgcaaaacaaaaacaaaacgccacatattgcgaccgatgtgggtaaaatgaagaatattttaccaaaccaaatcccataattgctggacgttaattgcgggttttaaactgtatgtgaaatcctgcaagggtaccaaatttcgtcctcaaaatttttaaagtaaaaattttttctcatttttgttatgatatcttaaatcattcaaacaacagttctgtctatattatttaatgctattatgttgggtaaccatcaacaattaactattgccagtgcaaatgcgtttttgcttcaaaatggtatgtccgttattttagtatagatatcacttaattgatcgatttaggacttaaactgagaaaacatcagattgaaggcatcaaaacacttttatcatggcacaaagagggccatggcggaattcttgcagatgaaatgggccttgggaagacatgtcaagcaattgttgtgggagctattctagcggaccaaatcggcaaaaggatgcgcatgttggtgatttgtcctctttctgtgattagccattgggagaccgaagtgagcaggtaagcatatgatgaaatgatcgagttttgtttcctgttatatattacaccgtccatttaattttctcgtgtagattttcttgtgatcgcttaacagctttccgttaccacggtgacaaccgaaagtccctcgagaaaatgagccactggaatgtgcttttgacaactttcgaaatttttttgaatgatcatcggaatctgcctttcaagagttgggacattgttgttttcgacgaggtttgtttctataactgtcatatattgagctaaactgaacatttattcattataaggcccatcggctgaagaacagtgaatctctgacgcaccaggcactgtccaactgtaaattcgactggcttttgatgatgacgg

SEQ ID NO: 17684 - DNA, 1585 bp, Heterodera glycines
ttcgttgctttaccaaatgctttcgccccttagggaaacggccgtcgaccgtccgccgaatttcgacccccgaggcactgtcccacaccaaacgcaacaacagtcccttctccagccgcagctttctgccggctcttccatcaccggaacgacgattgtgtcgcccagcgaatccacttgcattttcggcgtcaacgacccccgcggcactcagtcggagggcgacggcagcgaatttggcacttggctaagcgcgtcgcatttgggaacgccccaaatggcgaagtcagttgattttaatgggttgacgagagggatctcgaaggagtacctatatttttgtcctttaatgaatgccattggtttctgtccaacagagtgccgccgtctcagtcccaattcgttgcgtcccaacagcgaatgccttccgtcgcaaagcaaaacggccaaccgcagtcacaaatgctgcattttccgatggaagtacgcgttcaacagagcggtgacgcgcaacagtcgcaggaggccggcgaagtgagtcgaaggtcagagcggtggtcgcgtgaggagttttaccccccggcggggagtgagcgaatgccgggggcaccttttcacaaagtgacaaaggagaactatgtgatcgaacaggtgcactcggtaatgatgcaattaagcgtaattaacataaagcaggtggtcgagtcgggccccaaattggttaccacgacgcgcattgtttaccctccggcacagcaacaacccctgggggcacagcctcaaacgcaacaaataccacggcaacaacaaaatcagccaaagggacaatggcaagcgaaaccggaacaacagcaacaacaacaacagcgaaaaatacaaccacagcaggacggacaagcgcaacagcagcagcagcgacaaccgccgccgcaagtgccgttcaaaacgcagcatcagaaaatggcacaacccacgcaacccccgcaacggcaggaacaatatgcggtgcaacagcagccacaacaacatgaacaatatccgatgcagcagcaaccaaaacaacagcaacaagcgcaacaatattcgattcaaccgcaactacaacaacctgttcagcaagtgcagaaacctcaaaattttgccaaacaacatcaatacgttcatcagcaagtgcaatttcaacagccgcagccgcaacaacaatatgaacatccacaacacgcaacagaacgggaacaacatcaacaagcgcaacaatatgtgatgaagcaacagcagcagacacagcaaaagcagccccagagagtgcaaattgttggacaaatgcaactcggacaaattgaacaacaacagcaaaggggcggaggaggacaacaaccagagcaacaacaaaagcaagcagtagtaggacaacaacaacagcagaaggagaatggccaagccaaacagcagccgaagcagggacaatttggacaagaagaagagcagcagtacaacaagcaaaagagcaacagaaatggaacaacagcacagcaaatgaacaaccctatcagatccatgtacaaaaaacacaacaacaaacaca

SEQ ID NO: 17685 - DNA, 1134 bp, Heterodera glycines
  unsure (1)..(1134): unsure at all n locations
tcagtcagtccggagagacagaagcatcgaaagcatgtgatggtgaccagccgtgggtaccgacaaaacgcgagttgnaaccagaaaaagtaccaggtgggggcagcagaccaaaggggggcgggtcaatcagagggaaatggcatttaaaatagaaacggaaaatggcatttcaaatggggaggattagaatggcatttgtgccgcttcgccacttcgttcacccgtccccccttttttaaggacttccgtaattacgcagaaccgttgtacgtctgtcccgactttccggccgatggctccgtttgccaattcgacgattcgcagcaaaagtcccccgagcataaatactattaccaacacttccaaccccagcaacgcgttcaccagtatttttcgccttcctctgtcaaatgggactcagtttatgaggtttaatagtgaaaatggcacatcaaagaatggcattttcttcaggacgaattccccgacggacagcccccgccatttgcgcatggaccgggcagtccgtacgaatatttgctgtaccaccaaaaagtgaatttggaccgacgacgcgccgaaagtgaacaacgccggaggcaccacaggtgggagagggggcggggtgctttttaaaatggaaagaaaatgccgtcaaagtccggtgccgggagcggcggagcacggctacaaattcggcggcatggactttgtggaccacatcgagttcaacccgtgctcggacgttggcgaaccgtttgacgagcgacagtcgcgtcgcgaccttcacacgggcccaccacggcggagaggcgacttttacgggttggactacacgacgatgttgccggacggacagtggcgacagcccactgaatgggaagcggaggacgcgcagaattaccacggctaccaggcattgccgccgcggaagaacttccgcctgtgcgggcgatacaccgcggacccggacgcaccactgaacatgtgagaaaggcggaaggggaggcggaaagaataaaaccctgttcagagcggaagcggacggactggacgagctgaactcggattatttggtaaacaaaatggaaaaaggaaaagcggacattcccttccccaaggtgggcaaca

SEQ ID NO: 17686 - DNA, 2174 bp, Heterodera glycines
ttttttttgcttcttgctttccgtcttcttttcctctttctctgcgggcgcgtttctccttcttgccagcaggcttttgctcctcattttcctttttctctgtttcctggctttctgacttcttttcctccttctgtgcggcgcgcttctccttcttaccagcaggcttttgctcctcattctcctttttctctgcttccttgctttctgacttcttttcctccttctctgcggcgcgcttctccttcttaccagcaggcttctgctcctcattctcctttttctctgcttccttgctttctgacttcttttcctccttctctgcggcgcgcttctccttcttgccagcaggcttttgctcctcattctcttttttctctgcttctttgttttccgtcttcttttcctctttctctgcagcgcgcttctccttctttcccttgggcttttcttctcctttcttttctcctccttctttctgctcctctgcctctgcaccgcgtttttcctttttgtccttcggcttttcttcctctttctcctccgctttcaccgcttgcttctcctctttgccgggttgcgcttttgccgctttttcattgtctgcctctcggcgcacaattggcccatcgtttttcgggtctaaataaattcaattataaatttaaattataaagcattaattcttccacttacatgcttcgatgatcagcgcacagaacgccaacgagagcagcaaaattagtgggaaattcatttttcaaaataaaatatttattttctgcttttagaaaggacgggggaatggatttttaaaaaataaagtagacgacgaaacaattaaatggttgcttttcgctccgcacttttgcgcttaaatagcccgatcggtgcgttgtttttgtcgcgcgtcgatcggtccggtgcttgatcaaaaaatgaccttttccgtcacaaacaccaccaatttagtcgcgccatcgtgcaggcgctggctgcaattggttgggttgcttggttatagtaatggttgtgatcggttgcatcagtcttacgctccgctgccccccgcctctccccgaattcccccccccccatttcctgataacccaccaacaccaccaccacctccgccaccatcataatcagagtgtgttgttgacgctggtggtggtggtggtggtttttgtgggtatcggtccgttgcttagcgccagtcgccactgatcgcccgtccgtctgtcaccacacaacagcggggctggcggcgccgcgccaccaacaaaattttgatcgccctccaccaacccagctctccccgacgcaaaataccagcattaaaaactctgctaccagccactgactgctatcgctgtccgatcactctcgatcatatctgagttcccccgtccttcccccccccccgggagcctccagcgctccgcgtccgcaatgacacgccgatcagtcagtcggtgataatcaaacccaactctttccctcggctattttggtaattaattcaatttttattaattgatccgcaatatttttgacaaattttttgcttgaatccggcaactttactgatccagaaagggtttttagagtgtaaatgcgggcggttgcctctgttggctttgctcgcctttttcgcctgctcccccacaaatattcgtccgatccctcctccgtccgtccgtctctcctcccgcccttcgcaaatccttccgctcccttcggcatccgcttctccttcgcctttgtccgcttcttccctcggtcgaatccaaacttcccggatgtatttgctcctcgtcctaaccccgtcttttccccgtttttctccgttcggaattaacccgttggggcctttcttttacgctcctcgcatttcgttgtctttgctttccatctgctcccaaatacaacgctcaaaattaacagcctaaaggtgaaagagcggcgaattttgtcaacaaatttaaaaataataccgggccacgaaaatcgttcagcacagtttcaattgagtctcgcgcaggttcaaaagggactcggacggaaagggctcgaacgtaccaaaacagcattaacaatggcgttttctatgatacaagattcgtttttagatgtaaaaaaaaggggctataattaccccgtcctcgtcgttt

SEQ ID NO: 17687 - DNA, 1519 bp, Heterodera glycines
  unsure (1)..(1519): unsure at all n locations
ccccccccccccccctctctcctcccctccatccccctctcccttagtaagggctcccgctgccacgctttctcgcccaatcagtttcgcccaccgagacattcgctgaccagcaccaaccaaattattcactccgcgcgatcaatcgcatcgcactaaaaatggagccgaagcaacataaagaacattgccatcaattaactaattaattggttaattaatatttttatggaagtgctggtacacgcccaatttcttcagcagctgatgctctattcgtttcgcaaatctcatgaaaaattcacacaattttatgtgggattgggtgatgaatttgaaatatttgtgtgaataatgatgtttttcgaccaatgtttattatttatttgttggttttggagcggtgtgacactgaaaacggactgactgacagatcactctgattactcccatgtcgacctcgacacagcaacattattcatccattaattcattcattcatcccattcattcgagaatttgttctcgaatttatgggggtgaaatgcaacataaaatgcgcacaactggttgaaaactattgggggggggggaaggaataataattggtcgataggaatggaagaaaaaatgtatgcaaattgtggttgtttgagcaaattaagagaaaaagaaaaattatgatgaagaaaataaaaatgattataattttattactttttaaagtgggaaataaattattaaataagcaatatgatgcagaatgataaaaatatttattaaaattttgaaattattaaaaacctttaaatttttgatttaaagtttcaataaaattttaaataaatgctattccatttccttttgaaaaaggtaagaagcttgatgttggttaaagctaaaaaattagggagaagaaaaattttaaaatgtaatcattttttaaataaagtattaaacgcaaataaacaaagaaaaatgggtacaaattttaaaataaataaatttataattaataatataataacaataataaactgattcttttcgcgagcatttctttcttattgataatttcaaattttgtgcaccattttcatttttaattgatgggccagtgatttatcagcaattggggcatcgttctgctaattgataaaaatttgccaaactgaaaaaatagaattaaaaaaataaggaatttgcacaaattataacatttaaattttgtaaagatttattttatttggtagtgaaatagcaagttgattaaaactcattaaaaaaataagacttttcattaattaacaaaattgggtaaatataaaattcaaaaaaaataaataaattgtccatatttccaaatatttatcttttgctttttactttgagtttanaatgggccanaattgcactnncaaatcgattagggtgtctttatatgtttttttnaagattatttttatttcgagaaattctgtntacatttttttttactttttatgaaaattccctataa

SEQ ID NO: 17688 - DNA, 2599 bp, Heterodera glycines
aaaagagagaatttttaaatttgagattttcaacataagggggcaccctcgacaatattaccgggctcgcaaatcgaaattggtcaaaatgacccaaataccgcgaataagacgctatttaaaaatggacaaaaataaatttgatttccaaaatcacaaatgtgaaaataaaaaatttattctctacatgattacaatgaatgggaagaaatagacattctataaaattaaatgttttgatgattcgttgcggattgcaacaccgacaaagggtgggtgaccattcactatcaaatgaaacaaatcatttaatgggggacggacttttcggcacggcactctctcccacactttgctcacaatcagtccttctttaggcgagttgttgtcatccgatagataatataaaacagaaaacaattatttatgaaaaaaaagcaaaggaattgttgtcttgcacataaaatgtcaaattttatgttagggccgccccaaccgaccgaatccttcgcgggttccatgctgagcaatccgacgacaatgaaaacaatggcaatgataagaacaacggaaaggccggcgataatgccaaacattggggcgaaattgggggaggaaaactgtggagaaaagagggacaatcactgttaggaaacgtttttgacaattctttggtcaatttccaaaatcaaaaacttcgaatacccgaattttaaaaatcataatttataaatttgttagaagtattttcaataacaaaaaatataaaatttgattcacgtcgaataagccaattttttaaatagattttacatttgattttcagatttcgaaccaaaaaaaagctgaaaacgaaccagtcaaaagctaatgagcaaaaatggaatcataattttaccgaccgctcattgaaattaatccccgggctcactgccctcccccctctctgatgacttaccatgtgaacgttcagccctttcctggccatttccaatcttttgttgtctcgttgggcttcttcattttgtgtaccttctggcgggtcagcgccaaaaacttctcaaaattggaaattttgtttaaaaatgacggatttgggggggggggggaagaaacgcaccaaaagcgaagaaaagcagcaaaagttgaacagtgagggagaaacggagaagcattgcaaaaagaaagaagggattgaacgaataaaaaattaaagggaaaagaaaaagtaaaaatggaacaaaaaccaaaagtgagtggaaaagggtgtcacatttgtttaaataattgtttatccaatgttcaaacagtgcgttttcttttctaattttgttgctttcgtctccgtttcgcttcaccaaatgcccctctgaatgccgctgagtcctcctctgtccgcaatgtctctgaaacagtgccgactgacacggaatttgttgagtttgccacgccgcttggaagtgaattggcacatttggatgatcagaacggggtgcgcacgacgcggcatattatccatccgttcctgaaaattgggtttaattgctccaaaaattgcaataatctccgcccccatgccaatattcattttccctcggggataacctgaaactcgtcgattatcacacgtggcaaaatgttgttcgtcttcatggccttgtagcgcattctgtgcaaattaagttttggaatttcattgttatgaaaatatgaaacattaaatggggggggggggggattagcagtgaaatttgtgaaggaaagaaaagtaaaattaataaaaaatcaccttatttttccattattaattttttggaacgtttattttcttttttgcgcttcatttagcttatttttttaaataatagcaaaaatgttgggcttttataaaatggaaatttacggtccaaaaattttttaaatcaaataagcatttttggtattgttactgttttgtaaaaatttaaagtttcataagaatggccaggaaagatcggtttttgagtattttgtcacaaaacatttttttaaatggtttcaattttaatttttaatagaaatgtgctcggaatttttttattttatttaaaatgaaagaaattatggtccaaaaatcgtacggcaacatttccattggcaattttacctcattgggccccactcggccaccaatcggcgccgtttgatgtccgcgagttgccgccaatggggccaaaatgtcatgcgatggccctccttccaccacgctctctccacgtaataggggtatttgtcataactgacaattggcaggccaattttagtatatttgtcgcgctttcattaccccaattccctcaaagtttcgctgttgtaatcgtagcgcttccgttcggcctgcagcggctcctccgtttcgtccgaggcggacggaaattcggccgccgcgccctcgagggacgggggcggagggccacccgaggcggaggaagaagcctttaaacatgggacagtttcgtggtttaaagcgtcatttccattaaattaaaaaaacaagaatgcaattacatacaaacgcacggcaacagaagacccaaacgcagtccgacaaaagtaaagg

SEQ ID NO: 17689 - DNA, 1006 bp, Heterodera glycines
ttcagtgcttctttttgttactgtcatggcctctgctgttcattgcgcactttctttgaactctttccaccattttttgaccttttcgtctccgtccgccttaacaattaccgactgaaaagggaaattaaaattaaaagtcacagctaaaacaaacaataaacacctttgtgacgctgcagtcccacagggaaaggccctcccttttggcaaaatccctcagggcgacgaagtcggcctctaaaattggggggagtgacgaaaagccgctaattagccaatacccgaatcgaaatttgaatagaaagtgccattgtcactggaaaaccgtttcctctcctgttcccaaaggtaaatctgaacaagtgccgaagaaaatgtgttaaaaaggcaatgaaactgacctgttcaacgacagtaacgggcacagaagaatcggactgacaaaattaaaggggggggggggggaaatgccaaataaatggaaaaggaaaagcaccaattgcgaattgttccgagctgacggcggctgtcgaatatttgtcgacaaatattgggtaatttgtcgggcggtgattccggtctaaacaaagagatgccgaattgtaatttaaggatgattaaggcaatagcgaagttcgaatagtgccaaatgacctgaaaagcgcgtctgaccgcgtcgcgggagagaacgccttaaaaagtaaaagggcgaagaacaatcagtgaatggcactgatcaaaagaaaggcacactgaccaatggcaatgtcttggaaacggtaaagaagttcggtgaatgtggacagaatggccaattggagggtcgaatttgtgtacgcgtacactctgaattactctgattttgttttccgatggtcaatcgtcacatcccattttgtccagccctctccctgccccattcgcgccctccccccaaattttccatttgcttttttgaaaattggttttttcggaaggggggggggggtggcccccccccccc

SEQ ID NO: 17690 - DNA, 1490 bp, Heterodera glycines
atttgttgcgtgtgaatttgtaagtggagaattgcgcaaagcgacgccattttggccggcattttcctctaaggcttcagctgaggcggcaacggaaagctgagtcatcagaggagtgagcagaaaccaactgaaaagggaagaaagtgaccatcggacaatgagtcattcttcgacggtccattccttttgctgatttttgcctcacccgtccttccgtttgcgtatgaaaatcagtcccaattcgcgcagagtcacaacgaatgcctgcacaatttcgggccaattcgggtcgagcctcagcggttgggcaagcgctatttttaatattaaaaataaaatggccaattggatcagttctaattaaataccatcgtcgccattgatgcaaagcgtgagccgtagcagaaagtccaaaacgggaaacacttcttcgccctttgaagcgatgaagcgcatgtaatggatcagataggcccaaatttgttcggagcggcccaaaagcaaaaattggaagccaatcgaagagatttcgggctctttggctcctcaaaagcggacaatgttttgaaaggctttttggaggaatcggcgcacttccgcgcaccaatccgatgaattggaaaaggtccttcgtcgtctccgaaacgcttttctccgccgcttcgctcggcagtgccaaatagcacagaatgctctcccatcgctccacacttttgcccattaagtctttggtcgctttgcgcgctttttcctcgtccaaatggtgcattttgaggttggacaattccaaagggttggccaaaaggctggagacgtaattcatgcggaaatcaagctgaggcaatttttaaatttaagtgaaattcaagtggaaagatgacacattaatttgaaagtcgccgttcgaattgccttccaaaatgcgcagtcggaaaaggagctgaacggcgctggacatggccaaatggaagcgactccgagtccacgaacgccaatcgctaaaggaacattcaaaaaaggacaattttaaacaaaatgacgacaattatggagataaattttaaagcaaagcacgtggttgcctggatttgtggaacatcagctgaagcacagattgttgggcaaaggcgggcaaaagacggaaaatggcgacgacgcacggacgcgactcaaacaattcttagggggggggggggcaaattgggagagaaaatgcgaatgatcaccacaacaacctacaattcgcaccttatatagtaaacacattcaactcaaacggaattggcccggagagaaatgaacccaaaagggaaccagggaagaaaacttggtaatcattaacatcattggtcccatataaaaaaggcaaaaaaggtcgtttttttcgattctaaaaagtgctcgggggtaatcgagggcgttgatcactaatccgacatcaaattgtcatataaatcatcaaatctatgatttttcatcaagtgatt

SEQ ID NO: 17691 - DNA, 1044 bp, Heterodera glycines
  unsure (1)..(1044): unsure at all n locations
agcagttcactgctgctgctggtgatatccattgacgtcagcaaatttcgtttccgtaatttatgcgctaaattaatttaatattaatgattttaaaaaatgaattctcacaaaatttaccgccacaaggactgatcaaaaggaagaaaatgatcggcacgatggaggacagaaggagaaggaaaggcgcgggatttgagtggttaaaccgcgccatttgagccgaatttggaaaagggacaaaagcatggcaaaagtggggaaaaggcacgacaaaatgccatcaatcagtgccaaagaagcttcaatcaataaaatttaataggtagaagaattgttcaaattattgagtccagggaattttgcaaattaaataattattaaattcaaatttaatcgaaaatatttaaataattaattgaataagcgctgatcgttgcgaaagtgaacacagaaaacgacattgagtaactgctccaaaatgttgtggaccaacgaaagaaaactgcgcatttgaggagatgagcaaaagcagacgattttggaaagtgggggagaagagaacaaatattgggcttaaatgggaagcatgagagaagagaagcggacgaattgacgaacgaacgaacgaacgcactccatttgcaattgatggaccaaattggggggggggattaatgggtgggcgaatgaagaaaagtcggacaaatcttgaaaaaactaatttcaagaaagtaaatagaattttaaaaatattaaattgagaaggtatgaaacttaatatcattttatataaaatttaaaatcccccgcggcgacggagttttttggtacggcgaagttttgcatttttttcaaatttgagtcattcaaatttaataggcttttttattttgatctaaaattgtttacccagaagcaggaaagaaatgggccaatcaacaaccaactttggacacgtcaaatggacaaaccatcanaaatggatggcgtaatcggagcgnngaaatgccatgcccaaaatgccatgccnacattatcata

SEQ ID NO: 17692 - DNA, 1045 bp, Heterodera glycines
  unsure (1)..(1045): unsure at all n locations
caaaaaaaaattttttcagctaaactttgtaagttttttttggtttaaacaaaaaacgaacataaattatgcgccaacntaataatttcttaaaatttgtttttaaactaaaagtgtataagaattcctgactttttaagtgttgccaattttatttgttggaacttattttttaatcgcattgaataaacaaaccgatagcttctaaatgataaattgtaaaactttacaaaatgcagctcatcgtcagacagttaagcagattaaacgagtttgcggagagctgtattatactgtataggaaagtgctttcatttaaaattgaataacattatgccaattatcgcgtagttttaaatttttggcttgaaaaatttatctttttgaatttgaatttaatgctgatttgtagggcttccttttttaggcaattgcacacttgataggcataggataagcccgaaaaacatattttccgcttggtttggggtgtctacgatgacttttataatgcctatttttgcctatttcggggtttttgtgcctaaagcgcctattttacgaaaatggcggtacgaaaacgtccctgaccggtaaattgtataactagtaaaaaaagtttttcagtacttctatagcaacacctatttgttagggggaggatttcatggtatattttcgatttttttttaatttagtcataaaaagtgtttatgtaattttacacaccgagtcaattttgaggggacacacgcgtttcggcgccgcgcgtttcggcgccagcgcagtttttggactataacttttttctttgtcaaccaaatcaaacattgttggtatcattcgaaagctgtaaatgtcctctattagcctgcaaaattttgaaaaattatgtaaaggttcaaaaaaattatggccagaacaacttaaaaaaccagattttccaacttttatggccataaatttgttcaaaattgatgaaattttttggaattatgcaagataaaagagaatctgaagggctttcgaatgatagcaacaattt

SEQ ID NO: 17693 - DNA, 948 bp, Heterodera glycines
caactccaaattcgaagcctcaaatggaggccatttttgaagtaaattttaaattaattatgctttttttttctaaaacaatataaaaaataataaataaaatttaattaaccatttatttttcatcattaattttttagataaaacaattagttaggacctcggataacagaacgccgaaatacacaaacgaattccagcagggatgaaatattatttaaaatgaatgatatttttattttaaatttaacatcttctccataaaaattgggaaatattttaaatttgctctaaaattcaatttcaaatctaagcgtttggttttgttgtttgtttatccattatataaacacaggatgaccaagtgtcctgatttttagatttatcctgaattttcagattgtcctgaattttgaggtctctggtaaaagtataaaaaggcgatatttttgtaacaaaattcattaaaaatcccgaaaaaattttccccggcggcgcctatctacaccaccggcccccacaaactctcaatttttcttaaaaaattgacttaaaagtacaaaaattagccattttttagactaattgcattaaaattttcataatttccctcgcgcgaaaaacccggtaatttttggggtctaaatctgaattttagtgtttttatcctgaatttgaaaaaaacaaaaacttggtcaccctatataaacagcataacaataactgatcagcgtgatttgttgatcgatcacaaatatttagatttgttcaaactcagcgacgtaacgcaaatagctcgtctctgtggtttgtagaactgaaatttaaaaaggaagacatacttttggctgactcattaaattataaaataatcataatttttttaattgattgcatcgtttaaaacacttttagatgactcattaaatttaaaatttatttacatcg

SEQ ID NO: 17694 - DNA, 1376 bp, Heterodera glycines
gattaagcgtattttttcaaattcgaaaactttaactattcgaaatactttcactacttttaaataattttaaaaaattaagttaattttggggccttggcggtgccgataggcgccgcaagggggaggggaaattaccaatttcggtcctatgatttacacctacgaatttgcatcaaaaatttaataaaatgaacgaattttttgaaaaattgtcaatttaaatgggaggctccgtccgaaaacggataaattttcaaattgtttttattttaaaaattttgggagaacagaaaaaagatttttttgctattactagataatcaggttggcatgagaaaaaactttctgcaataataaaatatgtttgaacccatcagatttgaactcataatgtcttcgcaatgaaaatacatacctaaatgggcgcctcgaaatcatcaatattattcacaacaaaataaaaattgtataattaggagataatccgcgacagttaaaattagagtgccacgggaccgggaattttgggcaagcccgggaccgggaccttttcgggttgaaaaaccgggaatttttggctgggaaaaccgggaaaaacccgggactagtcccggtcccggtcaaaaccgggaccttggtactcagttgtactcagttgtccgctaccaggtcccggtcccgtggcactctagttaaaattgacaacaaaagatatttttggagactttgtatttaaattcaaattttctactacggtaccttaattttgtaaatgtaattaccgaattacctaatttgttgacgattaaaataaattgatgggctaacaattatataaaaaggaatcgcattatttgccataaatgggcttatcggataatcattagagtccggatttttaagcacaaaaaatgacacttaattaatatacaaaataagaatggatctagaaattcagaaaaacccgaagaattgaaaaattttatcagaaattcttccccttcgaaatatttaaattattgaatttcggttttcaattgaaataaccaaaattatagcgttttttgttgtcttttttgtccaaatatcttataaaaaataaaaataaatattatttgcctttttaatgcttattcgaggatttttgagcctattaaggcctattatactatttttctgcttttttaggtggctgtttttttatggaaattctttgttcttgatttaagaatccataggtttttttaaagttatcctaaatttttaatagaatttttttcatttaaaaaaaaatattcactgaataattaattaggaatttttattacaaacggtaatttattaatttttttaaatgggaagagaatttgctt

SEQ ID NO: 17695 - DNA, 2250 bp, Heterodera glycines
agcagaaggatgattgctgtccttgcacatttcttttgtttgcctttgttttccatccaaaaaataatttgcatttggcgaaagatttgtttatgttttttttgtttatgcatttatcgtcttctgagtttttagggatttgttgatcacgattgtccctttttattatatgacctttctcccaacattggcaacaaaaatatttgagtataaaaatggttgggtgcacaatttatgttgcatattttccaccttgactttttagcatatattttgtttgcataattttgcgattttatgtgtatataatttgcaccgtattcatgcgccttccacccccttgcacagtatgccaacccacaaaataatgtactgtatctgtatgacttttttttttactgcctttcaattgaaattcaattaataatttggttgattaaattgtcttcaattgaaatttataattgattccacattttctaatttcgaataattttgtgccgcaattccttcctctgataatttccgcagtttcccaatctctgataaaaggtgccgcattttcgaatgcctaataatatgatactgcgattccttcccatggtaatttccgcagtttcccattctctgataagcgattcctttgcctgataatttccgcagtttcccaatctctgataaaagttgccgcattttctaattccgaataatttgatgccgcgattccttcccctgatcatttccgcaatttccaatctctgctaaaaagtgccgcattttccaattttgtgtatttgattatgtcgttccctatgcctgataaaacagggccataatccctaaatcgttcacaatttaaacttttcccattcaccctttcgcgcatttgcttttctaattggcctatcactgatttagtgccattgtcatttctaatttttatcccatccattgtttgtctttatgcatttcaattttacaagtatactttaatcacatcatccctttattttgttagattaacaaaatggatcctaaatcgaaaaaagaggagaaagccggttcagtggcgggtgctcgagaggatgctcgagagtcgcttcaactgcgcgcggagcagcacattgaactccactcatacagagatgcgacggacgtcaattaccagcgaatggtaatttgatcatttttataaattggtcaaaagtgtacggtatctctgattattttttgtccattttttagtgcctggacagcgaggcatcagccggcgtgccgccgaaggaattgccaaggcggcacggtaagcaaaaaaataaataaataaaatatatttatagtgaacataattattcactagggcttgaacttttatatttaacacacctaatagctcaaaaaagcattttaccttttctttcaatcatgctcagtttttggcacctaaatttttaatgatgctcaaaaaacaaatttttgcatttttgattttttaatgattttttttatttctacggaaaattttgaaaattttgcttttttctttcaggtccctgatcaaggccttggagctgcgcagcgcgtacatgacccgcattggcacacacttcccgacgacgacgcgcaatttcgtggacggtaagaccatcacaaattaattattggcttaaaatattttgggtttttcagcaaaatacccggacgaattgcgcaagcagaagctgaagagcaaaaaacatgtaagcgatagggggggggggtttattttgccatgctttatttatttactccattaagccgacacaatgtacccactcgaaatgtcagcggaacattggggcgagcaagtgccgacttacgagcagcaattccaattgcgccgcgccaacggaattgtaagaaaaagatttggaaaaaataaataaaaatcaaaattggtttaggtggaagtgacgcacggggaagaggggcgaattgtgccagaattggagaagtattacttgtcccgcgaccaattttattcgtgtgttttggaccataatttgttagctttaggtaaattgtgtcccctccatttagggattacacgtggatgaacgatttgttggccgatgggccaatgaaaaccttttgcttcaagcggctctctctcctgaactcgcgattctccatgcatgttttgctcaatgagcaggtgagaaacatcaaaataattaaataatgccctgggggtgggacaattttctagca

SEQ ID NO: 17696 - DNA, 3092 bp, Heterodera glycines
  unsure (1)..(3092): unsure at all n locations
tcgtgctgaaatgcacaaattgtgaaattaatttgcataataataaaacaagccatgtannaagcacctcacaaaaaagaggagaaccattgagcagcgtcaaatggtctgaaaatgggaaaaaagtaatggcaattagcaaaacaattgggtataattaattgagtgtttatggccaaatgacccccttcctccaccgcaaatgagcgtcggctcagctccgccttatgcttcgctccagtcggcatcacaaacacgtctctgatctgcatcatggcaatctgggaacaacgggagaaaagaaaatcacacagtattcgcacaactctaatgaacggacacaaaaaacccaaattttttaaatttcctctaatttctaaacaaatgcaaattgctcacaatggtcacaatttcgctggagcactcaaattcaactgaaatggtgaataaaaatatgaccaaaaatcagaaataaattgaataaaattatcgctgacccgaggcgatcagtgccttcgcgtgcattggggacaacggaagttcggccatgagcaaaccaagcggattcaccagcagaccgtcctcgtcgatggccttcagcgcaaagagcaattgcaaagcgtgaaccatggccatggaagagggacgagaaaggtaatggaatctgagcagaaagaggggggaatgggggacaaaaagcgggaaataagaggagtaaacattgctacggttctcccaatattagcattaacaatgttgatttttattacagtcccgcttcgtctagtgaatgaatgaatatccgagcgtaatttctttaatttctcgattttgcatttaaatttgtactttcgtccgcccacctgagcacattctgaactccaagcgccttcatccgaagcaccaccgaggagagatcgcagcgctgaatttcgggcggtgtcgcgctgcgcaagcgtcgaaattcgctttcagcgtaaaggcggtaacatttgccgggccgtacgcgtccagcacgaccggcacgctgttcagctaaaagaatgtcgggtgttggcaagggatgggagtgaatggcaaaaacggttagaaaaatgatcgaaaatggaaaattcaaataaaagacgatttgactgaccggaagactttgagcaggggacgatcatcagtgtttccatgccgagtttggggctgaacacgcgcattttgacgaaaccgcagtcgatcactgtgccataaaaatcggaatgacttaaatagtggcaaaaatctatttcacaatgttttgtccgcaaaaaccgtacagattccccacaaaaataccgtagcaaacgcctgcgattgtcaccgacgtttccgcaatgtttgtcgtgattatcgcctttctgctctgatagggggcggaatcgaacgcgcggaactgttcacgggcaggcaaacctaacaaaggcggaaaggaggaggggaagaggccaagttcagtcaatcagtgccaatttgactgcccatcccaccgatcagtcggacggacatccaaaactcacaactcaattcaattcatctattcttatactgatcagcttttggtttctctctgatcagtcaattattgatcgtttgtttttttcatttcactgattgcccctctgatcggtcggacactttcgcacctccgtaaagcggcaccaccaacaatttgtccttgtctttgctcatcgttttggccgcgtggcgcaacaaatcgcacgccttctccacttcgtcttggcccgtaagaaaagccaaaatgtcgcctgggggctcctcgtcatgcaaacgcagcacagtctcgactgtcgtctgcacatagtcgggaacaccactgaaaaagtcgtggagagagttaagcaaaagaaaaaaaacaatggcaaaagaggaaaataaaacggagtcattttaaagtttaaaacaactgtgcagtaagtcataaatcaattccaaaactaattgtgagcaaaacgtacacttttgtgtagaaagtggtgaccgggaacatccgaccttcgacagaaattattgtggccgtatttttgtccggcttttgctgtgggttgtcgttgagttcgaaaaagtcgcggaaaagctgaagcaaaaaaaaagtgatcatcgacgaagagaaattgattctttcaaagccaaattgctgattgtttcgtccgaatttgtctttttccgctttttacctcggcttcgatggtggccgaggaaatgatcacgcggagatcgtcgcgaatggcgacgattttgcgcaggaagccgatgatcaggtctgtgttcactgaccgttcgtgcgcctcgtcgacgatgaccacggagtacgcctgcagcaacgggtcgctcatcagctcacgtaacagaattccatctgtgacaaactgaagaagaggcaagaaatggcatggacagattgggaacaaacaatcggacccgttcaaaaattgccatggcatgccaaacacaccttaatgtgagtgcgtgccgaaatgcactcgtcaaatcggaccgaatagcccacagcgtctcccagccgacacatcatttcgtccgccacgcgactcgccagcgaaatggcggccacccgtcgcggctgagtgatgcaaattctccgcccattttcggcccaaccgaactcagtcaaatactgaaaaaaacagtagacgaccacgcaaaagtgatcagagaataggccatgtttctgtttgtttgttatttcttcaattacttgtggcaattgcgtgcttttgcctgatccggtttcacctgaaattgaaaggatttgtgggtttaaagaagaactacggaataaaaaccgaattgctaacggttttcacttttcaattctaagttatttggcatcggacaaacaaataaacgccatttggttagttcccaagaaaatccattnggctcaattgctgctttgatgacttgtaattgctcgccaaacaatttttgcgtgttttagacattcttaaaagtagaggtgcgcaacggagaaatccccggaaggaagtctcatttcgacttttccgcttggattggctcaccgacga

SEQ ID NO: 17697 - DNA, 3291 bp, Heterodera glycines
  unsure (1)..(3291): unsure at all n locations
gtaaagtacataagctttttctttgtcctcatgcttttgtttctgcttccatcgcctcctatacccttgccactttggtgatttcggccacacagagcagcaaattgccctcgctaacacnccattgctgcccgtgtcgttgttggtgttgtggttggccaagtccaactgctgctgctgctgcgtcggtttagccctcaaccattggaccatgtggcgccaaaacgctatcggtgccatgggaacaaaacacccgcagaccatcgccgcaaaaatggacatgccgaaggagttgcagcggataaataagccgaggcggagaggattggcaattaaaactagaaatatttttaaattgacttttcttgcattaaaataattttttgttcgaattccgacatgcattaatcatagagatttgaccaaaattctctgaaactgtttccattttaatgtcggcagcaattttcatcggcggttcgagcccgccatggggcagttattttgactagtgatagtccaattaagatatgtcgaatttgcaacctcccaatcttttaaaaattcatggctcactccagcaaaaattatcagcaaaacgtaccgcggcacacttgacaacatcccctctctcaacaattccaacgaaacgacaacaatttttggacggcgcagcgcaattggacatcgcagcactgctaaccagcattgaagtgtctgaacccgttcgtgcagtcatttgccaactggatgcacttctcaagctcgcggtggacatgcttcatgagacgtcgacccaggacactcgcgcggtactggaggaggaccggagagaacattcggtcgttctgatgggcgtgctggaatcggacagttgcctttcctctacacggcgcgcgattgctgaccaacagcaggtgttggacattctggacgtttgtgaaatcgaggcaatgccgaccaaggttttcccggatgggccaaagaaaggaaggaagacccagacttctcaaagtggaaatgccaacccgaaagatgacacaatcatttctccgcaataaaaaccgacttaaaaactccaaatttcaagctgtctctgtccgtccgtctctctctcctgaacaactcaaggagcggcataatttgatcaattgtttgcagacagcccgcgcccaatttcctaatcacaatttcattgtttatgctggacacatcattccccgaaacgatgtctctgtttttcgtgatgaccctggtaattattcttgtttttgccataaatccaattcataaaatcttgcgggaaccacccatactgaaatttcaaaaaattttacaaacgtaaattccggtaccgcaagatttttcaaaagtcctcataaggttaataaatgtatacaaggtgctttagttaatataaggtctatctataacaaatgtgaacaaatagaaacaatttttgaatccttaaatttagactttatctgttttactgaaacctggggtaagaatgaaaaccaatttccttttcattcaaattttcttcaaaatcataccatttcttacactaatagattgaataagcgtggaggcggcatagcttttgtcgctaaaaaatatttgggtgtgaaatactaatattgcaatttcaaaattacaattcactaaatttgattcttatttatcgacctccttctactatttaaaaaataccaaaaatctttttaaattccttgacctttacatttcagaaaactgttgtatacttggggattttaaccttggaactaaagatttaactataaaaaataaaaaacctttccctttaagtaattttggtaatttattttgtgatttctttaataaatataatttgacatcctgcattaatgaacccactagggagcaatccttcctagatttaatcctttcaacaaaaactgacttaataaatgcggtagaagtaaaaggtggacttttagatacagatcatctaacaattctttttgatttttgtgttttaaagcaaaatgcaaccaagaaacaaattgttcttaggaaacacactaaataatattcctgaaacttttttatctattaagtccgccaaaaacttttacccaccgcatttattggcttcaattagggaaaaagcacggctatataagctaatgaaagaaaatagaggaaaatatgaacctttatataaaagtatctccttacatattaagactcaaataagaaatattcaatcccgtaaagaaaataaaatactatccggtgataagaatagattattttcgtatcttagaaaatactttaagccagtagaggatccaccagttattcagtataatactttgtttgtttcagactcaacttctaaagcggaaatttttgcaaaaattttttccgaaaactttactgtaaataattattctcttgattttgatacttctttttcttctccaacaataaacgacgttgaatttaatattatttctgttggtaaagttcttaaaactttacctaacagaaataacacatcaccggacggtattacctttagactgttaaaaaattgttctctttcgtttactccttttgttactgaaattttcagactctcccttgatacagggaagcttcccactatatggaaacaatcgattattatccccttgcataaacaaggggaaaaaagtaaccccatgaactataggccaattgccttaacttgttctttatgcaaaattatggaaaaatttattgtttgggctatttccgattttcttttaaagaacaatttattctccgaacatcaatttggatttataaagggcagatcaaccacaacacaactaatttcaacccttgaaaattggtatgatggtatttataataataaaaatatcgattgtgtctatatagattttaggaaagcatttgacgtaatcccccataatttacttttatataaggttcataaaattggtattaggggtaaaatcctaaattggatatctgactttctttcgaaccgtacctttagggttcgggttgataatactctctcttctgagtataaaatgagctctggcgttccccggggttctgttcttgggcctcttttgtttctgatatatattaatgatttacctgaattaattcctaaacaaatttctataaaattatatgcggatgatgtcaaattatattccgtgcgtaaaacaaaaaatgatagaattgctatgcaccgtgctttaaatattcttcttctgattggtctaa

SEQ ID NO: 17698 - DNA, 1789 bp, Heterodera glycines
tttatttaatataataataacaatctaactaaatttactatattttaaaaagccaatgcccaagtaaacttttcgaaaataaaattaattaaacaataaaaaccaattagcacgataaaaaaagatatcagatcacactgcgtactaattcagaacggtttacgagatttttcatctgctacaataaacacaaaatttttttttgtcatctatggaaagatagtaaataaaataaaattctatctatgcaaaaataatttttctcctcaaaaatctaatcaagttttttatgcattcttattttgaatgtaaacaaccgttgtttaatattttaatataagcctaaaaaaagattattattaaaatgcaatgcaaatttaaaaaattaaataaaaactcaaataaaacctttgaaaaggacatattctaattaaaaggcatttagaaaaaaaccatcaaactctttacaaaatgttcggtccgagggatttgtttaagtccaattaaatatttatttattggagaaggaaaagaaagtcacaataatttgggggaacaaaatataaatgcaaaaatgaatgaagggaagacactctgagaggggaaagggagcatatttatgggcgaggaaacaacatgaaataaggggaatcgattggattggcattatgtcacggacattcaaatcatcggcggcaatgccccgaacacctccccccttaagcgcggttccgaggttacggtgagaagcgctgcggcggacggcgatttcgctgagggtaccgtcgttgctgtccatggtcaatttgacctccaaaattttcctgttcgccatgcgggtactccaatggcatttccactgggatttccctctgatcctcaacagcaatcggtcttgggatgtcgaaggtttcgaacatcaccgagagctgatcatcggagtcggacgtctttcggggacgaagctggttggcgtggtagcgccctgatcttctatcggcgaatgccacgtcgtaaatcacaccagttcgctttgaaacttggccctgttgccaattttgggaaattcggtggcgggcaaacactttgtttccgatcggaaattcccttaatttggttccaaatcgcttattgaagcgtctcgccatttcaacatctctgtcgatcggttgttaaggtggcggccgcaacaaatccaaagttgtgcgggggttttctgcccaggaacatttagcaggtgttttgctgtttggcaacgagtcattcggggttgtccgatagcttaacaagaaagtttcaatgatttctttgcttggggctccctcccctgtcaattttccaaatgttcttttgaacgtgtccacgaaacgttcggcctgaccgttggacactggattattcggcggtgaaaacaggtgactcacaccgtgggcgggcataaatctagcaaatctcgtggctcgtaaattgggagccatcgtcgtactccaaaatttgcgggatactgcctcgttcgcagcaaatagcaggagcatatcactaccagttagaacactactacgatatatgagcgcacagtatgcgaataccctgtaaggtactaatttcagcgtggacgagcgaagcgaatagctactcaatcgcctgcagtgctacggtcttagcctgtgaggcgactgcgtcacgagagtagggagggggcgaaggcccaccacgaggccgcgaagaggccgagtgagtaccttcggtgcaggaaaattattaaattataaaaaatttctaattgctt

SEQ ID NO: 17699 - DNA, 2688 bp, Heterodera glycines
tggattatacggcgctgaaaacaggtggtgacacccgtgatgggccataaatttagcaaattcgttgttcgtaaattgggtgccatgtcggaccaccaaaatttccgggatgccgtgtcggctgaacaaatatcgaagcttttctattgttgccgctgtcgattttgtggccatttcgaatacctccgggtatttcgaaaaggcatcgacgatgattaaatattccttgccgaaaaatggtccggcatagtcgatgtggactctttgccatggagcagatggtcttggccacggttgaagtttgttttaactggtgcctttgcttccatttgacacggttggcagttttctaccatctgttggatgtcggcgtccatatttggccaataggcataatttctcgccaactgcttcattcttttgattcccgggtgtcccttgtggaatgaatgaagagttttctgccgaagtttttcggggatgacaactcggttggcgtacatcaggcaatttctcgtgatgcaaagctgttctttgatccgatgaaaaagctttatttcggcactttcgtctccgacgttccttggccaaccattcgtcaaaatttcttgactttttgaatggttttgtcggcttcagcagctgcgacaatttccttaaatttaattggcagtgcttcaattgatccgatcaaaatgtcgtcaatttccgaatctgatcggagagatgcaatcactcgatcttcgtcgctttttccctttgcgatcagccttgaaagcacatcggcttgaccaaaatcattggtgctgatgtactcaatgctgaaatcgtatgcgaggaggatcagcgaccagcggagaagtcggttggcactgcactggcgcactccctttttgcttccgaaaatggcaagaagtggcttatggtcggttagcaacgtgaattttcgtccatagatcattttatggaatttttgcacggcgaaaatcagtgccaatccttctttctcgatttgagaatagtttttctcagccggtgttagagctgatgaagcatgtgcaattgcctttattgttccgtcgggaaatttgtgggagattaccgctccaatcccgagttcggatgcatctgctgcaaccacgatttcttttgttggatcgtaatgcgtcagcagaagatcggatgacaaaatttccttaattttgtcgaatgcctgtttgcatttctcactccacttccattcgctgtcctgcttcagcagatcgtctagcggttttcgtacaaaacgcatgtttttgacgaattgctggtagtggttcaccattccgaggtaggaacgcagcgatggcacatctgtgggtgcgggcatttcgctaattgctgagattttctccgggtccggtctccgtccgtttctgtcgatgatttgtccgagatatttgatctcttctcggaaaaacgaacacttttccaatttgatccggaatccccattcttggaatttttccaaaactttcttcaagtgatcagcgtgctctttggcgcttttgcttacgatgatcacatcatccaagtaagctgtggcgaattcaaattctgccaaaatttggtccattaccgattggaagatggctggcgctcattttacgccaaaatgaagtctcttaacttcataattgccacggtgtgttgaaatcgagcagattttcctcgattcattatccaattcgatttggagatatgcatccctgaggtcgatttgcgaaaaatattttcctccatttaaggttgcgaaaatatcctcaagtagcggaagtgggtgttggtggtcttgaagggcattgttcagaccggttgaatagtctatgcataggcgtgcgcttccgtcggcctttttcaccgccaaaatcggagctgcccattcggtgtattcaactttcccaatcacacccattttctcccatcgctccaattctccatcaatcgcttcttgagcgttgtatgggactgggcgaacctttctgtagaccggtgcggcgtccgctttcaaagtcagatgcgccttaaatttcatacaacggcccaattcgtttttgaaaatttcggggaatgacgctttgagatggtcgatgtgcgctttgactgtcaaattttgtgacggtttttgagcttttgtaaaacctcttgtctcgtctccaactcggcacagatttactggcgcattaattttggccttgagttcgttcaggagtccaaaagcgtccatcatttgcacacttagcaaatttagcgatcccctttttgccacataatattcgcttttgatgcaaatatcgcggaatttgaaattggcgactccctttccgatgaatttgacttgtgttccatcgaacatgcatccactttcggtgcatttgcggagtcgggggctgccgatgacttcatgtgatagttcatcgatcacaattatttcagccccgctgtcgagtacgaatttgatgtctttgccatctaccgccacgtcggttttgaaaagcgaagcggagtttactttcatggccattccaattcgtaaatttccaattttcctttttggaattggcaatttgtttctccgtctccattcctgcactttgtcgcattggcattccgaaatgtccattttgggagcatttttggcactttgct

SEQ ID NO: 17700 - DNA, 1076 bp, Heterodera glycines
cccccccccccccccccccccctccagagcacgacatatatttcaacaaaaaatttgaaaaattgactagagaaatcgtacgctaacggatgacctaatggaaaaaaatccccgaaggagagaatttaattaaatccattccttcgggggtccgtgccgggtgccgcggggtaagcagtgctggtttcgtttcatcacggcccccatccttttgactagtcagccagcgttgcttaacttgtcagatcggacgggtacgcatgtttccacttttccaagcaccccaccgaaagttgaacgaaataaccaaaatataaggaaaaatttaaaaaattttttattctttagccttattcataatataagcctaagaggaccttgttaacatgtaaataaaattaggtgcgtttcagagcattttctgaaaaaaatatttatgaattaatttttcaaaaaattggaaaagtacgcaaaattgcaatgtctaaaatttttaaagaaacattatgggacagttaaataattatatgaataagcattcttctcagctgttaccctgcaaaacctggtgcgcttctgagcactactcgaaaaatgagtaaattaattttcactaaaaagttaagcctaaactttttggcctgtttaaagaggaattaaaaattttaaaaaattttattcatcttcctttttgatagaaaaagcatcagagagcctaaaatagcttgtaaataaaatttggtgcgtttcagagcactttctgaaaaaaataattatgaattaattttgcaaaaaattggaaaagtacgcaaaattgcaatgtctaaaatttttaaagaaacattatgggacagttaaataattatatgaataagcattattctcagctgttaccctgcaaaacctggtgcgcttctgagcactactcgaaaaatgagtaaattaattttcactaaaaagttaagcctaaactttttggcctgtttaaagaggaattaaaaattttaaaaaattttattcatcttcctttttgatagaaaaagcatcagagagccttatttaacatgttaatagaa

SEQ ID NO: 17701 - DNA, 2276 bp, Heterodera glycines
tttgaggctatactttatggcctatgtcacagaaaactctgaaattgaaaatttcaattttattttccattattcttaaatatttcaccattgcccaaaatatgacgggaaaaagacgcctgtaatcaaaggaatactgaaaacatttaagaatttcaatgataaaacgaaattcagcactgaaaaaggcgtctctttgcaatggcaaatccgaaaaaaacaccgaatgttttgtgagtgttgaggaagttttttttgaagtagcaaaagccattcacattcattgccttcacttacaaaggctatcaaaggaataaggaggaatcgaaaagggaaaattggacaaattaaactctatggatgattaaaagactttaaatatttacgtggtccaattttgccaaaaaaagaaaaaggtaatttatggttattcaggtacaaacggataagcagggttatctttggggaagttgtggttatttgtactcccgacggatgacgggaaagtgaatataaaaatccgagagggccttctttggtgtgttcatgactcggcaacactttcttcgcccttcggcagttcttccccgctgttcggcaccacaattgtccttatttcggccgtgccctcccctcgggcgtcgtcgtcgtccgtctgtgtctccatgtccgtctcggacactctctcttcattcggcttccttttcagttcgagcaaatgttcgcattggttctttttgctggggttttcttgctccctttccgcgagaagtcggtcgagcagaggtcgtgccaagtgaatgccgctggggatggagttgcagtcgtcgaacccttcctctttgagcagcagcgtcagtgtgtcggcgtcgttaatttcatgcgctgactcagtgaaaatttctaaatttgaattaaagcgggaaattaaacgccctcgtcccacctctgactcgtttttcgattttcatcagccacttttgttcaaattctacaagagaatggtcaatcttcggcgcagcatcgaatataacgacgatcatggtcatgttgtctctggatcccttcgacaaacacacgtccaacacttggttagaagccattttgtggtcatccgtaacggaaagtcgagaacgcacaagcgcacaaaggtcttcgttggcaagaacgtcgtaaatgccatcacaggcgaggaccaaaaactcatcatcttcctaaagggaagccaacataaatggtgccctcccttcgccttttttttgccgactttgtctcgcggaacgatgtaaatatcgggctcaggagaaacaagttgttcagtgacacaaaggccagggactgatttgtactcgaagtcgcccaatgccctcgaaacggcgaggctgccattcactcgctgaatcatcaccgaaccgccggcctatggccaagtaaaactggaaaattcctttgaattggctggcaattaccttaatgattctttcgcgttccttttcaaggtaaggcttgtggtcttccgtgctaaagatggtgttgcttcttcggcttaacaatccacgcgaatcgccttaaaaatggagattcattttttcacccaaaattataacgccaaaacgagtggctaaaccgattctgaaacccgtttagactcatttcgaaccccgaaccagaattgaaacaataaatcgaaaactcaatttacaaaaaattgacatttaagcaaaaaagcgattcaaatatatgaaaattttgatgatgattattatgcatttgcattttattatgggaccagtaaagccaaggattatcacccaaataactttagtatttccaaaaaatggggttgaataccatcgttactaccacacttttttttgctctggttaaatcttattgtgaatctccacactcaaaaaggaaacgaacccaaattagcaaagaagatgtaatccggggtcagaatggcacatattgccgttgtgccgcttctctccctctctccgcctccctgcaactcgccaagtgaggagtccaactccaagaagcccatgcgaattccgtcttggataagcgacttggccttttccgtgattttagggccattggtcttaagttcttccttcacctaaacggcaaaaaaaacaattggtccttcgacacattttatttattactgcttgaaattctgctgtgtttagcagtgtttggagcagattctgtgcggagtgaaaggcaacgttgttgccagcgtgtccatcgaaaacagcaaaaaatga

SEQ ID NO: 17702 - DNA, 1512 bp, Heterodera glycines
tttatttttctttaattattccattttcatttcccgtctacgaacacttttttcacttcgcctttacaattgtggcttaaattgccaaagtttttccattcacggtattcaactttcacagttacagtacgacaatttttgtttgctccaataatgcaaccgtccaaaagtgcgagaattccttaaccgtttttttaatttttaaaattaaaaattcattttaaattttttacgctctttgtttggtggctttttcggctctttttctggctcattgtcatagaaatggacctttaaatgaacaaataaatttgaatttaataaaagctttgtatcaattaccatggcacaatgttttaaattgtcaaaatatttgtttccacaggttggcctctgtaaaaagttaattttcaaataaaaaaaacaaattaaatttacgaatgccatttcttgcaaatcctttagacaaattaggcgctttcgattgattgtgccaaaaacgacgccaaatttttcatttggcatttttcctttgtactgaatcaaacaattagtaaatgtattcgaatatgctttttatgcttaatttgacatttgctgctttttgtgcgtaattttgcgttttttgaaaaatgttttaacaaaaaatgccatataaaattaaaagactttaataaatacattttaagtatttctttatcgcctcattttatcttcaccaaaattttttgattttttatatttttaagaaaatttgaaattaattttgttcataattaaaaagaaaaattgtgattttctcccgctcactttgacgcaagccattttgacgtaaaatgttctatcatatttttatttgtcccccaattaaataatcttttatgattttaaatggtttaatagttcctttagcttacaaagtttccaaaaatttcgctgtgacaaaaaataattatggccaaaaaagctcgaaaaactgtatttttctgatcattttggcgcctcgtgccatatcttatttccgatgttaatttatacagcttttatgcttatttagtccgtacattgttcattaattattttaacttgacctaccgtacatgcacagtactcttcccgcggtgccatgccattgctcgcttttgtccccttataacacccataacatccgtcattttttgcattttcttcgctcagttcgttgtcctcaaacagcgacgagccgagccatggcggacgcagatgccgtgggatgaagcccttctgcttgaccactgtcgagagaaggcactgttcgtgaaagggagtgccatcgatcggacggcacaattcctcggcattaaatgctaaataaaaataatattttataataatttgtaattttatttatttttctatgaaatacaccatttttgtctgatgttttctgatcgatagaatctcctgattcaaattggatgatagtaaataaaagaacagccaataaatggaccatttaatgaattccaattt

SEQ ID NO: 17703 - DNA, 1392 bp, Heterodera glycines
  unsure (1)..(1392): unsure at all n locations
gggagggggcgggggtccggcagggccggtatgcgccgccgggaaaaattttgtaatttttaatgcaatttattaacccttttgttcaaaaaaaacattaaattttgtgattttgaaccatttttttaatatggattttaggggccaccggaaatttgtaattttacaaatcggaaattttaatcaaaaatagtttttactcataagaaaattacatttaaagaattcgtcaaattgaaatgtgaaggcgttcgaatgataccaaaatcgttagatttggttgaaaacaaaaaaagttatagcccaacaggctggcgccaaaacgaccaagtccactaagacatttcgcaaaaatattagtaaatttttcaaatttgacgcagtttcactgataaaaatgatattttttaatttttccatcctttttcagacatttcgtcgaaaataatgattaaaaaataatacagtaaatacaggtgtttaacgcctgtatcttgtacctgaattccaaaaatggactgtacttgtattttctccgaatggtgtctaaaatattctcgaaatcacagagaccccaaaaacaaaaaatatttttttattttttttttatttagccaatttctgctatgtaggaaaatgagtttgttcaaatgtacaatataatgaaggatcaatcatcttgtcgaggcaaattttttattgcttttggcgagtgaatgattatgattagggctgggaatttaattcaaattactttttttgctgattctaaataaccttaaatggacttaaaagtattctacacttgtttgaaccttctaacatgcattttttttttttgactttttatactttttgagatttttatgccttatgggatttaaaaaatagccaaaaagtaaaaaaaaaacgccaaaaaaagcacaaaaagtcctaaaaaattagacaaagcttaaaaaatcccatttttagcattttaatgaatagcattttataaatagaaaccggattatcaggtatacgcctttatttttttgcttacttgccacttcctaatacattcgcacgaaaaaaagtttttaacttagtttgcagcttcttgtttaactttttggtgccttttttacactttttcgtgcttttcttggctttttgtgacttttttgctattttttcatgacttttttttggcattacctttatttttcggaatttcttagctaaactcaaattttgccttgaaaattttttatatcggcttccgtgtgccaacaagcgccgcagggaagaattgattttttattgaaacgtgtaatttttatataatttatattaatttttacatttatttttctatgaanttattcaatcttttttttagtgaaaatatat

SEQ ID NO: 17704 - DNA, 3576 bp, Heterodera glycines
  unsure (1)..(3576): unsure at all n locations
tttttattaatatttcataattttattgctgattcttttaaactgttaaaccatttttaatttttttttttcttttattaccattaatattttatttttgatttttttaaataaaaataatttaaatttaaaataataattaaatctatttgtaagtattttacccttcaaatggtgccgcatatttgtgctcgtcactgtcgtacgccaattgcgcaggtggccgaggccgcccgcgcggaccgctggagccgagactgtccccgccggcgctcaaatagcctaaaaatgattaaatataattaaattgattaaatttaatttgtaattaaaatagattgaaaacaaaatcacaattaactgaattaaatttgtgtgtatttaccgtccaaatttcgacttaacggtcggctgtcataacgtcgtcctgttgccaccaatttagcctcataatcaaccaaatccatctccttgggaatggatggaataattaaaatttaattttcaaaactttaattttaatttatttattttcaaaatttaaaattgtttaattttatttccaaaattcatttttttaaatttggatttaatttattttatctttaaaattcaaaaatttaattttatttaatttatttccaaaatttaaattcaaaaattttaatttatttccaaatatgccatcataaaacaaatatctgacttcttgtgttaatcgggcacttccttctccgccacttttttcacgttcaaattcactttcctttaataaaaataaaaataataaatacatttaaattttaaaatttcaaattctaccgtatccggccaccgttgctgccgtacaccttaaaatttgtttcaaatttatacaaaaatttctaaacagtgngtnaagnaaaccttggtggnantctgnnaaantgtngnttttgntgttttnggnangtgnaatntgttgttgtgnnannttttgatgnntnnnaatnggaatggnntgaaaaaatttaaaaaatttttaaaaattattttttttaatttggncaanngttnnngtngaggtgaannngtnngantnggagtngttgtggaattgtgangantggagatgatgnntgtggaananaattgtggagttgntgntnnggntgtnngtgaannnatttnggttggnagnagtggagtcatgctaattgggaggataagaatgttaacaaattcaaaattaaaaaatcgaaatttgaaaaacaaataaatcatttaaaaatttcgtatttttcggggaatttgcttggatcaaaaaggtcgaaatacgaccagaccacataatccagaccagtcggacgtgaattgaatcgtaattttaatagcagaaatttagaccatcgaatggcggccgatgaaacccctgatcaatcgaaattcagtggaaatgcagaaagccaaatcagccaaaaaaaaaacaaaaaaccccggccaatcgaattctggtagctgaaaaccggtctatcaatcgattagccaaaattcaagcgcacatattcagatcagtcggatatgaataataattctaatggccaaagaatcaatcgaattttgcggccaataaaatcaaatcagtcgcaatccgacagcgaaagttcagaaagccaaatgagcaaaaaagcccgatcaaaccgaattccggtacctaaaaatcgatcaatctgtcgatcgattagccaaaattcaaacacacataattcagatcggttggctggctgagcaatcgctatattctgatcagtgaattcaatatattaaacgatcagtcaatcgatcgatcagtccaaatgtcacagattcccggatcagtcccaaaagtcctccaccagctactcaccaatgatgtcctttttcgtggcgatgctgtcacggaaaacgaactgcttgtgtccatctgctgtaaggaatcacttggcacaataatgttgctggtgctcggctgctgttgttgttccggcatcggtagcagggaattattcctttaaaaaaattaaaatttcaaaaaaagtttctaaaaatttcaacggcgccacctcggctgcgtctgctgtggcactccgccatggtaaaaattgtcgtcaatgtactgcttggactgctcaggttcctcatcaacagcagcttcttctacattctccacaaaatatttggcataatcgatggctaaaaaattgtgtgcaaatttcaaaaaaaaaaaaacttttacgactcactttggcgatatgtttttgctggcgatggcggactttgcataaagcggggatggaactgttcaatacatgcagctgcatctgctgctgtgaaaacacaatttttatttaaaatttcgaataaaaaattaatttttaaatggtcaagtacagtgtttcaacctaatcttactgtagcaaggctttccgtatctattttttattataattttttgtaataagccacatattgcaatgcaaatggaattcgacgctaccgtatcacgctttacaagcatattcacgcccaatataccgtattcaaaattatttcaccacattcccactcattgtcctcccccagccccgtgacttacccgtgggtactgtatgttcttcgccttcacttatagtgccaccatcgtactcctcctcgacctctgcctcttcctcatacggtatcccgctcccgctaccgtagtaatggctgtgcctgcccacagtatgtcgatgatcactttggtccaccatcatctcctcttgttcacaatagaactgggaatgggatgatttaaaaaattatttattttttatttttttcaacatttaaaacggatttaatttaattgaaattttggctaaaacaatttttaatcttaaaatattattataaattcgtttttttaaataaatttaaattaattatcaaaaaatttaaataaataaattaaataattttttattaaaaataattatttttgaacactaaatttattcttaaaataatgatttttcaaaaataatagaaaataatattttaaaaataaattattttcctttttgctttaaaatttaattaaaaataaattatttaaattaaaatttaatataataaataatttaataatttaattaaaaatattttttttcaaccctaaaattattcagaaaatgacgaaatttaaaaaattccccccacaaaatctgataaaacagaaaaaacaatttcaaatttgtcatttcctccgcggcaatgaaaaaattgccgccactgacggcacaaaatttgcggtgaaattgaagcggccagcaaataaatatttggtggccccgggtgcagcaggaaagtgggtggagggagtaaatgatctcccgagggcattattggtgctttttaagagagttaagatgggccaaaattttgcatttttgggatttgagacaaaaaaaaagtcggtcataggggagaaaatttgaatttttattgcatatatgtatgaaatatcttggaaacaataattttattaaataaaaattatattttacttgtccatctctt

SEQ ID NO: 17705 - DNA, 1482 bp, Heterodera glycines
  unsure (1)..(1482): unsure at all n locations
tattgttgtccattttcctgcagttgatcaacttcgacatggcctccgtccgttggattggccctccggcggtgtccacgcgcgcgcgccccgtccacgtgtacgccatggtgtggaccacgacgccgtggacattgcccatgaacaacgcggtggcggtgaacagagccgtggaacactatgcattggtggactttcccaaggaccgaaggtgggcgccaaacccatgagagcggttcgcttcccctcccttgaatttttttaagaagattttcagtaatagaaatttttcaaaaaatttcaagaagtaattcatcataaaattttgaaaattgctacataacatagccgaggcaaaaattttcaaagtaagaaatttttcaagaaaaaatctttaaaaaaatttttcttagaaaattcgtagaaaaaaaatttctaaaattttacagcgattttttcaaaaatttttgaaaaacaataattcatcattaaattttgtaaaaaaatcgccggttttttgaattttttttcttcgacttttctcagaaattttttttaataagattctaagcttaaatttattttttaaaattattcccggctctgtttcggcggctgtgttttgtcctgttaaaaaactatgtttttttttaaaaatgtaattttcatgcagattccgcatcattcgcgacctgtacattgtggcagttgaaatggtgccgcacattgccgccgaatttggccatgaaattgccgtgctcggcacagtgtccggcgcgcagctggcggacagcggactgttctacagcaacgcgtgggccaacaacatacaggcgctgcccgtcctcgccgcgccgttcgtcagcccatccgccggcacggggctggtccatgtggcgtatgcgcatggccaagacgattttgaggcaataattttctcattattcggcggggaatggaggaaaattcaagcccctcccctcgaaattgaaaaatgaaagaatttttaacgagacttggaaaattttttgaaaaagaaccgtttttcttaaccgttgggcccaaaacccttaatttttctttaaaaattagaaaaagcgctccgaaaagcggtatgaaaaaagggtctctgtcggtgaaaagtcatttttaccaatatccgctcaaaaatctcactccaaacttttttcaaaatacccctggcaacactttttttttacttttctccctctctctaccgtccagcttggtcgaacgcaggagggcaagcagtacattcagtgctttgtggacgagcggggccgctacacgcgcgagatgggccacgaactgtgctggaaggaagtgctgggcgacggacagcgggccgcgctgaagcgcttacagttcagtacgctcgctataagaatttcgactaaatttcttgcatttttaaaattgngccaaattnnatgacgatttttttaatggttagtcgaattc

SEQ ID NO: 17706 - DNA, 1773 bp, Heterodera glycines
  unsure (1)..(1773): unsure at all n locations
cggacagcggactgttctacagcaacgcgntgggccaacaacatacaggcgctgcccgtcctcgccgcgccgttcgtcagcccatccgccggcacggggctggtccatgtggcgtatgcgcatggccaagacgattttgaggcaataattttctcattattcggcggggaatggaggaaaattcaagccccccccccctcgaaattgaaaaatgaaagaatttttaacgaaactgaaaatttttgaaaaagtaaaccgtttttcttaaccgttgggcccaaaacccttaattttctttaaaaattagaaaagcgatatgcaaaaaagaaaaaagggtctctgtcggtgaaaagtcttttttaccaatatccgctcaaaaatctcactccaaacttttttcaaaatgcccctggcaacactttttttttttacctttctccctctctctaccgtccagcttggtcgaacgcaggagggcaagcagtacattcagtgctttgtggacgagcggggccgctacacgcgcgagatgggccacgaactgtgctggaaggaagtgctgggcgacggacagcgggccgcgctgaagcgcttacagttcagtacgctcgctataagaatttcgactaaatttcttgcatttttaaaatttgggccaaaatttatgaccgatttttttaatgtttagtcgaattctgaggcacaaaatttctgctgggttgaaattgtcacgtaatttttaaacagtttaaaaaataaattcgctgtttttcagattcgacgttttgcatcagtccgaatatgtgcactcttacccttacgattggcgaaccaaccaggttatcaatgaactaacaataagtgagcattgatggctgagattttactttggcatatcgattatatatatatatatatatataccggtctgaaaattggcacaaattttatacaaaaaaaaacaaacaaacaaaaatcaaatgttaaggcgttcaagtttttcattggtgacctttttagaaacaaaaataaaaaatgcaaatttttatgatttcctcggccagagcggtactgtttaaaaaaaagtaaaacaaaaaaataagggacagcttttgtcggagcagggtcgtcccccccccccccccccccgaaattttttaaattttcaaactttacttcttccccagcccgtcatcatccgttgctgcccccagtggttcatcgacgtgaaggaggtgaacaagcggtgcctcgctgccaccgaaggcgatgcgccggcggtgcaaatcgcgtcgggatgccaaggtgtgttttgtttttgttggctgttgttgttgtggcaccgtgtgaaagaacaattttatttgcagaaatatttttcaaatttaatttattttcaaaatgatgtattaaaatgacaaaaagattccaataaaaagactcggttaatcaattgactctcattcaactaaaaaaaagaaattaaaaaaaaacgtttttttcgaccgattttttaatataattttttatttattttttttatttttcgaccgattttttaatataattttttatatttacttattccccacgaacataggtggacaagggggctgcactacatttcccttaaaaaaatcgacttttttaagaaaattttaaaagataaattttatatagaattaatgtttttttcaaaattttccaaaaaaaatcgctagaaaatttttcaaaggtttttacatttttttttctaaaaatttcaaacaataa

SEQ ID NO: 17707 - DNA, 1133 bp, Heterodera glycines
aataagcgccagattatcccaaacactccaacttaaaatcctcccaccaagcatttttcgctcccgcttcttcccgcaaagttacaggccaccaaagacggacaaaaaaattttcgggccgtttcagcgccgctggcgctcaactggccgccggaccgaaaaatccttatttttcccagatgcgcctcaaaaatttgcttaaatgatgtcacggtttcaggcccctccgggcaaaccgtaaggacttataattttttaagacgagttccaccttttctttatatatagtagaaactagggtgcccagttggctatggtgtgcatgcgtggcttggtaatatattgctctcatttgttattttaaaacatacaaaacattatcaattgagttctgttgctgtggggaaagcgcttcgcgctcagggacgcggcttcgccgcgtcgctttttgcgctaaaaaaattaataaattgtagtttttatgttttttttcttttaaaatgattgcacgtaattgccgaaaaaattcgagaccaatttccgaatgttgaccgactaattgcaaaacgaaagccgtctttgtcaaagcgtcttaccgagtcaaaaaatttggaaatgtatctcatatgcaatttcaaccaataaatttgaagaaattttacattcaattttgaaaaatttatgtccatatttcgcgatttttgccattttatgtccatattttgcgatttttggtccatattttatggccatatttcgcgattttatatccatatttttggactccctaaaaatgagggtcagacggtgcttcgccgccagggaaatgtttataatttaattgaatctttatcctcatcctatataataaagttgagtgtttgtatgtatgtatgtgtccgtgtttgaatttgtgtggtgttatgaaatgtttttgcgttaaaaatgtatttgaaaaaagtagagcgagggaaaggtgggaaaatagtgcactgtctgattgtctgtctacgcgggcagcggcgggtgagaggggcatacagtgaacagacgcgtgctgctgtgcagcagcagtctgctggatgcgtgcgtgtgagtgggagagggagggagtgggaaaaaagagagagtaa

SEQ ID NO: 17708 - DNA, 1105 bp, Heterodera glycines
  unsure (1)..(1105): unsure at all n locations
ttgagtcccgttgattaaatgatggtggattggcgcagaaaattgtgggggggggcgaaggccccagtacgaggccgcgaagcggccgagcgagtacctttggcgcagaaaattggtgtaaggggagagggggggggggttgggagaccgcaggccccatacgaggccgcgaagcggccgagccctccccaactgttcaacaaaaaatgctaaagaaatttgctgaggttgagtcccggcgattggaatgttggtgggttgagtcccagtgattgaatgctggtggattgagtcctgttgattggaatgttggtggattgagtcccagtgattgaaatgcaggagaattgagtcccagtgattgaaatgcaggagaattgagtcccagtgattggaatgctgttgggttgagtcccagtgattggaatgctggtgggttgagtcccagtgattggaatgctggtgggttgagtcccagtgattggaatgctggtgggttgagtcccagtgattggaatgctgttgggttgagtcccagtgattggaatgctgttgggttgagtcccagtgattggaatgctgttgggttgagtcccagtgattgaaatgcaggagaattgagtcccagtgattgaaatgcaagagaattgagtcccagtgtttggaatgccggagaattgagtcacattgtttggaatgccggagatttgagtcccagagattgaaatgctggtgggttgagtcccagcgattggaaagtctgataattgagtctcagagattgaaatgctggtgggttgagtcccagtgattgaaatgctggtgggttgagtcccagtgtttagaatgccggagatttgagtccattgtttggaatgccgaagatttgagtcccagagattgaaatgctggtgggttgagtcccagtgtttagaatgccggagatttgagtccattgtttggaatgccgaagatttgagtcccagagattgaaatgctggtgggttgagtcccagtgtttagaatgccggagatttgagtccattgtttggaatgcaagaagatttgagtccccagagattgaaatgnnnctggtgggttgagt

SEQ ID NO: 17709 - DNA, 1892 bp, Heterodera glycines
  unsure (1)..(1892): unsure at all n locations
tgatcattcggtaattgagagattggatgaccccactggggtgactaaaatcattaaaaatctttatggaaaatattaaaattaaaaacttctaaaaaggccagaaaaaacaggtttttccgtggaacaactactcgnatgtacttgattggcgaaccaacgtcgtgtttaaaaacccggaaaacattttttgtaaatccgctctcatccattcccgaatttgttccttcatttgttcaaacaacttcaatttaaaacgggggtcaaggacagttgcaaagatcaaagatctaaaaaaaaactttttttgaaattttttacttcttaagcaacttgttgttttcggttttttccttgtctattaattggtccaacttcccaataattgcgattcgaatgtcaaatgtgtctaaattgaaaataaataccatttgcggatagaacaaaaaccggtgtttggatttccctccatgaatttttttttaattccgaaataatatggcattatcattccaattgtggctgttcttgactgtaattcatttgacgcatcgttaattatttttatatttgctcaatttggtcccattcgatattgctaatgattggaatgccttttcctttgttgtttctctttgcttcatccgatgtcataaatacttgaacggcagctttgcattgtaagaaacgattaagcatttgaaacatcgaattccatcgtacttctgtgtcctaaaatactgaaaaattacgctttaaacattgatgcagaccctttgtaggattaagaccggcatgtcaagtttctcctgaagttccacaaacaaagttctttggaccgacgatttcctaatttttcgaacaattgtcttaactttttcgagtgttactgattcatcgaatccaatagcatttagcccggccttaatattacagttaatgatcgaaaaaaagaaaaggcaccttcaccgctaaatttattttgtgaagaaaacacgaataactggaaactccaaaatgatcacatgcaaaaatcatatttgagccagcatcccgaagaaccaaatgtatttttgcttgcggtatttaaaattgttcaagccttttttgcacatattctgaaataactgtgccagttttatgcttttccttgattgggatggctcccaaaacgacaaaagcgggttgtttttcaacagtaatgaaatgagcggttagtgctgaagaaaataattgcgaaatgttttaaaataaaaaatacccaataatgaatgcgaattttcttttgaactccataaatcggtcgtcagcgaaataaattcgactgcttttaaatcattttttattctcgaaaacattcgatcaaaaatttcaggcagcacattactgcaataatacctgcgactccttaaatttaatttttcaactaaaattttttgtataattttattacttaatttgaaattgagattgtgccttctgcataagtcttttgaatcccgccttttcgactgtaagaaatggtaaaccgtcaacacaaatgtattccattattgttttttccatgtcctttgccctgtgagctgatggatcccattctgctgaaatcagtgaacaaaatttttttttaaaccttttgctcactaaaagctttcttaatgggcgttgtgctgaattttgtttttttgcttggcacgggacctataattgatttttttatatttgggtactataaagcttcgtaccattgctttcagtgttcatttgtctccctttcgttcaaaatgaccaatttcggttgagaattngtgtgtttctcattttttccttcttttacgtaaagcttcgtccttttgcttgtaatggtcagggtgtttcaatttttaatgacg

SEQ ID NO: 17710 - DNA, 737 bp, Heterodera glycines
gagagagatgagatgagagaggaataaagagagagagagataagagaagagaaataatgggaggagagagagagagagggaaaataatggggagagagtgagagaaagataagagaagagaaataatgggaggagagagagagagaaagagggaaaataatggggagagagtgagagagagatgagagaattgcttataagcaccaaccattattttcaattgacagaaattaattttaataaaaattcctcatatttcaaggtcaaattgagaacgaatgtgcgccaatttcgccgcgtgttttccctcgactcggacatggcacgtcccccccccctcgccgcttttccccttttcatccccctccccctctcccccttaggcttacattcgatggactccaaccaacaaaaagccacataaagcgcgaagtttgtcacagatttaattccgactgatttgtgcttttcagttgctattgaggccatcaaagaagtgcgtgttgggtggaattcggaacttttgcgcattactgaggcgggcattgcggccgaaattcaggcaattacttcctaattgaaatatcccgttctctcctccttctttctctctctctctctctctttctctctcttgctcttccttttccttaatccgccccctccgtcgctttaggaggaatgcgcattttccatcatacacggcgacgaatacgaatgttggatctcattgcgct

SEQ ID NO: 17711 - DNA, 1838 bp, Heterodera glycines
  unsure (1)..(1838): unsure at all n locations
ggctcaaaatcgaaaatattcagcactttnttggacaactctagttaacaaaaacaaacaaattttcaaaaattttcccggcggcgcctatcggcaccgccggacccctttctcctgaaaagtctttagaaaaagcgcgccgagaaaaaaagatggtttgaaaaagaaaaaagtaatcagaaatttttgatcatttttttgaataagattcacttttttcaaattgccggatccgaaaccggtttccggattgggaaaattttaaattttcacatgttaatatttgtaaaaaccggcaaaatttcatttattaatatagaaattcgatgcaccagaaatgtcgccgccaaaaagacataatgttgccgacaaaataaaaaattttaaaattttcaagatattaaagcatacaaaaatatttatgataaaaaataaataaataaatataaacaaataaaactttattatggaaattataaaaaattttgactatatggcataaggtaaaaatttaaaaaccccgaaccccgacccgagcaatttggtcgaccccgaccccgaacgattttgttaaccccgaccccgaacttgctgaccccgacaaccccgaaccccgacttttctaaccccgacgttcgggggtgcaaccctagtttttacgatattttttttttttctttgccttgttcaattaatacatacgtgaataacatttatttgttcttttcgtttataattgtcatatcatttcccctcctccccctctccgtctcccttttcagccttcgtctcgtccactcccatccctcttctctctaccgcaattttcttcttcgggtcactcccaacgcccaacgcgtcgattcctccaatttgaatcctcaagagttttggaacttcggcttttccctcgtcgcgcttaattaccaaacgccaggtctgatgatggatcttcaggaggtgcgccgagtcgaattaatggcattcaaaaaatgccaaaaaatgaaaattaagggcaaatttcttgcaaacggaggctgtggttatgtgctgaagccggccattatgtgtagtgatcagaacgaattgatcagtgacaaaacgaacggcgatgaaaatgcggaagaacagacggcggaggggcggcggagagtgccggcgcagccacaaattctgcacctgaaagtgttgtcggcgcagcaattgccgcgaccgagggcatccaccgccaaaggggacacggggctggtcagttgcagaagcgaagcattcctttggttcatctccacctttcccccttaggaccctttcgtcgttttggaagtgttcggtgtgccggccgattgtgcggaagagcgaagcaaaaccgtacgcaacgacagcttcaacccgagctttgacgagagcttccaattcgccatttctgtgcccgaacttgcgcttgtccgctttttggttttggacgacgattttattggcgacgatgtgagtaattggagaggggcagaggcaatcagaagcaacaaaacgcattaattaatgtgtaattaattgactgcagttcatcggccaatacacaattccgttcgactgtctgcagagcgggtatcggcacattccgttgctgaacaacgagggcgacccgctggagggcagcacccttttcgtgcacattgccatcaccaacagaaggggcggcggagtgcgtaaaaaaactcgaaattggacggcggaatttgagaatgaatgtgccatcccattcagaagccgaagaagcggggcctttcggtgaagcgcaaaatgagccgagttcagacgggcatgaaaagtgtggcatc

SEQ ID NO: 17712 - DNA, 2236 bp, Heterodera glycines
ttttcctcaaaaacttcatcattttctgtttcattgtccccaaattgcattgtctcatgctcatgtccattttccatccaaatgtccggatcactcacatcctccatctctaagagttctattctgcctctcagtatgtcaatttcctttgttagattcgtttctgtggactcaattttcgtttttaatgcacttactaagagttttcctttttccttttcctcatttattttcaccgttaatccatttatttccatttttacattttccacacggtcttcccattccatttttgatttttcgaattcttcctccaatttaatgaatttctcttccagaacaaaatcattaatttcttcgctagcacttagctcatccatcgatctctccaaatgtccaaattgggaactcgtacttgtagcatttacgttcaattcatttccgacttgccgaaattggctgcaaacagcagcttcaaacgatcgcagtcgtttcagcaaattccgaaataatttattttcctccgttgtgaaaaattcctcggcaaaatccgatcctttgtcctttcgtattttcggtcctattcgcagctgaaccaaacgaacaaaagcagtcgacaagcaattcggcacaagcacttcatcaacacaaagtacatcagcagcaacgttcagcaacatgtcatcgccaatccaacagaaattaggagccgctctaaaaatcatcaatcgcatcagaaccgcagctgaactcacgattttggccgatgctacagcaagcaacctcgaaaacgcactgaacttcgaagcgcaattggagaaagtgcaaaaagaagccaaatcattggaaatctttatcgacgacgtccgagaatcgctctcagcatggacggaccttttacgcaaactctcagcagtcgaacgcgaagctggagaaaccgagttcagcaactacagcaaaaaagagaaaatcaacgagaaagtggatgacgcagcactcaaattgcgcgatttacgggacctcatcggcacactcacaatcaaagcaaggctcttccgcaacaaatttgaattggaagaaagaacagcacaagcaaaccacgccaaagcaatgcaacaaaccgcaaccatgccacaacaaacgcaaccgtcaaccatgccgttttatcaatttcaaccaattcaattggacaagttttctggcaataaacgacaatggccggaattctatgaatcgttcaaatctgcaactggcactcacgcactcagcaaagcagaaaagtttaacatcttgcgcaacttacttaccggagaagcaaaacaacttgtggctggctttcgtcttgaagaccaaaactacgatgtggcattgcaacttctcaaggacacctacggagctcccgaggaacacattcgagcacttcactttgaactggccaacttgaacacatgcaaaaatctgcgcgacactaaagaatttctgctgcatctcgaacgacttacgcgggaactcgacaacgcaggcgaggacatcgaaggcccgccaacttatcttatgttggaaaagaaacttacgccgcctttcctccgaacaattctcaacaaaaaaggagaggatcccgagcattggaacacaacaaaattccgcggcgtgctcagcgaagcagtcaggaaagaatcacaaattcaagaggttatgagcgaatacgggcatcatcagcaacggccaacaaaaccattcaacaccggaccgagattccgggatcgcgcacccttcaatcagacgagggaaaggtcattcattgccgcaacaatcgacgacaaaaacaaacgttttgggaaacaaccgatgccactaaaacccgcaacaagtggtcaacgaacaacaacgcaaccgcagtcacaattcaaacccaagttcaatcaaatggatcgcacagcacaagcgcgtcctcagcagaaggacagcaaacaacaatcgccaccaagtccatgtgtgttctgcaacggcaaccactggaataacgaatgccgaaagttcggcacaactcaacaacgagctgaaatcatcagaagcaaaggcttgtgcttcaaatgccttcgctcaacacatcgttctttcgagtgtccgagaccgaacaaatgcttcaaatgcggacaacttcatccaaccgcattatgccgcaacggcagcagaagggcaaaccaaatggtcaacacaacatacaaaccaccaa

SEQ ID NO: 17713 - DNA, 1816 bp, Heterodera glycines
ggcacttttgcgtcatttggaaaagccgacgtgttccggtgtgagttgcgtgcgcggattggatacaggtggaaatagccgacttttttaggcccggtaatacccgaactcggtatttgcccaaatgatgctaacaaataagaaaagcagtcccaatttaaaattcaattaaaaagtcgtaaagcagtcccaatttaaaattacaattaaaaagtcgtaaagcagtcccaatttaaaattacaattaaaaagtcgtaattttttgcaaaattaaccaaattctttataaaattaaaattgattttaatttaaatttatcatgcttttatcctgtatttttaccaggaaaaaacgtcgccagccgaaacgtcgccggacaaattttggaccatcactttttcctttatcagggcaaaaagagttcgaaaaactaggtttttgagttcttccttgccataacttttttgaagcttatcgaaaattattgaaattttgcaaactaaaaacatagagctatcgaataacaccaatactgcttaattttattgacaatgaacaaagttatggtccaaaaagtcttccagcgacgttttggggtgcacccgttttcggatctacgtcagttcggccccagcgggttttcgcttataactttttactttgtcatctaaatgaaacattgttggtatcatttgaaagctgtaaatttcctctattagtctgcaaaactttgaaaatttttttaaaggttcaaaaaaatggcctgaagaactcaaaaaaccagattttccaacttttttggccataaatttgttcaaaattgacgaaatttattttttggaattttgcaggctattagaggatatgaagagctctcgaatgttaccaagattatcagatttcgttgaaaatgaaaaaagttataagcgaaaacctgctgggggcgaactgacgggttccgaaaaaaatatataaattaaataattttataaatctctccgtctgtcagttttttgcataaaaatttttcttttagattagacttagtcatcggattcagatgtactcatttctggtttgacttataattaaggcatccaaaaatatgcatataaaatcgcaaaatatcttccaaattcagttaatgaaaattgaagaaaattgagttaaaaatcgaaaatttttcttttttttgcatatttttggcataaattctaattcatttaaaaagataggtaaatatttttcctttatttttggctatgaaaaacggaagcaaagccagttttcctattagccaaattcaaatgtttttacaactggggatggaaagggattgacggcacactctactcatcttttataacccatcaattccgatgcaaaagtcccaaaaaaccaaaaacaatcaaattaaatgtattcaaacgaaaaaagcaacataaatatgagatgcaaaattaaatccaatcttttctcaatacattcactttttcttcctgttgtgtccgcaaggaacaacagaattaaatttattttagaaagacaaatgataacaaataaaataagtgaacaaataaataaataaaagatgacgacggagtcagaggaaggcaaaaatggaaggagcaaaacagaaataatttagaactgaaaatgatgataaaaaataataaaataataatgaatgaaacaaaacagcgggggagaatattgactgaagaatatggcgaccaaaaacaacaggaacatcactgttactgtatggcgctaattcaaattaattaaaatccaacatcaacatccatctccaaca

SEQ ID NO: 17714 - DNA, 1244 bp, Heterodera glycines
  unsure (1)..(1244): unsure at all n locations
aatgaagtgaaaaatgcataaatattttctatctgttcggatcaatcatttcataatgagagatataattgggtgaaagggcataaatcaacccaaaaaaataagntgaaaagatatttatttataaatactgatcactgacatatctgtcactgacaaaattttccgggagccataaaatgcttcgtcagcatcattacccattgtcatttccaactcaattgcttttgtcatttcgttttgttccatatgctaacacatatttccttgctttaaaaaaatatttagcaatctgttttaaatatgaaatattccagaaataattctgtaactattattaattattatttaaacgaattcgaactccatctttactcaccggctcatcactcaagttagtgttcgataaagtgcttgaatgaaattataattaaaattagcacaaattaattgtttattgaatcaaaaaacaaacatttaatttctgagccaaagctcgtttattccctaagaactacaaacaaattttataaaacaaaatgttgaaagtaattaatttaaattttttcagaattctctgttgaaatgaattcaaaaactgctgaaaacccaaaggtttcttttgatttttacacgaattttactaagaccatttagacttcgtcgctggtaatgcgtttacatccgtgtgcaaaatccggcggctacaaaattgttcaatcggtaattttatttacagttaattgcttaaaaacattttaggtaaatgggtggccgaatggcaagagcaagataataaataggcggaaaaagagtgcaattggaaccgaaaacatcgagccaaatggaggcgcaaatcggtaaaataaaatgaataaatttatcttctttaaagaaagttatcccaccatagataaggaaatgcttacatatataaggcatttattagttaaaaataaagcaaaatataggcataattagttaataacgaataaagatagaatatttaattatttaaacaaaggcgttcaagcctcgatcgtcttataaattaaacatagtcatggtaatatgtttagatgtttacgaccacatgcctttcaatgaaattttgattgaaaagtttagacgattgtaaatgatcaaaaattgtggattttgtagcatttctatgggcttcgggtagtatcattcagtagccaaaatttgcttgacatcgaattagacatggaacatggaataga

SEQ ID NO: 17715 - DNA, 1466 bp, Heterodera glycines
aaagtggtgcagaaggaaacgcatggaccaaatgtgagaaaagcggaaatttttttttgtttttgaaaatttcgatttcatcaattatttctcttgcgtcttctagccactctgttaaatgacgttcgtcatgtttcatgttatcaaaaaggccttcttcaatggctctttgatctgctgcaagtccaatcatataattacgccattcctcattcctttcctcaataaaatttattgaacgtttaaacttcacaagtgatttcttcagtaattcaatgccctctggcgttctttcttgagcgtctacgattggtctcacttcgaccaatcggtctctcaaatttttccatgatggatttatgcgcattcgaattaatctcgacattttagtcgtggcaccaatttattgactctctctttgagtgcaataataattagatttaaataatatattttctgatcactgacgcctcacaaaagagaatttcttggataaataggtttattacaaaaggcgtacagaaatgacaaagtgactacaatttataggcaaaaatgatcacagaatttagagggaacaaaaggttaaattataaaaacggaaaaatgacaaaggacagtaaataagagtgattaataaaattattcataagacaaaagattaaatccaaatttataaaattaacaaatgtcaaattagtaatttcacgagcgaattattttggtcgtgacactccggggggcagcgacaagtcgttctgtggctcatcatcgtttgcaccaatttccagttttgcaatagtaggcgatttctgccaatccggacgcgatgccaaagagaagcattgccaattcagggttagaatttcgcagttgtgtcgcaagttggtgaacggtgtctgaagcattggcggcggatgatgatgcggaggcagatgctgaggttgatggaattgatgctgcatggcattgttgtcgtccttcttgccattttgccgacgcaaacccgaagttgggtcgggttcctctgcgcccatagtagccacctcgtccttgcatggcaaacattgggcccgtgccacgctgctcttccttcaatgctgttccaagcagttgcccagcaactgtggcgagttgcgaaactaacaacggatttgcctgtaccaagccctcaattcctgattccatcgatagattattttgtgccccgcttgtcgttggctgacactcattcaatttgcgcttttttgtcccttgattcgtttggtttgccggcacttcgtccatttccgtctcttcggcaataatactttcggggaaactttggttttgcctttccattgccattgtttgacacaccaaaagaaagaacatagcaaaactcaaccacttcacagtgcccttaagcattaaaccgccattcacattggcttgtcccttgacttttatgtgcaatcgcccatcag

SEQ ID NO: 17716 - DNA, 920 bp, Heterodera glycines
tcatcaattttttttctatttcctttagtgctttcgttgccaatttgagtttcaagctcaatttcccttccaatccaaaattcatggaacatatcataaatgtcaattatgccttccaaaactaagccaaaaattgggtaaaatttttcatttgaaatcaatccaggacctgcattccaataaccaaatttgtcaactttgttaatttgtcggtttaattctttaaccgaatttgctcctcaccgaaagccattcccataggcgtttccatcacaatttcccattcccaacgatttttaatcaaattgcccatatttttcgcacacagtttgctccacattcgccctcctcgttcggaaattcgtgccacttcgtccctgattcttttgagacaacgaaagttgtctctcatcattcttggcacgttgtcgggcttcgaattgaacaattctgcggcgaaaacaaccaattcaatttctcgttcggccattaaaataatgagtaaatgtattaaaataatttttaaaattaaaataatttttaaattatgtggaattttgaaatgaatgtgtaaaaatttaattttattctgctttttatacagatttagtgcttttaagctttggtcttttttcatattcaatttaaatcttacaatattatctttattctttggtctacattttttattttcatatattatataaaaggaattaatcataattaagtgttcttttagctgatcttttaaataatgatctttgttaagcactttaatcctgtatgaataatttgcaaatttatttgcttctttattaaattcaacacaaaataattaaaaggaaaaaatgaataataaatatatttctgttaattaataagggccctctcgaaatcggcgaaaatttaaaaataaaaat

SEQ ID NO: 17717 - DNA, 2222 bp, Heterodera glycines
agaaaatgacaaccattgatcaagaaattgaattcattaaaaaagaaattgttaaaagatggaaaaaagaaagaaaaataattaaagaagcagatgatctggtatcacattttaattacatttctttttttgctaaaatgtatatgatcgaagcatttactgctccagggattcatctgctatatgaaaaatttttggaatacctgagaaaaattaggttattatatcaacaaatttcaaaagaatataaaaatatttcaaaagttgtcagtgaaattgagttctgtgttaatgaaaaagacataaaaaaatgtcaaaagtgtgaaaattcttcaaaacagagcattttaatttgtcttgaataccagaaaaatttcagaagtctatcttctgaaatggaccaaataatgctaaaaatccaatcaactgcgagagaatatttaaatacccccaaaaaaccgattaaaattccgaaagaaacattttatactccttttgtcagacctattcgtaatgagatatattatacaaggtttaaaaattaaataaataaaaattgttaaattttattttcaaaaattaatttgataaaaaacatcatcaaataaatattatcaattaatgccgaacaaagtgtaaatcatttgtgtgaaaaatagtgttaacggaagacggttagacactcacataattggaaaacgttcgcgggggcgtcgtgcgctcggctgtcagaaaaaattgtgaacgaaatgggggggggggtcattttacatatgtgggtgcaaaaattttttctaatttttttcaattttgtttgtctttttttctctgttttctctcatttctccatgctctctttgtttgggtggtcaaaaagggggtcaagaataccccccccccttatactactattgtgtatatgtattatagaataattttctcatgaaatttctttgttcttgtagttttttaattcaatgactatattttagttttataaattattatattgtcattcttttatttataatttatattattagcattaggattttaataaatgattttcaatcaaagaaaaaaagactaagtaaatacatatttatattattcgagaaagagaatagaataaattatatttatattttgaaaactctttttggcaattaaattttggactatatttttaatgacgttttttggcaaataaatgggataaatttaaaatactaacaacatatgtaatatttttacaaaggcagaaatgggtaataaataatattaataaataatatgcaaataaaataaaaagggtatttaattttagaattttaataacagtttcaattttaaatagtttcatttttttattgaaaaaacccattcacatacaaccctgggatgttaaatagtcgcaaatcattgatcattcgggcagctgattatattacaaataattgaaaaaagaatgtaataattcaatttaaaaataaaatatatcgatagttaattattaattaaaatcttaataaatttcatttcttttgaaaataaaactatttttagtccatccttacgcctttgcgccgggagagtgaggaactggttcaaagtaatgaatcacaaaaaataaaggtatataaaagcatataagtgaattgaaaaaattttggatcaacgcaagaaaaataaaagagaacataaagcccactggagcaacagtactgcaagcgaaatttagaaaaagctaccgctaccggttattgtaattcgcatttttaaacaagaattttaaagtctcagaaattgaacacagcatgcgttgttttgcatgtactgcatttgtgagcgtgaacaaggaagtgaaaaatgaaggcattggatggatcaaaaatcaattaaggagttactgccggcttgacccattttttagtgcagattgctaccatttgcttgtggacacagtgctatataatattgtaagaaaagcatttatttatttatgattttgctacaagttggagaagctttctttgaatgagctgaaaccgacggcgatctgtaagcaatatggtttgtgtagtgaagatcaaggaaattcaacggtcaaattgttgcatgcaagtctgggaccattggaggcaccacgttccaagactcaccattctgtaaccaaatgatggacccattatgccaccgggaacacttgaagacctagctga

SEQ ID NO: 17718 - DNA, 942 bp, Heterodera glycines
  unsure (1)..(942): unsure at all n locations
taaaatagggttgcgtccccgaaccccgcccnccgacnccgaaccccgacatttttggccattttcggggaaaaccccgaccccgaaccccgacgcttcataccccgacaaccccgaaccccgacccttaaccccgatcggggtcggggttaaatatacacccctaagaatggcgttttcgtgggagaaaatgcaaaaaagttagacgaaatttgaatttttttaaccatttgccaaatttttattaaataaagaaaatttgctcaattttggacatttggaatgtggtgtagaggttattgcatcacattgacattactttctgtcctgagttcgataccgtttgacgttttcttctttaattattttctttgtgacaaattgttttttttaaattaaatactcatagaaatcgaccaatcttggcatattttgacaaaatagatatcgaagaaaaacaaaaatttaccgaaattcataaatttttttggtgaaaaatcttagaaaatagagcttaattccaaaatatagcgctgcctatcggcatcacagggcccaaaaagtcataaaccttattaaaaaaattggctcaaaatcgcaaaaatttagcatattttggacaaaatctgttaacagatctaaccaaattttcaaaattttcccggcggcgcctatcggcaccgccggacgccgtaccctttctccttaagtctttagaaaagagcgacgtgaaaaaagatgttttggaaaacaaaaaggtaataaaaaattttaaaatttcaagaaaaaaaaaattctatacaaaatttctgataaaaaagaaataaaaaaatataaaaacaatacaaatattattatggaaattaataaatattatttccgaaaaaatatttaaaaaattttcagcgaaagatcggcattttcgcaggacgagttgaggaa

SEQ ID NO: 17719 - DNA, 1487 bp, Heterodera glycines
aataattaaaaattctttagctatgcgagttcgtcaacaccaaacttaatcagtagcatccaaatttcctcaacgtttttattgcatttttgttaacaaattttccaaaaaatggcgaaatatgcaaataaaagtcccgatttttatacgcaaacacaaaaaagaaagttttcctgctatttagagcatggagaagccaggaaaaaaatgcatttgcatgttttttgcatccctgattattatagttaatgaaatcaaaaatgaacaaaaaattttctttccctcacaaaatgtcattattaggaatgtattacctagtccgacccacaattcaggatgacatttcggcggcggggtttgacgggttgcgcagcgtcatggtcagggtatagcccgaatgtcccctaaattttggggtcggggacgggttcgggggccctaccctactatagagacaaaacaactataattttgtgattccgtatggtcctcttgtacgggatttgagccgggccataaaattgcaacaagaccaaaaaccctgtttacccataccccgtttcgggtctatctcattaatcagccctgtctggtcagggtttattcaaatttctgtcaattgtagataaaatttagagtcgcagccggagagtgcgtccccttttttcgtcactttttgagtttcgttttcgtgtttcgttttcgtccgtcaaaaaattttcgtttcgttttcgtatttaaaaattttaaattttcgtttcgttttcgttttcgtcagacggaatttggacgaaaaagacgaaaatacttacacccttaagaatgatttttttggaaaaaataagtcatctcgtagctacataccacatttctttacaaaattcattgaaaattccaaaattcttcccggcggcgcctgtcggcaccgccggcctccaaaattcccctaaaattttcaaagtctgctcttaaaattgccaattttcagcgaaaatatgctaaaaacgtcaaaaattcaatttttcagttgagagccctgaatttaattaatttcattttttccagcctctcccatgggtacagccggacgccaatcctctaagaactttcaaaataaaaaaaacaaaaaaaaaataatgattttctagtgcaaaatcttgcgcatgaaattcttttaaatgtcaaaaaattcaccaccgatgcctatcggaatcgaccgatctttaactttaagactttataaaaattaatttactagagctacatcagcttttccacctactaggatcttcattcccttagtttgaggatacaatttaaaaactctatgtttttaattgtggattaaattagttcaaaaaatgttcgtgtttttcgtttcgtttcgtacgaaaacgattattttttcgttttcgtgtttcgttttcgtccaagaaaaaattttcgattcgttttcgagttttaaaatttttaattttcgtttcgtt

SEQ ID NO: 17720 - DNA, 1341 bp, Heterodera glycines
atagaatttaatcaatttaaaaaaattgaacaaatcatcattaatttttacatgctttttacagacactcagaataactgaatgacaaggtttaattaacaaaaaagataattttcttaaggtgaattgtattgtttataatatgggtattttattctcggtttaattgctttctttgtttatcttcgttagattaagcaaacctgtttttaagctatttaaaatttcatttgttaaagtattaaataaacctcatttatagtcttattattcattttcgggaatgtatttttgctatactaaataggttggtcttgacattttttatagtttaatttttttctaaaccaatttttcataaattactattgattgtaaattttcttaagcaatttcgtcttctatcaaagtaagcgaaattaaagggaaaaaaataatctaaattgttcaatttaattttaaaatttcaaatttaaatcaatttaaataatgaaaatttttattcttaagattatataacatttaatttgattatttttatggaataaataaaaaataatgttgcagaagctcaaccgtgtgtaattaaattctgaaatgcgacttttggaaaatttgtttttgaaagagttaaatataattgcttaatattaagattaattagaataataattaaatcattttttaaattggaataggtaagaaatatgtacaaaaaaccaaaaacatgcaccaaaatgtaaataaatttttaaatggttagttctaaaaaatgagaaatttgggatttttggggcatttaataaaattaaaattttaattaatgttattatctataataaaaatattattttccaaagatatgcttttattttatagccttgttctatatatttaaaattgcgttaagtagttttaaaatttaggccggcggttttgacagaaacacattttatagtatctttaacataatttttaaaattgttttgttagaattttatataatgtgaacatgaaaattcttatggtttgtatcaattagttttatttaaaattgaatcttattttgtaatttcttcaaattaatataaccttgcattatgcaaatagtgaatttaatgcattgatagattaatgcttttaaattaattctatatttttatttcaaaatttcgataaatttatctattgctcattgtctttagggttcttgtgcatttaattccattccatggcaaaaaaaaccatttttctttaataatctacataatagaaaataaaaaattacatttattgtttaattccttttttctgggtttaggaattttatgtgtctcttgc

SEQ ID NO: 17721 - DNA, 1848 bp, Heterodera glycines
atttttatgttcgaagcccaaaaataagcactaaataatcacgtaatgctgaaataagcacaaatttttagaaataagcacacttgggaactctgttttaaatagatgcttttatttattttaatacaccgattctaattatattatgctaatgaatttttatttctcgttcttttaaattattttttcattgaaataacaagctgtctatttcttttctaatggttttcatttttgctttgtttatctcgtaataatttttcataatactgatatatattttttttgttttttttttgtttgatgaacttatcatagggttttttattaacaaaatctctttttgtgtaaaattgatgataactcgagtagtcttttggttctggagagtgacgctggatcaattttatctgctacatgatattttttaaagacataaatattcattcaattttttcaaataataatatcaatttgttttttgaagattttatatcgaattctgctgttaatacattttaatgtcattttttaaaattgtttacaatttcacttaaaacttgaagtgcagaaacaaaaacaattaatttattatttttttcctttttaagatttaaaaatttctatgtgtttcttgtataatttatattattgtagaaaaaatagaattattatttaaaatttttcacatttcgtttatctttcgttgtaaatttttgaatttatttggaaaatttttgaatcatttggtttatacagaactttctattttaaacattatatagtcactacaagttgatttttttactgtatatgcaaatcaatttatatttcctgatcaaaacgtcggttcttttgatcatttagctcttaataatagatttccataaatttttgatgataggagccgcgccgcttgtggacttttgaaaattgtgctttgttaacagagttatttagctaaattggtttaaaagcgagatttttcagttattcataaattcatagggatttcaaataaatcacataaatggaaagaaattacaatttatcgttgaaaaattaatttttctaatttatttaaatgtttcaaaaactcaaaatttcaagctttaaaaacatacggaaactttaaataaaatggtttaaaaatgtaattttccaagttattttaaacaatctcatttaaaactatatctaaccccgaccaatttatttgatgaaataaataaacttaaaaaaggtaaaaaaatgggagaaagaatcaatgcaaaatgtgaatgaagagaatgaatggtgcgcaattgcagcccattctctgccaaactccgccggagggaacactgaaaatcaatggaatggcttcgcttggggacgccacccgaaaaaacgaagacaaaaaacattcgtttcattaaatactatcacaacgaaaaatgctaaaaatttcaatatagttttattatttttttttgtatcgaataagcacgataaaattcagcatatgaatagtctaaatatcattcattgtctaaaaattagtacataaatcttggaagaatttgaaaaaatgattaatttatgaatagggcgaggatttttagttttttaattattttttctgcgactttattttgacgagaaatgcacgaaaaaacacatttttttgctcggaaaatcttcgttttaacgccactattcatcactaggaatcactattttggagctttggtactaaaaaaaactatttcggaagttggccactaaaatacttttttggcactattttggcgtttccgcactattttggaattttttggaaaatttccccaaaaatggaataaaaaa

SEQ ID NO: 17722 - DNA, 1307 bp, Heterodera glycines
  unsure (1)..(1307): unsure at all n locations
ggatttcaaaaatcttttctacaacaaagctcacggcttttggtacgattcnaacatggaaagcggcggcacagtaaacgacgaattgtactacggtagtgcagcgatgccattgttcacgcgatgttatgatgtcatcgatttgggcacggccgagcgaatgatggcgcggatggatcactgggacaacaaggagcacgacaacacacggatcagcaccagcaatcaaccgtttggtgtgccagcgaggtgctttttttgtcggcattatgtcaaatttaaaaaaatcagaaaaatttttccaaaaaaagctgagcattgagcaaaacgaaaaatattttttctaaatattaaatattaaaaaaaactttgaacaaatttttagccaataatgggaaatggaaaaatttagaagaaaatgaaatcgatggaaattaaattgtgctcaaaatggtctaattatttaattttggaagatgataaatttacaaaaataatatttgaatgagaattaaaaaacaaaataaaattacattaaaaaaaattagtgaaattaatttgaaataataaattatatatttgcttgattatgaaaatggcaattttgaatttaaaaaaaaatcagaaatatgtcattcgaaaatgcacataatcttttttttataaatattatgtgtatgttcttttttttgcagtatgataaatgactcatcacatcaatgggattttccaaatgtttttccggtagaatttttatttttatttttctaagcaccaaaaaaactgaaaaacttttcagcccttacaaatgatggttatcgagggtctgcgccgatctggcgttaaaaagtgagttatttattcaaataaattaatttaatgtctatatattgtaaattgaccatggaattgttggacttctatttttcctgcatgcttattgaaattataagcatgtgtaagcagcaatatttttagcttaattagaaactccatatttcaagatttaatcaggtttggccatattttatccatgtttttggcattttatctatacataaaattttcaaatttaagtattttataaatttacgaagctttatctacgttttagtcacaaagacaattatttttttattattttacaaaattttattctatttgtaaaaaaatatattaacttttgtatttcttttgcttttaatcctctatttacacaaaaaacttcaatttttcaaattttttaatgctttctctcattanatagaatgaaggataaagcgaaggcattggcacagaaattggtg

SEQ ID NO: 17723 - DNA, 2198 bp, Heterodera glycines
aaaattgcgggagaaaaatgtgggagaaaatccgcgccggacaccgccgcgcccagccgaggcggagaatacagtgtccaagtgggaaacgttcacaaatcatttactactactctatgtacatcagggataagctctcgagaatcccgaaaatctcgcaaatctttttcgaaaatcggaattcctaactatcactgatgtaagatagatgagaatttcatggcttagagatacatgattagtaaggagttccggttttcacgttgattttcctttttagtttattcaaatttaagtggaggaaattagtgaatttgaaaacttggaacttgaaaactattttaaatccaattgaaaaattttagcgaaatgtgctaggaaaacattgattattataatttatactactgtacatcagggattggcttctgaggccttgaaaaatctcacgaaattcttttttttttttttgaaaatcggaattccgcgccatccctgctgtacatagataagaatttcatggctttgagctagatgataaattaagggttccggttttcacttgcttgttcaaatttaagtgaaggaattagagaatttgaaaagttagaacataaaactgttttaaatccaaaatttaattttttttttttttttgctaaattgtcagaaaaaaatagggttcgagccccgcccccgtcacccccgcacccgccgggggcgggacaggttttttggcctcacccccgtccccgcccccgcgactctgacccccgccatcccccgcccccgcgaccttcgcccccgcgggggcgcgggggcgaaaatacacccctaagaatggcatattcgtgggataaaatgcaaaaattatacaattttgaattttttaaccatctttgacaaaattttatgaaataaagtaaattttgctttaaatttccaatatattttggtttagtggttagtgcttcacaactatcagaattttttattatgggttcaataccggttgacgttttctttttaattatttttatctgattaatacatggtttctttatattcttatttctaagatatgttctgcttcgggggtgtattttcacccaaaaaagggaaatttctgaaaaatttggctaatttctaacaaaattcataaaaaagattttcacggcggcgcctatcggcatcgacggacccttccctcctcgcacattcaccaagtttttttttttttgcaaatatgtgcctcaagaaaaatttgttaaaatctgagttccaattttgcttgagtaaatcattaaaaaaaatttatcggaaaaatctcaatttttggtaaatatctgttataaataaatttaaaattcgcccctattagcacgccggccctccaaaacgtattttttcttaaaaaattatcctaaaatccctaaatttagtctattttaagacaaaatttatgtaatttatgccaaaagaaaatgaatcttaggcgatacagtgactaaaggaatgtgaagccaaacacatcattcattaaaattaattttttctgaaattttttggaattaattcaaagcaaacccccgcccccgcccccgcgggggcggaattttcgtgcccccgtccccgcccccgcgactctgatccccgccatcccccgcccccgcgaaaagccacccccgcccacgggttgcccgtgctgtactggatgagctccaagagcggaatttagtccgtcgatgtgtttagaagggcgcccccgtggttgaacaacgttttcatgcgccaaggattgaccgaacgcagtgcgaacattgaaggtgtttcagcagcattggtccgcgaattgatcgacaccttgatccgcctcttgttcaagcagagtctccatacatttaatgaggacaccagggaagcataatgaggatgaaaatggaaaatatgcgaaatgtgcttgaaaaatcaaaaaaattttgaggatgcgctgcacattaccaccaatgttaccaaatttaaaaagtaaagtaatgattcaatttatacaaaaaaaaaatatagaaaacatttttgtattttctatagatcaatattaaaagttccaattaccaagagttgcctatcagcttcaccggaaaacatccaactttatttttaaacttggtcaaaatttgaattgaaagaattattttttg

SEQ ID NO: 17724 - DNA, 3146 bp, Heterodera glycines
agaaatcaacgtgaaaacgctttcaaaaaactgggaaccctccccaccgaatctgctcacagtcacaaattccacatttcccctctcttttaagtgctaggtacttatcggttttggggcctagatttgattttttttaaacaacaaaggacgcgcagaattttgtgtgagttcctcgggcgctaagatgtcaaaaaaagatggcgcatattcacttgaagaaactttagtcatttagtttggcgcgtagtttttgcaattctgcgcgtccttgtaatattccgttttattttacccgtgttgaaaaggtgcgcctgtgcgtttaggtactgctcccaacggcagtcgtacatcagatcttgcatgacggccgtttggtcgtcggccgggtccttgtagaacatgttgatgtccgggaaccgaaagcgtttcggaaactgaagaaaacagacaacattttggttattgggtttaattcaaatttgcgaagttggttttgtcatggttacgcctttattttataaattccgtaaaaaaattgttggcttttcgatttggagaaaatgcgattttggcatccatttcaatgcgtcattaacaccgaaaccggaccggaatggcttttaagcatttttttgaaaaaatatgtgaatgaattttaggggaacataaccggagaaatgccaaaaatttaggtgtgtgccaattgtcagaccaaatgataatagtcgcgcatgtcattgttgtaacggtcaaccaaaatgtcgtccattttaaaggccggcatataataaaagcccaacgcatcggccaattcctttgcgatcgacgactaaaataaattttttgaaccaagaactcataaattttgaaaggtccacaaaacgcgatgtttaagactgcggaacttatttaggtatggcaaaccgaaattttataaaatcattttatggggagacatcaaatcaattgtttgattgaatttcgaaaaaattgccgtttgaatacccccaaaaaacagacccggcccacgccaatgttgctttcgaaaacgataagtttcgagttgatgtgccagcgcttcagcgttttgtcaagatgttgcatgaattggttgaagctgacgagggaggacagcaaaccaataacaacaacatttaatggttatactagtaatacaatgaatttttttgcaaaaattttacccccattgtttgtagggccaaggctccgggtaatcgtcaggcaattccaggtcaaatttggtcacaattgaccgagactgaatgagatttggcaccaattttttgttgttgagggcactgctggttaagagccttgggtaggaaaagcgaagactgaatacaaatttggaggccattttacctgctaaaaatttgataatgaaagcatttatacataaatgagcaaagagcagaaatccggtgatgtccaatcagccctattagccatgagaaatatgaaaaggagctaaaaaacaaaaatgatttttggtcttataattttggaacagattgtaagtctaaaaatgttgttccagggcctcaaaactcgaaattgaatgtctgaggggaatttgttggctctgttggagttaaccgaccataaaaaacattagaaattctcaatcagattggaggaatataggggaatgaagagaaaataaaccgtattccccattaaaaaaagttggctaaatgagttcagaaatttcagcgtaaattttggaattttcattaaatcgcaaaaaatgatcggcactttttgaatcaaaatatacaaaaagcataaaaatgcattttaatgcattaacaaaaacatttttataaatttccgagagtttgcttaaattttatataaaagaattttttcagaaaactgctcaaaattcaacacaaaaccaggccaaatttgatcgttaaacccctccacaaaatttggaaaaattacacgtgggccaatttaatttttaaaatttttcaattattttcgtaatacaattaatttaaatttgttttctacatttctacatagggggaatataggggaataaagagaaaataaacccttgttagatgattagacaaggtgtggttaatgtttatgcagcagggactcatgcaaatgctcatgaacatagacttagccaaatgaatattcgatgtgagttttgcgatgctttgcattttgttgaagagaaaatacatggtcgtggcaatacctttaaggattgttgtcactatggtaaagtttttgttcgcgagattactgaacaggattttcctgaggaattgagggatttgttcatgaaatttgatgcgagacacgtgaatttctttgacaatattagacatttgaatagcagcgtttcatttgcttcaatgaatccgctgagatatagatacccgaataaccgaggtccgtattgctttcgcatttacggtcagatttatcatagaatgaatttggctctgaatccagaaaatggcgatgatcctgcttatgggcagattttcatcgtagatactgagcatgcaatgagagcactgaggcatgccaatgtcggtattgaccctcaattgctgacaactgcgtatgaagtgattagaaatgtgaatccgtttgctgaagcatatatgatgatgaaagaagaagaagatgaagaagttgatagagcaagaaatgagaacagagagccagccgagatcaagcttttgtttgagaccggaaggcaattggacagacgtttggggtacaatgtacctcgagcgaatgaagttgctgcagtttatgtacctggagctgacggtgaagtacctaatgccaagattgttgtgagagaacgtggaaaggaattgaagattttgaattgtactaattcaatggtaactccaatgacttacccgctgttttatccgcgtggtacgcttggctggcaccctgaaatgaagcatagaaatagtaacagaagagtaacgaggttgcagtatgtgtgttacacattagcaattagagaaagagagtttaacccaattttgtacggtggaaagctctttcaacagtattgtgttgatgaatatgttaagattgaaggagacagaatgaattggataaagtgtaatcag

SEQ ID NO: 17725 - DNA, 1738 bp, Heterodera glycines
  unsure (1)..(1738): unsure at all n locations
cccccccccctcgcccattcaccaaactttccccccctaaatgcaccgcaaaaaattgttaaaatctgatttttttgatcccgaatgcactgaaatttacgatttgcttatttcctcccaaaattgttaaattcgataatgaggtgaaaatatatatttgatacatttttgatcgaataaattgtaaaaataactgatttgaagcaattttgcaaaatgtcctgattttcgaccccaaaatctgatttttttggcccaatgtcctgattttgaaaaattttcgatcgcacctctgctctattttgatgagcaattaaaaagagtgacgacgaagctctcttatttgttttgaagtgctgctcgagactcttggtcccggacgggccctgtctcgagccaaagcctttgcttttccaggggtgtggccccctcaatatcgaagcttcattcagcaggattcagtcagtcttgagataagctaactctgatccccggctttgctggctctgatcactttatttgctggtcctgaatctcggattttgacccgagttttgatttcaaatctcgacttttcagagcaacaaattttatgttttccgtcgccttctcacagaatcactattgaaatgatgagtgatgattatgtttgtgctgtgctgctggtgttgtttgacgggggccctctgatcagagcaaaaaacaaaaataaaataaatgacacttttctctgccaaataaatcgagcactgaaatcattaggctgatgatgattgtgaccccaactgctggtgctgatcataggcaaaattattgaatttgttncatcgcttatgcacaaaaatcggaaattactccgttttcttctcttccattattattttgtttaaagtaactaattagtcaatcaattaacatatgtatttcaataactatcaataattaggccaataaaacagtttatgatgcatctgcacctataccaattaatgtaaaactttttttttccttcagtatataaacttttaaaactggaaatttaggaaagattgtattttttattttgtgcataaacaaaaaaattaagaaacatctttattattttttgtttttattaccccatcccattgctattcatttaatactttaacgttttatccattaagaattttagagcattcaaatgtaaaatgttttgccaaaatccgcgtccggtaaatccctccacttccgggattccatcgcttcccttttttaattattgtccatacatttcacattcgtacgtatgcacataatgaagttcatcccggcattttcacccaaccattggtgtctgtttggcctggctgttgtgttggcctctctctgtcggcttcatctccccccgccgcgccccctcccgtggcgtaatccgccggcttttccttccctccctttgtgcttcaaacacaaaaaaaacaatttaaaaattttggcatcataagctccttcctcccaagtcatccttttcaatccctctcattttttcagccccccccccaccaattccatcccaacaaacaaaaaacaactcttggccgaacacgaactcacaccaccaccacgcccaaccacattttttgattgngcggaggaagtgtgatgatgatgatgatgatgatggaattgaatggaaatgggggagaaacaaaaatatttgcgtcctctccccgccgccgctgctacctccaatgtc

SEQ ID NO: 17726 - DNA, 2659 bp, Heterodera glycines
ggatggaatggacacaccacacgcgcgcgcgcgcaaattgacgcttcatatgtgtgcacttttccccgtgccataatgccaaacattcaaagccaatccaatccatcaacagggcaatgtcaccataagaaaaagcaatattcatttttgagtttgggttttctacttctgtatgggtttcatctgatttctctgcccctaattagggttaaaactaatccgctgattagcttcatcaaaacacacatacagaatacactgtgccaatctttcatttaagtatgaaaatttaatccctttttcatttaaaattaattatatgccataaaaatgattaaattaaattaattattttatttttagcatttatttacgcgtaaatacataattaacacaacaaataataccggcggattctaatcgttgtgagaaaaaaaagcgatcgagctcataaaggtgccattgcgcaatggacacgaccacaacaaccggcggcggcggtggcggcggattttttggtgagaaaatgggccaacaaatatttattccctagggaattgtgggacaattgggggattattgagtcattttatgtgagaaaaaaaaaattaatatttgtattccgagtgctgaattttgtaaatgaaaaaaatgatggaaaattaaattttacacatttttgtgttgaaagtatggcactaatttttagttggaattttcaaaatttcaatttcagattttataaatttcaattcgcactggccctgattcatactgtaaaacacaaaagaataaacaataaaacattttaggcttggcaagacttaaaacaaaacctcgcgccatttagtcatacgagaaccaaaaaacaattaaaactttcatataatttattaaattttactgtcaaagttaaccactatcgaaatcgacattttcacacttctaaaacaattagctgaagcataagtgtatttatttggcatgaatcattcttaattaagtatgaatcgggtggcttacaaatcggacccattactaattgggattcgaatcgggttactaatacaaccgggacagtacgaatcgtcaaaaaacggatttttcgggtaatgtaattcggtgcccattcaaaaaacagacaatttgaacaacaattttcggcattcggaccgcgtaagcggggccgaggcggggcatttatagcgcggaaaaagagagatttttccataaaattttgtttgcttacaattttcggtccaattttggtgtccaatttcatcccccccacccctcctttccctccatcatatttacatttgcataatgccgacagacgagcgtctttttagtgccaatttggcgattagccaccaaatggcttctccacccctaccattccccccttacttacccaacagtgcccagcggcaccgcttcagcggcagcaacggcagcggcggcagcggcgccaacagcggcagcaacgccaccggcgacgacgacggcatcgccgcaggcaattcctcatcatcataaccatgaacagcagcagagcaacaaaagcgggggcagcagcagcaggacacgcaagacgagctcaaccgccaatttccttggtgagtaattgaggggggcggggggaacagactgtgggaacggcactcactcactattcggtgggtcggtcggttggtggcactcctttgtccgttgccgtctatttaattccccaattattattattattattattactattaattagcagtaaattttttgagacacacggacttacaagactcaatttatgtatttcaaaaattcataattttaattgattaaaagaatgtcggctatagtcactactacggtcggtcgtttcactgtgaaaaaacatggtaaaaaaaacggtagggggtaggggtccaattccgtctgcccaactctgtctcagcaaagttcaaagagccacaattttttgtttgtttgttaaccaaacttaacaaacatggtatcattcgaaagatggtatcattcggaagcttctaatgttgagaagagatttctaagcttttttttttgtaagtgattaagcagatcacaaaaaagtagtcgcttgaaaaccgcaaaaaggcagaattttccaagttttcatgtctatcttttttaacggttacctatcatttcgtcactgagacataatttttaaaaaatattggctaatttcaattaaattatcttatgaaagtattaaatggtttaaaattttctaaaaattattccttggtaagaataccaccggtggaagccactttttcgaaaatgttttgagattttaaaaagccaaaaaataagttataaggtttttaaaatcgctctgatcatgaatttgactgttgacttaaatgataatgctctgagataacgatggggattttctgctgctgctttctgcataaattcagcaaaaatttgacgcaaattgttctcttggtaaacagagagagattgcgcttaagacttttccctctaatgccttttttctggcgcatttcataatcagcaacgaatattaccatcctgaaaattttaagcatcccttttaacaaatttattgatgaatgcatccgatccccggtcttttgtcgaagttgaa

SEQ ID NO: 17727 - DNA, 1384 bp, Heterodera glycines
taccgtatatgctctaattatagcccagtctctattaatcccgcagtctccaattatcccccagtctacgaggtgtttcccaaatttgaaaaaattaataatttttttggcgaaatgtcttttatttaaaattttgaagatggaatttgggattttttacgatttaaactattaaaaatcataaaatcttacgaaaatattcaaaattagatctaacatagtactttttagggaaaattacttaatatgaatgtaaaaatctataaaaattttcacgccggaccataaaaattcctttattctcaaaaaattgagtcaaaatcgcaaaactttatcattttttttgtgtaagtctgttaacaaatcacacaaaaattttcaaaatttctccggcggtgccttgcttatcggcaccgccggaccccccccccccccttggaccccaaatttaaaaaaaaatgcgccgtaaaaaagaattgaaaagcaaaaaaggccgatttacaggcttgatttaattctaagctaaaattaaaattataaaaattttttcgaatttttaatcaaaatttcaaaaattttgaaaaagtcccggtcccggcgggaccgggtcctaaattgggaccgggagtcccagaaaaacgggagttccggaccccggatcccgccccggtccatttccaagtcccggtcccggccatttcaaaatcccgggctctaatatgtacattgcaattagtatgcgcgcttctgacccgcgttcggtgactcgatttgacgctgttgttaaaattaaaaatttttttgttttgttaatatttatcaaaaaaaacttgtggttggacatattctaagttaattttttgtcaaatgaaaacctttaaatttaagaaaaacgaataaatattgcaaaattcgaattaactatattaaaaatatgttaatatacaactgttttaaaaatttgtattttcaacaaaaaaaaaacacacgaaaattcatttcaaaaattaattttatttttacgcctttttttacatttttgtgcatctttcaagtgctccgtatgctattattgatcactaattccaattccatgtcaattgcgcactgcatttggactgtttacatttctttaggttcgtcattcttattgatcatttctattttgttaaacacaccttctttgctgatcaatttcggcttttgaatttttcatttaaattagctctttttttcttgtacttttgctcctcaatttcgctaattaccctcaatttaattttatcattttcatttcgtcattgcgtttgtttgcctaaattttttcaatcttttcgcaaacatttaaagatctttatttattaccttattacgtatttaatca

SEQ ID NO: 17728 - DNA, 1589 bp, Heterodera glycines
caggtggttgatggtgggaggacaggggagggcaatggtcacgggggaaggacggggtcaacaaattacccaattcccacggggcgcgggggggggcacggggaccaacccctccccaagatgtacaaattcccaaagaaatgctataaaaccctaaaataagcctcattttcccgactatcgtacggcacctaatcgccaaaccaaaagcatgggacgacccctgagggtgtggaaggggcgtgggataacaaatcaggaagtcccaacggaaaggggtgcatggtgtgaaccagggatggcacggaattccgatttccgatatttttgggctaggattccgattttgaaatttttggggcctcgaaatggcatccctggtgtaaacgcaatcgctcaagcagaatcttaattaatgtgtcctccccatgctaaagtcttgagagtctcgacgattgaaaaaatatatatatattaaaaattaataaaacgtaagggagaattttacaattccatttaaatttacacctaatttttgggcaaaaatggaaattaatcgatttttatgcaactattgaaaatctatatttccataaacttacatatttccacgaataatagacaaaaatttcattagcggaagtggataatattccccattcaaattcatgataaaaatatattttaaaagaaattaaattagttttcaaaactcagcacttatttttgttatcttctaattggttcttctaattggttaattaatgaaatcaatgtttgcattagattgcatggtttttgtgttaaaagtgattttaacagaaatgacaaaaatgtaagaactcagaaacaaacaaaaaattttgttcctttctattgcctattaattttttttccaaattaaaataatctttcgttttattaatctgctgatgatcataaataaaccattacacattggcggtgtaatttgacgaaaaaaaatcgcaaatcaaattattattattataatttttgcactttatattaaagatttttttcggcattcgattgaacggtaaattccgcccggggataggaaaataataataatataaactcatacatatatacatatcattgcttaatatatgatcatacttttttttaattttgcagatttcgaattattcaatatggtttacaattagaatcttttacattgaaattgttcaggaaaacagagaacttttgagctatatgtagtattataataaaaagaaaatttaatttgttgactttgctgagggataagattttttatattgtcattttcttacccccgggcggaatttataaaatgtcccaccaatacgtaaaattttttaatttactaattatatacaatttcttattttcctaacttttagaaaaatgtcgaccgccagtcaaaaggtccgaactcgcgaggacgtcatttacggaggtcggcaccagtaacaacgggcacctcaaaaaacaaattgttttcccaccccctccaatttttttttataatcaatcactggctaatatcccacatttttgagtttctccaatttgactctaga

SEQ ID NO: 17729 - DNA, 3550 bp, Heterodera glycines
  unsure (1)..(3550): unsure at all n locations
tttggttgaaatatcaaaaaatttaataattacctaaaattttgatttcaaataatattgttacttttaaaaatgcttcacccgtaattgccatttttcgcatcggccattgcagcaccgacaattggcgagaaaactgtgactccgatacaaagcaaaatgaatgcgttggcggagccctcgtccacatgcaaagtaccgaccatcagagggaacagagtgcctaaaatgggatagttattaatttaattgtaaatatgcaaaaattagataaaatttgaagaacaagggtcaaaatgagtactattaatagaaagttgctactcgtcaagaatgaaattttgtccgttcctgatcagaaataaaaaattgccgaccaagttttcgtgggtttgcatgatataggaggtaaattttgagactcagtttggggaggtaccaaatcatgcgataaattgtatatttcgagcttttctgaaacattaaattccttcctaatgattagggggttcagtcagtcctttataattccaaatgcctacttttctgccgattgtggcatttttgcctacttcttgtctattgggtgctttttatgtgcctattttgcgatttttatgcctgcaatttgtatcactattaaatgtatttattaaattacctttaagcgtatgaaaagagagacgttcaaaaaattggacgcccagcaataatgagctggccattgttggtgaactgttcgaatttgttggcgctcgtcgcagcggcttcggcggtgcagctgacccttctaattccgtaatgccttccttacgctgtgaaccggcagaaacctgtaaaagattatttcaaagaaaacatatctcatttcagatgggttttcgtcagtgaaaattcgaaaaacagttactctttctcgaacaaaaactcggtactgacaaggccagactggtgctggtttatagcagggttgccgcggttcgagaaaattgtcggactgagtcgagtaaaatgtcgggttgtgactcgtaaaaagaaatgccggatttcgcgactcgggattaagatggtaaccctggtttcgagtagttgaactccccatcccctcaagcgattaacttttctttatcgtatatggcaaaaaagaacggcgaagtggtgggtattttggaaagtactccttgtacatgtaatatatttacgccaggacattgtgcgtaattgtattgtaagtccaaatctcttaactttttacatctcagatagtttaaaattattaaagttaagaaaatcacactcttctagtttattcggaataataattctgttgttttaataattaataatttaaaaaaaaatttttcatttatcattacaatcacactgcttatgacctctaggattattaaaaaaaactcgattttacattgacgaaaattctggatacgctaattcaatatttttgaaattctgaccaaattgttagccatcgaatgagcagttttttgacgtgaatcgctggagaatttggcgtcctctgttcctatagaggcgattcgattgtccatttcattgtgcaatttatttaattaacctaaccctgcaacaaattaatgcaagaaatgatgtaaaaaaattgaaaattaatttaaaatacaaaattcgaaaattctttgattctcgaaacggcactcggacaaaaacaaagaccaaaataaaataataaattaaaaaaggacaataattttggttgtctttttttataagaattaaaatattatgaacttaaaaaaagtattttaaataaaataaaggtgagaataattcatgggatcaatcataagccgaaagcattttatcgctttttatttctgtcgacctcgattttggatctttctttgcataaaatntaatttcaaaattataaatttaatttaaaaaataaaaatgagctaatgtattagaatttcggatcattattagtccagttcataatttatattcaatgggcaacgaaaggtgcccaaattttaggagacgaacaacagtaaaattgggcttagagaagagcactagtgcaaatgggcggattaacgagacacaaaaatggttggattaaatgcgcttaggggtggataagccccacactaccggtactaattatattttctgtgttttttttctaaaagtgagggtaaatttctcaattgaaatttaagctaaaaatctcgaatatggctatagatggtatgaaaaagcatttcagatggaaaaaaacaaaacaaaaaaactaaatttattaatttgaggaaaattgagacttgtaattgggcacaaatcaagggtggtacgcgaccgcgatttcgcggcgaaaattttttgaaaacttggattatttttctcaaaaaagtttcaaagttctaatttttctccgtctgcgttacaaaacctttaatttgtctttaaaaaagttgtatctaaatcaaaaaataggtgattttttacaaaatcaaatcagtagtataaggcccaatatccggccccaaaatttggccccatcccctccacccttccacatcctttcttctgtttttcaatattccatttcccatcctttctttgcatagttgcaaacggcgtcagttgctgctgccccctaatttgtagtagtatatggcgtcaaaagcgcacggttgcgcacgggtgtttaccgcacaaacccttgcctatgggaggggtgcaaccctttgaaggtgccgcccggacattttcccgcacaatcccaaacctatgggaggggtgcatccccttgaagttgcccgctcacatcctgagcctatgggattttctttgaactctgccgccttgtggatttccccaaattgttgcgggtgttttttttcacccgcgccgcgcagcgccgcgggaaggtcatcaatcatccacctgtcaccaaaagtgacaggtgaaggaaattcaattttttctttgcaaatttaaaattttgaccccaaaccttttgggcggttttattttctcaaatcctgagatttttatgatgggttctctaatcctgaaattaaaaattaatttttgaaaatgtgccaaaacagtgcgggtttttttgcatttcctccccgctcgccccgcgccgcgatgccgccgccgcgaaaaaaaaaatcgataacggaatttggaagaagtgcaaattaattgaaatgactgcaaacaatatcaattataaattggacaataaaattaattatttaaattgtgtttaaaaataaaaatcgaaaatgaataaataaatcgggatgaaaaaccttttcaaaaataggtcacctgccaaccaaaattgattgatgtgtttttatttctcttccattatttcgcaatctgcacctgactttttgttccaattatttcgcagtgtggcccattaattaggtcaactgtcaataaaatgggattgattggtttcttattgaaatttctccaccacctccccagagcccctaaacctcgcgggtttctcgctggtgtttcccgc

SEQ ID NO: 17730 - DNA, 3289 bp, Heterodera glycines
  unsure (1)..(3289): unsure at all n locations
agagatttgagttaaaaaccaaaangagcgcaaaggatgtcattttaaaagtatgncacagaatgaaattatttgtaagtccatgcaacctttatcgctgaagtcgtcaccaaaaatgacctccttaagcaggtggcgggcgaacggagcagtacagaatgcatcgtgcgcagcagcggagaccatccctcgtgtgggaaggcgatcaccacactggcggtggcaaatcctccggggtagtgccaatatttgcacctgacaatgaataagactgtcattttttcgaattttgttgttatttgactactgctgtgctcactcttccattcgcacgtctgggatggaccgattcaatgaagctctgtcgctggccaatgtgttgaaggcgtattcggacatggcacgacgaacctcgggcgagttaagatctgtgacaatggcacgtccatcctcacctgcaataaatgagttttcgtaaatacgtaaacaaagtaagaataaaggatcacaaccttcgccatttgggtcttcggggggcagcaccgccggaatctgttcgaaattgccaatttgtccttcgcgtaaaactgtgttcgagtctcgagcgccgggcagctcatcgtcagagaaactcaatctttttgggtgccgttgaatttcttcgttcgttttaacagccttgaaaatgaaaataaatataattaaacaaaataaaatgggaaaaatgagagagatttcaccagtgaccaattggcctatttgttagttttgtggaaaattaccaatatttcactgttaaagaagaacacaaaagccgccacggaagataagaatatcagaatgagaactgaccttgaaaattttgtgttgattttaatttaggtagaaaagatatttactgtcgtcttaagatacgccgcagttcaaaaaagcgtcttttaaatgacattataattttgaagtgttatgtacaataatcactctttcttcagtaaattccctaaaaaataaaattgttttacatattcagggtgaccaagttttttttttttgctctattccagtttagcgtccaatcagtgaccattctcactttgttaaatcataacttttttcttacttggtcaattcaatccaaacctttttcgtatcattcgaaagctttaagattagggaatttataaatacaagaaaagagcaaataattgcattaagaaaaaaattgcaatgagaaaactcgtaagttcaccatttttcgcgtataatcaagaatattttttgtctgttgcatttatcccagaattttgcaatagaaaacttctgtagacttcaagctttcgaatgatactaaaaatgtttggattgaccacgaaataaaaaagttatgatctaaaaaaacttatgagggtggtctctgattggacgcctaaacattgattggacgcgtacagctatttgaaaaatccggacacttaattatgccttcgcaatttgctctaatataatcagggctctactgcattttacgcgtccaatcgacttttacgcgtccaatcacagtttgcgcgtccaatcgacttttacgcgtccaatcacagtttacgcgtccaatcaaaagtttacgcgtccaatcacagtttgcgcgtccaatcaaaaatttatgtgtccaatcaaaattttcctaattcgaacatccttttgacataaggtaccaaccattgcaaaaagaaataataatttaaatattaaaaacgtaatccgtcattgatcactcacaggacattgaggcaacttggagtgcagtgaaaaatgatcttcgtcatctccacggcactaaccccgagcttttacaatcttatttgtatcagtatatgtttcggagatctaacaataacgaaaaaatttttcagcaaattctcgaagaaatacgtattcaataccctgtctaatcatcttttcgttgtattaatcaaaaagtcttcattttgacatttaagcatttattcggttaccattgtgaaaatggggagaggcaatgatggaaaacagagcgtagaatgaatgattggaaaagggaaaaatgcatcgcttttataccccatcgaatttcactcaaaggcaacaaaaaatttgcatttcttttttttttgtgggctcatagaaaggtataaaaggaaggaacatttggcagttttaaaaacactttcactgttttttgtttttgcattttcggcttccaaccgttagcaatttgtaatactaattttcaacagattaattttacaaatataaataaaattttgctagttccttttcatacaaaaatttcatttagtcaaaattatttgttatggcaccgcccatcagaaaaaagaaaaagttttcctccgacaattgccgactcatttcttctgcagcaattggtgaacataaacagtaacagatgggttcacttgtgacatcatttggaaggcggcggagtgtgcgcgtggccaagaaaatgaataaacgaattttgaggaaaatgtgagccaaattgggccctttatggtatagaaaacttttatagaaacatccaaattaaacattcttggtatcactcgatagccccaagaatcctccattaaaactgaaaatttcgaaaaattttgttttgttgcaaaagaaattatgaccaaaatgtttagaaaacaaattttttgaaatctggtcataacttttttaaacataacgaatttctttgaaattttatagggctaaaggggaaatcttagagctgtcgaatgacaccaagaatgtttaacttggatgttcctagagtaaataatgaatgaatgatacaatgaaagtgcaaattttttgtggtcgtgtaaactccaatagaacccattctgctgttataggtacatagttttgtgcatatttcccacattttggttcattgttttcgggaaatactaaagaaatgttcgaaagtgccaaaaagagggttttcacgtttcagttgggtttgtaacgatgtttggctgcacattttgccctttttggaccatgcacaactcggtctcaaaatggcattgctttcgccccgtttcaatgcgttggtggacaaacatttcgacgagcaaaagcgaattgacaatttggagacgtttcaaaattcacaacaaggacaatggaacaacaccaaaactttctgtgcgtatggaaaacaaaagttttgtggattttcccgctgccgggagcgtccgttgcccgagcaaaatccgatttgaatccctcagattga

SEQ ID NO: 17731 - DNA, 3236 bp, Heterodera glycines
  unsure (1)..(3236): unsure at all n locations
ttaaattatttttaaaatccggtctctctaataataatgcaaaatttgcaacaacaacaaaatttcaaaaattaatttgtttcatttttgcctttcctcctcctttgctgttgttgcatttgaatttaaatccttccgccggtggcacggcgcactttggcattttaatgccccaccagtgccgacagcaaacattaacatgcttaaaaggcttattagtctaaggtcacttaagccttattttcctgctgttggcatcattttgccatcagaaatttagtgagaatatgattcactttcactttcgttgtttaactgctgctttggattcaataatttgccactatttaataaatattatagcattttgagaccggcacgattgggtttttcgggttcggtttttattcaatattttttaattttcattttctttataatgctaaaccccacagttattcctaattatgttattaggacaatgttgttttcgataattaactttaccgttggcacaaaatggactttctttttagagaattccattgtcgagagtctttactaaaatgtcttcattttggaatgtgtctgctgttctcatgctgatcacactgatctctttgcttgtcaacagcagtgaagcggtgccgttgccttcaaaaaagtcgtcgtcattgtggtcgaaacttttttcaaagtaaaatttcaaaattttgccgccttggcattttttttaatttggcgtttcattttagcgatcgtgaaagtgctaaaaaattggggagcccttcctcgacatcggctgctggtggtgaattttcagtgcagtcccaaatgtttataccgtatgccaacaacggcaacggtgacttctttctaccgtacccgagtgaaatggacacagtcaaacgcagcaacacggaagaccatttccttgacccatatgatggtggctcatcgtggttgagcctcagcgatccgagccgacttgaatggaacttcaacagactgcgctaatgaggagggcaaagatcaacattagaaatttggactcatcgaattcattttataatttttaatgaaatgttttgaaattttattaaatttgtaaattgtcttgccagaaaaatgtttttttttaatgtattcaatagggatgtcaaaaatatgaaaaaaaaaatcccaaggaaatattaagaaaaactcaaaaatatgntagcaaatatgtaaatttttagtattttaaaaagtaattttgttttcaaaaaaatatttgttattttttcaaaagaaatttctaaaaattttcagaaattctcaaaatattaaaaaaaatatatgaaaatatgtaagaaaaaagttcaaaatatgtaacaaatatgtaaaaaaagcccgtatatgtaaataaaagtcccaaacattcttctgaaaattagcgaatttcaaattgcttcttccaattagaaatgctttttctatcaattttcaagaattttgaaaatacataatctctcatttttggatttttatcttttatttctaaataatttttcattttttcaatttttttttcctccgttattttttttactgctaattccaaattgtttcttccaattcgtaattgctctattgctaactccaattttcttacaaattacggcataattttgtttacattctttttcagaattttttcttttttgtttatattcatttgatgttccaataaatttttgaatattttctattttttcttaatttgtttttgatttgtaagatttgaatttttgaagaccaattttttatccatttttgaattttatttcgatttgttcccattttttttttgctattttacacaatattttcaatttaaaaaaaaattaaaaccatattaaaatacaaataattaattaattctagatgaaaaacttgaaagtataatagaaaaagggaaaagcaaacaaaaaatggaaaatggcaaaaccaaatggatataataataaaaacaatttttaattaaaaaagggaaattggagcgtactttgaacggaaaaagccgtataaaaagaaggacacaacttccaacaaattcaattgaccaactgcacttgaggtgcattcgtctcctccgcctttccccttttttccctgagccgcgcgccccctgccggttccgctccgtcatgccattgaccgcacatcctgagccgcccgatcatgcgccctgacgtgccgtcccttcgtgcccttgaccatcctcgctgtgttaaaattaatatattaatccgaaatatttttacattcctccatttaaattatatatatttttatcataaaaattttttttttctttgaattgaatgcttcatcaaattctctgctttatctagagaatggcaaatcaacatttttattgcctttagcggggtatcaatgtaaatgttgatatttatttaaatcaatttgcattatgccctcaacgttatatcaacgttatttttttaatttttgataattttttaaatttgtttcagagaataataattttagggagagagttaacgtgaaaatgagagagttctgaatttcaattccagtcatacaaaacatttttgatcaaggagggtagagaaaataattccaatagagagccaaatgggaagagagttcacttcccttcttcgctgattcttttggtagtagacgcagattgcttcactatgttctctcttctctcactgtcttaaatctcttcccgtaacgttctcttttgaattaatttttctttgttcttcttcatcaaaaatgcttttgtatgaatggagctgaatttaacaccctctcacttttgtgttatctctctacccattttattttccgccaaaaattaaaagactgtaattttgaaaaaattatcgcaactttaaaaatagcattgatattaacgttgatggcataatgtatgttgataataaataaagatcaactttaatgttgatttattaaaacaatgttcattaaaagaaaaacattgatttgcatttctctagttttatcgcaaaatttcgtctctaaattgtttcttccaattgaaaatgcttctttttttgttgttaattttcagtattttagcaattttattgtcactcatttttgaattttctttcttaatttcccaataaattttcattttttaaattttttctttctccgttattttacagcgaatt

SEQ ID NO: 17732 - DNA, 1679 bp, Heterodera glycines
  unsure (1)..(1679): unsure at all n locations
tcattacanttgtgatattaacgcttttcctgctgtttgtgtcccctttattgcctcgtatgattattttattaataattttttgttattttataaaaatgaccgcggagggttaattaaaaactaaagaattacctctttggccgctaggctaaatagatgttaatgctttgtattattacagatttaataccttttgactttctgaatttgccatttttattttttttgaaattactttattttaattaggtattaatgataattagagttagaattaataataatttgtgttaaattaaatgtcgacctaaattctatgctaaaaattaaaaagatttcctgcttccaaacccataattaaggaattttttaaatttaggaataccaattttaaatattaaaaaaaattcaattaactcaaattttcctgatcatgtcaacaagaaatcatttaggaattgtcaatgatttatcactatttttttaaatttattattttatagacttaatttacccatttttgtaaaaaatagtttctcaaataaatttatatagtaaaaataaaaaaaaaatgcaaaacaatcgttttctaaaatttacgcttttttcagtttgtttttaattccaaataaattttaccattttccatgacaaaaaaaaaacagatttgtggagcaattaatgtgccaattgtgtcataggttaaggcaaacatcccgaaaaactattgttttttgatgatgtcatttatgatttttttttttttcttaattgagcttgataaaagagaaacattacgccatttttttctttttcaatttggccataggaccggaaacagacgataaatgaatggcattatgttgcttttgagacaataataaataaaatgaaacaaggaccatcatcattatggcgcggatttttaggggcgaaaaagtccaaaatagggacctaatttgtaaggggcaaaaaattcgaaaataggggcgaaaataggggcgaaaaagtttttttccatttattttccaataaattcagatgtaattgttacaccactaacccccctcgccccaatttttaagcccaattattattttttgattatcaaaaacgcctacggcaaaacaaattcacttcagcggcggctcaattatttttgcgtgactttgtgttgtaattggcccttctccccatttcatttccgtaatgaaatcggatatttatttcgtcatcataaaataataatttttcgctaaaattcatacatccccactcccagcataacaaaaatgcccagtgttttattctcaaaaatctggcacttctcaagaaaaataattacattttagtccatattttttttttaccaaattttttccaaaaaaattttagacaaagcgaagcaaaacatgatgccggcggcaaagtttagaatagccggaattaaattaaaaaaattcaaattagtttttgccatttgaaattttgaagtcatgactttgtatgttaactaacgataaatagaactcattatttcataaaaatagcattttgccatccttttaaggttttaaatgaatacttagccacaaatcgctaaaaagaaattatttatttaaattttgttaataaattacttaattttattaatttttagtcaaatttcaaatctt

SEQ ID NO: 17733 - DNA, 1208 bp, Heterodera glycines
gaagtttttcaaaaatttttttttaattccaaaaaattttttcatcacaaaattttgggttaaatatcaaaataggcccaaccaacaaccccttttcgataaataaatataatgatttttttaacaatgtattttgcaaatttttataattcttagaatactcacagtttttgagtcaatttaaaaaataaagggaattttggaactccggcggtgccgataggcgccgccgggaaaattttgaaattttagtgacagatttagttcaaaaatgaaaagattttgcgattttaattgttaaatttatattaaatttccgtcgaaaaaaagaataattttgaaaaattagaagaaaagcaagtacttggctgggaactgatccaaaggaaacataatgaaaagagcaaagagcactaccactagaccatgcgtgcgaacgaagggagaaaaacaaaaaattaataaatatatattaatttaagtttatcaaaagcccatcactaagggtgcattttcacattgaaaactcaatctttaggtgtgtatttttcccgaaacttggggtaaaatagccgaagccgaagcacgaagttcgaagctcaaaaacccgaagttttcgaagccgaaatttcgcccagccctgattggaagggcgacataataattactttgtaaatttctcagaacattatatgtaattacgtaccgaaaatggcaatataataatagtttcatactcagtaatttgtgtaatttatggttggcatcattttttggaataaatgtcgcgtgaaaatgaatggctttttcttgcacggcaccgcccgtatattagcagcatttttcaccattttgccatcactcttgaaattgttaatccgttttggcatcattttaatacatagttaactgcttttaggctaattgcatagggttataagaaaaatttttttttaatgcgatttccaaaaaattttcgagtgtaattttttttaaattatgtgtgcttttggaataaaaataatttttggtcagttttgtttttaacatgtttttggcagaacattacctattatgaggcttttgggtggtcaaattatgataatttatgcgatatttactaagaaaaataatcgaacttaaaaaaaatgttcattccctcccccctcacccaatggctctacaagactggttctattaaaaattac

SEQ ID NO: 17734 - DNA, 2728 bp, Heterodera glycines
taagcgactgtgctcagaaagcgattttctaagaccattggagatgagaaaatgattagaaaagcatacattgaaaataaaagtctttgggtttccgtccccattttagcccctaattgtgcttacccggcacaaatgtttcgtcggtgccaattcgcttcctgcccaaataaatcaggtcccaatcaagtcgagtctttgtcaaatcttccattgttttttgaagactaaaattcaattttggcgtttccattcttctcttctcacattaatgtgccattcggcgaaaatcgcacgtcgtcctccaaaacaactgctcgttggtgcccatttctcacgatttcctcccatattttaaaatgactcaaaaaacagccaatttcgccccttttcatcggtcttttgtaataggggtcttcgaatccgggcaaaaaatgaattgctgaaagttcgtgttcagttaaattttgtccatcaactgcttcgaagtgagtgaaatccaagccgacgagatgaagaacttcccgcattttttctaatttttgcggtctccgtcgaaggttaataagataaacttggtcaaaaccaaactgaattaaagaggaataatttaaaagggaattatcaattaccttaatcggcactgggtaccacggctgtaaaacggaagagaccgggaagggcattgggccgacattcgaaacccaatcagccaaaaaagtgccgaactaaaacaattttcattcggcacatgaaaagtgacatacaacggccatttgttcgcttttactcagtgagtttgggctgataaaatagccataattgtgcaaatttgagaagaatatcggaatgttcattgcgtaagcggaaaaggcaaagacatcgattgggtggccattgccgtgataattgacaatgtttccctggtcaaaggtcagataagaagagtccatcttattcaaattgatcaaagttgggccgcttgaatagtaagcctaaaatattagtgggaaaccaaagccttcattagcattaattgccaaaatacccttattttctctgttcgttttgccaacctgtacgttttctctgttctgtccctgcacaaatttctccccgagtaaaccgtgggcattcgattggccaccgaatggagagatgagaaggggcgaaaccaccaatttgtcaagcgaaatcaattggcgaatggagtcgcgcagaaggaaacagtcggtgtccaaaatgagaagaaaagtacaggaattggaccggccaaagagaagagactcctcccgccaattatcgaatttgtctttgtgcaaaatcagtcgataaaaaccgcgagggaatttttccatccatctgaaaattaaaaaagaaaagttatggactttagcagaacgaactccgaaattaaaattggtttttcttcaaagaaaagaatgtgcatccgatcctaaaaacaattgacaattagtaaatgcgtaaatgtatttcaaattccgataaacgcacctttggccagcgaaaatcctccaccatgcccataaaataggacagcacatgcttatggtcattgatttttatggtgacacataatcgcgggtataaatgccggtaatcgccctctcctggaggaaatcccgactcgaaaatgcctaattagcaagggaaaaaatggctttaatttcactgagaatggaaagcttactttgggaaacaaattgtaaaaggaaaagaaatgaaagaaagcgcaaatcagacataaaacagtgaagaatagcgtcaaaatctgcagaaggaggagattattattttgttttaattagatccaaaaaaaaaatcctcaaaaggtcattttctgtcttcattgccccttagcttaaatgcaaaccaaaaaatcccagttttcccttcctcctatttttaaaaattcaggcaatatcatacacaaaagtgaactatctgtaaattagcgaataaaatgaatattccaaattctatcgagatgggcgtttttccctttgttcaacaaactgatttatgcgactccgaggtttacttttatcgttcatttattaattgttaattgataatatttgacatttacctattcaggaaattgtggagacgtccgcttttgggtcggttaaagtgaacattttcgggaattctgagcgttatccaattgttacctttcacgacattgggctgaatgcgatcgccaattttgagaatttctttcaattccaaactttttctaaactgacggaacagttttgtgtctacaatataaatgcaccaggacaagaattagacgcaaggaagttgccagaaaagtatggcaatttgggtcgcttattttaatttgttgtcttgtcgcgtttagtttccattatccgacaatggatggtcttgctaacattgttggcgatgtcgtctcacattttgggtaatgtttttataaatgcaattgccctcttttatgatcatattccacgaagtttcaagtcgtttattggcattggagttggtgcaggtgccaatgtattgcttcgtttctgctgtgcgttttccacattagcaactaattacaatttaaatcccctgcattttctccattccagatgagtcatcagaatctgttggatgccctccttctgatcaacgccacctcccaaaaggcggagggatagaatgggcctaccgaaagagtgcgtttcggttg

SEQ ID NO: 17735 - DNA, 3632 bp, Heterodera glycines
  unsure (1)..(3632): unsure at all n locations
cagaaaaatgtgattggcattttgtgtaatagcgactttgaatcaaaaatggataagagtctccaaaaattgcaaaatgaattatgtgactcatcgaaaaatgaaaattttcaaaatacgatggaaatatttcaaacgacaaaaattgaaaagaaaacatttgacaaaagccaaatggacacagccttggcaaaagatcaaactctcaattacaacaataagggaatgttttcagaacttgtcaatttttcaagcaaacttcttaaaattaatgaaaaattaattgaaggtaaaatttaatatttttgaaaaaaaacaattaatcgtttcataattagtgccaacttggtcagttccgacaaaattccttctaagtttggcacaaatgtccttcataagacttaaaaaattcattgctacaattaaagtgacaaaacaattcaaaattttattttttaaataatactaataaaaaaacacatgcagcaccgaaagatgctaaactctgaccagggcttgacgcaattacggattacggatttgtgatatttttttgctccttttggattttttagagatgatttctttgcaagctttttttaaaaccaacaattttttctatgtttaaagtattacccatagtcttttctttgtatttgtagtattatttaggatagataccccataatttgggttttccaaaataggggacgtcctttttcgtcgcctcgtctaattttttccccattttcgttttttgaaaattcttatcgatattgaaatgaaatcccgggcatgaggatatttctaaatatggtctcgattgcttatttttggtcgaattttattaaatttttttgctcggttcaactcccacatacagcaggaatatttttttgagttttaaaaatgtcttatccaatataattttttcgaaattatttaacaaattctccaaaattgatgatttttttgacaaaatctgttaataagtcgcatcacaatcttcggaaaaatttcacgccggcaaaattattattttcttatataaaattacaaatttgttatccccgtttccccggcttacgaagcaccgttgtcgggaatcgccgattaaatttgcaaataaaataaaattgttgatttattatctaatcagttgcgtttttcagctaaaaagcttgccgtgttccatcaaaaaccaaaggatttactcggcagaagaacaaagcgtgccgacgacaatgcaattaagggctgcatctcgtcagtgcttttaacattaatctctgctccatattttggttattattcatttcaatatgcccacgagggcaatgtccaaattgaatacactgaatgttataagcatttgttctcctatcgctgttacccagcccattcttcggttgtcacggagattgttgaatggacaattatatttgccattggactgatacttgcactgctgttttgttcttgtgcccgtggatgatcgtcatactgtatgattacgtttatgattatggatgcaaattatatggaaatccattttttcaggactatgggaggcctgaaacgtatgaaaaacatgtttttgggctttgaggcttctaggatggattcctttattccatatttttccatatttcgcgattcatgtccatatttccacatttgtccatgttttggcattatgtccatatttcgcgattttatatccatttttttgcatcccttttcatgaccatgtgctacagttttttattctaccaatgttttatttgattcaagtttgtgatttttgctacattgtaaaatttttgagggaatttcggtccatcggtgctaatagcgcctccggagaaaaatttgggggggtttaacaaatttacaaagaaaatttactttatagaaattctttatgtatttttcataacgaaaaatcaaaagcttaaaattacccaatttgtatttgaaattgaacccttctgtttaaggctttctctgttctatgcttctttctttatcaatttgcaagcatggctgtctttattatggacaaaaaaaactcacaaaaattgtcattttttagaaattttgtaaatttataaaaaatatgaatattttttggagtaaggggacctgaacaatttctaagcaattttgactgaatataatttttgacaccatttctattgttattttcacatctcgcagatcttttccgcaaaaagcaagtgatggttgtcccacattgtaagctgcataagcatcgagtaaattatccaaagtttctggaaatactcaccaaatgatgggctcaagaattgaatttacttttttataaatttttccaaaaatttttatgattttcgtaataatacttgtttacctccaataaaatataaatttacttctgtgttctcaattaatccttggattatctggtgacggattgtctattgttcaattgtccactgacggattgtccgggcaccgtttcagtcttgattctattgcactttccaaattttggcttttcctttgggatgtaagatgtgtttttgagtaaattgggtaaaaaaacacaaaatgccaatatattggtaatgaatttccgccctttttcataaacttactggtttagtttaaaaaatcctctattaaaacggcccccctttttcaagcggccattttggccattaaggccgaaaacttttcgaattaattttgcggtgttttctctagaattaataaaaaaaaatttgactttctcaagatctgcctcaataaagcaaaaattgaaaattttagatttcattattttcttcanaaattaaaattctagctttattttatttatttatttcttctaaacataaaaattacgaaaatcggaaaaaagcttggaacactcaacgaactttgtgtggtgtcatccttcnccactattaatttgttcgttgtttccattggttccaattttggtatgtgtccatttggaatgaacgcaaacaaacaactgaccgttctttatatattaagaaaacaatttataagtgctttttgggatgggttggaaaacgggacatgaaaattcaatttaatgcagtgacttttccttttctttttttctttgtccaacagtctattactttcatctctgatttctttgcccttgcttccctgtcttcctcattttcccattttccctcacagacaaacagagaagaaaaatagcagtacaaaaagatgaggagaattccgctgacccacaaaatgtccaagccacgaaatgtccaagccacgaaatgtccaagccacgaaatgtcaagccacaaagtgtccaagccacgaaatgtccaagccacgaaatgtccaagccacgaattgtccaagccacgaaatgtccaaaagagtaaaaaaccacgaaatgtccaaaagtctaaaaagctcataaaaacccggaaaacgggtctaatttagggttttcggggtcactgagtaagaaaacgacctttatataacccatttcctaatcctagacccagatataaacataaaatagcaaaaaaaaattcaaggcttcgtcaaagggcgctgatcaaaattcgaacaagttttagggt

SEQ ID NO: 17736 - DNA, 3213 bp, Heterodera glycines
  unsure (1)..(3213): unsure at all n locations
aaaggaagttttgaaaatcgagactnaatttaaaaaataatagaaaaaatttttactagggaaagnccgatagcttacaaattaaaaaatacagaatgataatcgaatcattcaagcaatcaaaaaataaaataaaaattacaatttaaataatcgacattcaaattattaatctaaaatatgccagcgtattaagctaataaaccaaatatatcaagtatgatacgtttcatttggttggttgattaatagtattaattattcaaaaatattattatattttataaaatctacaaggtcaagcaagttttatcaaaattattggaaacaatcattaatttatgactttgttggttgaaaaattgtaagcacttaattataaataaaaaaaatttaaagttcaatatacagctatatcttaaaaataagctacacgtaaacactgaccgaaatattttactttatataattaaagaggacaaactgtgccattgattggaggaccttggtccgaaatcataggtaccttatgggttggacgctcgagtttgacgactgtaataccgcgtcttttgacgcacataaattgatgaaattgaatgtaattaaaaattatgatggagtgaaaagattaagttaaaagggccgatgaggccaaagaatatattttttattgaaagggttttgacccgataatgtcaaacatcaatcatgtgtgaacaagagacttttttataccaaaaaatacattaaattgttgcaaagcagtaaatcgtttcttattaatggttttaaatttcaaaattttaacttaatatctattaatttttttcaaaaaacctcaaaaattcaattagaagctacttagctaaataatggtagcagacgcaatattttagatagtacctagagggtttagacaaatatggcttattcatgcatgggctggtaactcaaaagaatgtgataaaaaaattaaccaaataattagaaaaatgataataaaataaaaacaaaatttgggtgtaagaaattgttttcatatgaaaaaattgaaataatggagtgcattggattctacgaacgatcagaaattaaagattttattacaaaaatgtaaatacttcagaagaatctagctttacccattataaataaaatcaatccaaccaatatggtcaccaccttcaaaaatttgaatttgaaaacttaaatgagtaataaaaaatgagaaaaatttaaaaatatttaccgaaaaaattgaaacataattctacaaattttgttaaaatgaataaaaaaaaaataaacaaaatatgcacccaagaattattaatatattacaacgaaggaagagctttaaaccgataaaaaatgagtatgaatgcgaggaaatgagaaaaaataaaaaataaatcagtctaggaaatatatcaattaaaaacatttttaataaattcttggctcaacctcactgaaaatctaatgattgtaaaagtttttgtctaaaaatataaaaaaaataaaataaaaagcacaccaaggcgacaaaattggtaaaataatttttaaaaagtaagatgaaaagttcacaataccttctatttcttttatatttccctctcgtcatgccgacaggcccacccatgtcccaagcaatttctataaaatgagtgaatttatttacatttttttataaaaatgaaggaactttcctacaataatttaaaaaaagatcaaaatttaccgataacaagtgaacatatttccattgacatttgtaattgcgggtggagaaataaagaaaagattttcgaaaaaatcacttccatattcaatgtacaaagtaaataagacaaacttatcaccgttttgtcagaagcaataaaattcaattaaaaataaactctattagccttttttggccgaattaaaaattaattatttttaatatggaattttttataagcatttaaaattaaaaataacccaaatggaaattttatctgtcaagaattaatatattagaaattaaaagttaaattttaatatatttatatgaattgtttataaataatgcaattattaatctattaaatttgttaaattcataaaagacaaacaacatattaatttatatgagaatttgaaaattatacaaatttaaaattgaaagaaggacagagagacaaggcaatctgcatgctggacgtgattgggctcgcgacaacgagtttaaggctataatctcacatttacaagttaaaatgaattttttgattgaaacaaaataaatgggtaatttattgttgtcccccaatttaaataccaataattaaaaaaaaatcctgaaatagtgattaaatagagcaaagttaggactatagaaataattggaaaaattttaattcctacaaattggatattggagaggcgaggctaaaaatgggctccaaaaaccgctttgtaagaccacgaagtaacaaaattttttttaaatgatcatgaaaattctgaaaacaattaagttaggtaaatctgccactctgaaaccgaatatggcctttactgctccaacttcatgcatggagttgaagaaatacaagctcaactagcaaagatatgtctgatttaagtcttcggattcaactggtatatttgtagaaaaagacttcttttttttggtatatcagtttggtttttgaccataaaaaattcgagaaaattagtgggaaaatttccaattttggcatggtcagaaaaaaggctgaaaaaatcgatcaacaaaagaaaaagtgaaacgatggtatgaattgaaagaaaagacaatgacaaaaaaaaagaattattaaaataagtacagaaattagggtttatgaatttttgaatttggcagaaaaaatttgtgcggaaacttatgttacaccctaagtaaattcctgaagcaaaaaaaatatatttttaaggcttatgttaattagtttattaaataaacaaatcaatgttttaatattcccttagaagcaatggaccaatattgctgaaactgcgcaatttaaagcaccaaagcatttcaaatatgttctaatctatcatttacgggcttataacagtcacattttaattttaacattttgtttcgtttttaagataagaaatcataaaggctcaaaaagtactcaagaatagagcgtaacaaacattaaaggaaaa

SEQ ID NO: 17737 - DNA, 1451 bp, Heterodera glycines
  unsure (1)..(1451): unsure at all n locations
ctccttcgaattatattttgtattaatgagcagtactatacaaggtagaataattatgaatatatttttttccatttcttaggccaagtttcaaagctcgaagaagcactaaggaagctggacaaagagaaggcaaaggcaaaatgaagaaaattgacttgccaaaaagcagatgcaacttgtgtttttattttcaacggcgtgttggagttgtgaaataaatcagatactgtatccatttgcaatttggacaacccttttctatacaaaaaactgggtttacggtcatacagcgaccgccatcgcctttatagaaagtggccataaaatcagttcgtttaaagagagaactgcactttattctcatattagccgtcagatccccgacttagcttcaaaacaggtaaagccacacattctctatcattatgaattttgatcgcctcacttcccggcaattcatggccgtaaaatgcgtttgaatttcacaacttttgccatcacatgcaacttgtgtttttattttcaacggcgtgttggcgttgtgaaataaatcagatactgtatccatttgcaatttggacaacccttttctatacaaaaaactgggtttacggtcatacagcgaccgccatcgcctttatagaaagtggccataaaatcagttcgtttaaagagagaactgcactttattctcatattagccgtcagatccccgacttagcttcaaaacagttaaagccacacattctctatcattatgaattttgatcgcctcacttcccggcaattcatggccgtaaaatgcgtttgaatttcacaacttttgccatcacatgcaacttgtgtttttattttcaacggcgtgttggcgttgtgaaataaatcagatactgtatccatttgcaatttggacaacccttttctatacaaaaaactgggtttacggtcatacagcgaccgccatcgcctttatagaaagtggccataaaatcagttcgtttaaagagcgaactgcactttattctcatattagccgtcagatccccgacttagcttcaaaacaggtaaagccacacattctctatcattatgaattttgatcgcctcacttcccggcaattcatggccgtaaaatgcgtttgaatttcacaacttttgccatcacatgcaacttgtgtttttattttcaacggcgtgttggcgttgtgaaataaatcagatactgtatccatttgcaatttggacaacccttttctatacaaaaaactggggtttacggtcatacagcgaccgccatcgcctttatagaaagtggccataaaatcagttcgtttanagagagaactgcactttattctcatattagccgtcagatccccgacttagcttcaaacaggtaaagccacacattctctatcattatgaatttntgatcgcctcacttcccg

SEQ ID NO: 17738 - DNA, 2615 bp, Heterodera glycines
aaaagggggcactttaatgttttgtggatcgatcgttacggttttactaatgtaaaattgtattttcaataattaaagtacattttgtatggtcgggtgtctctccggtctgcctcagctgctgggcgcgcacggttgggcgccagcatgtttttccaataaaactataacttttttctttgtcaaccaaatccagcattgttggtatcattcgaaagcttaatgtctttagaatctttttctaagcaattgcttcgcgattagacaattactaaaaaagttatacatgaaaatcgcgaaaaagtcgaaattttggttgtttcttaataaattttttcaagtctttcgctctctctccgctaatcattcggccctttcttatcactcactttccctcccttttttgtttttaatattttcactgatatttttatttattgtgtcgatgccaaagtttttcgtcgaatgaccaaaaatcaatggaatttttttatttctcaaaaatgttgagtgatacatttgaataaactgtgcaattttgaagagtttgaagctcctccccctcccccctaaaatgctgccaactcccaaaatgttagtcatcgtggcgttggtcagcttctgctccaattggcaatttggctatcaggcaaattcaaaatttaaataaaataattaaaacaattattaaatgctatttgaaatagccttgcaattattgaccaattaattaattggtcaataattgacccattccttctttgcctgtccacagatcacttacattaacactgcccattggtccttttacgctttggcggacgaagtttatcaaaatgaatcggtgacaataattaaacactttcaaattttaattgcctttttccttttttgcctttctctgcgcatttgccacaaagcgaatggaatttgctgtggagtttcattttggcctcattttacggcggcactttgctcggttttgttgttgttagtgggcatttgttcaatttccattcaattagtgtttataatagccatttccttttttgatttgatcaattcctttttatgtgccccgtttgattcgttttgccggcggtgttcgcaatgctttgcttctctcttcgctacccgcaattttcggctgtgccgttcaattggcggtgcgtttgtccgcgagtaaattttgccaaaattcgaattggttttaacccgtccccaatttgagctttgcccactctttgctttctgctctccgtcggccgtcttctcgtcggtgttcaggcgggctgttcgctgtgtctgctgcccctttttatcattgaaacggcgccatttaatcaccggccctttctctcatctcttcaggcacggacggaagaacacttctgatcattctcactcagttgctgatcagtctgagttgatcacagcaatcactcactgatcactcacatttgatcattttcagctgatcctctgatactttcacattgatcaaaaaccctcaaactttttaaggtcgttttccaatcattggccactttgatcggactttcggttggctctgatcatttgttgtcgttgggcgagcacaaaattgaatggcttcaggtccgactttttcaataaatttttttatttgttcaattattttatcatttttaattcatttgattccaattttgagatcataggccttgctcccacaatgtttttcgccatttttctgctgtggttgcccgacacgccctttcgcctgttggaaatgtgccaaaaacttttggactttgacgacggggcggacgaagacgtcgaattgagtgtgccttttgttacatatgtattatctcaaagattttgacagaattcgtactgtcctccctgttttacttcggcacaatcgtcgtcttcggcgccattcgttccgaagcatttgagcggtggtccctctcgccggaagggcgcaaaggacggcaaaaatgggcggacaattggaagggtggtgaatctccgcgcttttccctcaacccccccccccccccgtaggacttttggtcggcatttttgccgcagtttcctttgcttttactgccgatgatctgatcgattcgtattctgccgactttttctacgtaattccaaaattaaatccaaaaaagtttttattttaattttcgaatttcagcgcttttccttctcgcccaaggcgaacgcggaatttttaaccgccgggctcggcctcttgctatttttcaccagcattttgggcgctttccttgtcattagcaaattcgtttgctcagcttccctaatttgttgcaattaggccgatcgcttcgggcgccgtcgtctgctaatttccggccttttgggcacagccgtttcaaatgccatcgctgcgtttggcgcgtcgaccaattcgacttcgaccgttaaattagacaaagattgatcattttatgcatttcatcaggattatttctgtgtcaggtcgccattggcttcgccctcaccaaaactttcattggcttcggcgccggtgcccccgcgtggtttctcacctccgagttggtctccccactttttgtggcccaggggcaggccattag

SEQ ID NO: 17739 - DNA, 2058 bp, Heterodera glycines
taatagagcatgttaagagctttcgaatgataccaccctttgatagatttggataacaaataaaaaagctatagtggacaagcatgctcggggccgaaccgtgggggccgaactgagcggttccgtcagtgatttttttttgtttttttttaaatattagtggccaaaagttggaaaaattccatttttgttaaatttataaaaataaactcaattacataatatgtgaattgaaaattgttcattttagtttgatgacataaaggaattgttcttcagcactttggacgattacattgaaatttttcggataaaaaatcgacaaaatttggacaaaaattgccaacgaggggcttcaattgaattggaaaaaactgtgcgcgaattaatggggtaaaatttggggtttttaaaaaatgattaattaattcatctttttaaagggaatatccgacggtggcgaacacgaagaaaatgcgcaaaattgcacaacgcatttttgttaatttgatttgaaaattgccaatgaatggccataaaaaatttatcgaaaaaatggtcatttaattttaaaataaaatcgaataattctaataaaaatctcaaaatggctaatattaaaatgctaaaaataaaatcgaataataataattaataatattaattaattttgggaaaaataaaacgaattacaaggcataataattcccaaaataaaatttgcattaatttggtttttttattccaaagagaaaaccattttgacacctctttcagggcaaaaaataaacaaaaaacaataaatgcataattaaatagccaaaatgcagctgcgaaattcacatttgaattgaacaatgattgactgaagaagaaggcgatttgaattgaatttcaaatgtttaaggaattaattttgaaaaagagagaattcataaaaatgaaataataatatgataattataataataataataataataataatatcttttgagtattttgacgcagaagaacaaacaaaagctgacgagaaaaaattgaaggaaaacaatttgcttcttttttaataacaaaaacaaaagccgggagaacacacacacaatgagatttggcaaatcaaatcattaaaattgattagactcataatcacagtgatgataaaattaattaattaattaattgattgattaattagcccggcgacggcggcattcccgtgggtggcgaggcagtgctgctggacacaatggacaccaattcttcgggcttcaacaatgccaacacggaaaatgccgcgaaaaggaaggtggtgccgagcaggtcgcccaccgctgtcagatagggaattgcggcattgtcagggttctgaaaagtgggggtgggaggggaaatccaatcaaaaatggcatcaatgaataatgccatttatggcgggaaaagatgacacactgacctggcgccatagccacatcaacggcaccaaccattggcacaaaagcagcaaaatggcaacctgtgtgaattatttttgaatgaatttgactcatttatatatttattgcaatataaaagtattatttttttacccttatttctttccagagctgatccttttttttttgttataggccaagcgaaaattttaaaatgtttgccgagctatttttcaaaaaaaaaaaaaatgttggaaaattgagggccaaatggtgtgcccccgacagtagagaggcgccgacataaaatttggtaaattttaaaggaaaatttgttttaaaatccccctaccccccctctctactttaaagtcccatgtttcttgacaatgcatgggagtaggaagatgtgtatgtgggtggatcaaaaagggatacaaatattgttaaaaacctacccccaaaaattgaaatttccgaaaatttggcgttattattgttttttttgtcggcgcaaaaaacacctgcgccagcgcagcgctgagataaagtgcggtgaagagtgggccctgcacaacgtagacaccactttggggatgaagcacaaaaatgacccaatgaa

SEQ ID NO: 17740 - DNA, 1056 bp, Heterodera glycines
  unsure (1)..(1056): unsure at all n locations
attaattagtaggggtgtttttaagtcatggataaacgttaaaaatttttttgaaaaatctttgaaaattttctagcgattttttaaaatttgaaaaactttgtaattcatcataaatttttaaaaattcgttaattttttccaattcttaaaaattattttttttactgaaaatttctttaatttttttttaattaaaattttctgaagtttcgaggaggaaggatttgctctcccttccgctcttttaagtaccgaatcgggcgaaaaaaatgccctcgaaatggagcagaaacggcccatggtccactcatttggcaatatgccaagctgtgcagtgcggtgataaaatgtggacagtttggaggcggccactgcggccaaattgccaccaacgccttaatggtggatgagttgaggaaaaaggcgtaataatttataattaaaaaataataataaaatttaatactgttttatataaatggacggattggttttttttttaaatttggttggattttgtcgtaaatttgtgcctaaaaatgcccaatgttttttttgtttttttttcatttcgggagaggaaattaaccattttaaagtgtgtctaaaatttttaaatttattgtatgatgatgcactacaatattaataaatgaatgattgacaaatgacgtgccattcatcaccggctgataaagggccatttgccgaaaattgcgaattgccctttccaacacaaagccgccactgctgctgatcatccttttggaacaacaaaatcaatttatcaaaaaaataaaataaataccaaaaatattcaaaaatggaaaaatttaatttaattagaggttttgaaaaaacaaagattttttgaaaaatttatttaaggaaaacagacttttatttaaaattataaaaaaacgaaaaattcttttgaaagttttttatttcttaccgaaaaaaccattaaaaaactaaaaatttttcattttttttcgagtggttatgaaaagttatgcagccgaatganatgtctgtctcaacagaacacaa

SEQ ID NO: 17741 - DNA, 1277 bp, Heterodera glycines
  unsure (1)..(1277): unsure at all n locations
aaaataaaaattcaataaaagttacaaaaatggaatgtatttgagctagctcaaataaagacacaaaatgataattaattaactcaataacgcgcccatttaaatttcggttcagcttatttgtttaatattcttatatccttattgttaacttatttaaaaaggaattgccaaataaaaaaataaaacgaacaaatattattcaatttgtatttaaaatataaaaatattatatcttgggttgaaaacgaatataggacgtcaataaagaatggatttatagatgttattataataataggaaaaaatgcaatatattttgtaatgtaagaataactagtaagccgcgatgcttaaaaataactatttttcgaatttattatttgaaattctttgtgattaatttttgattacccttattgttgaataattttactctctacgctgcggagtaatttcttctctacgctgcggagtaatttcatctcaacgcaagcggaggcatttcatctctagggctggattagcgatctcagtaaaaatgagttttgaacgtaatatttctatttttagtttgaatatggcacattttgtatttaaatttggcgcttttattgattttttggattttaattaagcgccattattacatttttgtgttgattttttagcgccaatatttttaaatatgaattgggtacccatttattttttatttggcgccattatttattttttggctccgcacattttttcatttttatttggcaccattattgattttttggctcagcccatttttgcattttatttggcaacattattgattttttaggcgcccctttttgtatttttttatttggcgccattattgattttttggctccgcccatttttgcatttttatatttggcgccattattgattttttggcaccgcccattttttgcatttttatatttggcgccattatttgattttttggctccgcccatttttgcatttttatttggcgccattattgtttttttggcaccgcccatttttgcattttatttggcgccactattggattttttgggcgcccctttttgtattttttatttggcgccattattgattttttggctccgcacattttttcatttttatttgccgccattattgattttttggctccgcacatttttgcatttttatttgacgccattattgatttttgngcgcccatttttgtatttttatttttcgccgttaatgattttttaggcgcccct

SEQ ID NO: 17742 - DNA, 2134 bp, Heterodera glycines
  unsure (1)..(2134): unsure at all n locations
ccgcccattttttgcatttttatatttctgtgccattattgattttttggctccgcccatttttgcatttttatttggcgccattattggtttttggcaccgcccatttttgcatttttatatttggcgccattattgattttttggcaccgcccattttttgcatttttatatttggcgccattattgattttttggcaccgcccattttttgcatttttatatttggcgccattattgattttttggctccgcccatttttgcatttttatttggcgccattattggtttttggcaccgcccatttttgcattttatttggcgccactattgattttttgggcgcccctttttgtattttttatttggcgccattattgattttttggctccgcacattttttcatttttatttgccgccattattgattttttggctccgcacatttttgcatttttatttgacgccattattgatttttgggcgcccatttttgtatttttatttttcgccgttaatgattttttaggcgcccctttttgtatttttttatttggcgccattattgattttttggctcagcccatttttgcattttatttggcaccattattgattttttggctccgcccattttccctggcacatccaaaatgaaaaaaaatgatggcacggtgtcattgtcgcccccaaagaacccacctcaaattgttcctgacagatggaacatattttttgtgaaatgttttcttacacttcaatggtggaaaaaatttctgcaatttgggcatggcttagtcccggcggcggtgttcgagccatgggtctgggggcaaggccgaggaagaggaagagagtggacggtttcgcctcacctcaatttttggacccataaatatttatttatttatttcaaattaacaaatttaaaaaaaatcggaaattttttatcgattttaatcacattttaattttgtggctaaaaaggagggcaaatactattaaaaaaatgatgaaattggatttatgacaaaacttagtgaataaaaaaatcccgcataatttaaatatttaaaagtattttcaccattgcataatgttgttgttgacgacggcgatcctgcgcagcgttttcccatacccatggcatttttcgaactgaaataatcaaaatattattcacaatgaaaaataggtgaattaaatttaaaataattaaatcaatttaaaataattaaattaaattaaaataattaaataatgatgccaaaaggttatatattggaagaaaatgaacaatgcctctcgcccccgcccctcccaaaatcggcgatcaaattaattagccaaatacaaaaaattattttgctagcaaagagcccaggccaaaaatgccgaaaatttaatgtccaaaaatttggaagcaaagccactattttggcgtttagtcattatttttgccactatttggcatttttttgaaaaatttcccaaaaaatgcaataaaaacgaaaaatacaccttaagaattggaaaattttctcaaaaaattcttccccaaatttttttttcttgctcaatatttgctaacaaaatattggaaggaaatattcctcattagtgactgcaaacagtgaataaaattgtttgccttaattttaaattaaaaaacagctatttaaaaaattacacccctaaatttggaactttttcgccactattttggcattatttggccattatttagataattatttcggggttttttgccactaaaaattcgccctattgataataatgatctgtttaatcaacctaatgaagaataaacttatgattaaaaaaatattcgaataacaaatttatttaactcttttttaagcattttcaatcaacttatttatttagtttattttattttttaacttcctttaatttttatttcattgtaaccggatttagcaatttaaattgttttgtttttcttttggtttaagttataatattgtactacgcgcatttaattgcaacctcttctcggttgatttgtttattgtttttcataattataattctttaaaatgttgcataataattctacccattgtaganttgtatcgattgactctaga

SEQ ID NO: 17743 - DNA, 2579 bp, Heterodera glycines
cgccgaaagtttttcggaattttaggaatttttaattaattttattaagaaaattgtacaaatttaaaaattttcaagagtccccaattccccgagttagtgtcggggggtcgggggataaaaagtcggaggtagggggctcggggtcggggagcaaccctattataaacccccaaaataactgctaaaatggaaatgagataaatattttaaaaatcaaaaatgtagtcaagtaaataaataaataaattttgaatatgaatttttgataaaattttccatttctcaggggtgtatttttcgtttttattgcatttttgttaataatttttttcaaaatagcagaaaatattttacaaaaaattcttcaaaatgaaaaagagcacaaaaaaagcaataaatttattattattaacaggttatatcgctccaatttgattcggttttttttcggtttttgaaaaaagtcggtcggttttttcggttttttgattatttcggtcggtcggtttcggtataaaaaccgaaaaaaaccgaaaccgaaaaaaaccgaaaaactcaaaaatttctcggtcgggttttttcggttaaaaaccgaaaccgaaaaataccgaaaaaaaccgaaaaaaaccgaccagtccgatctctagttttaattaccctttgtttttaatttgggaaatactgagcaaacattaaaagtagggctaaaagagcacaaatgaacagtgatttgaaattgtccaatcgaataacaataagtgacaacattaaaccaaatcgatcaccgctcattttgttccttgtctaataatcgatcattcgtccaacaaaaaccaaattagagaagtgataatagcaaagtgattgggcttcagtcaattccctcccctccgacacatccaaaaacatttggactgatttgggcttgaaacggccaaaagtccaatttggcctttcatttcactttgtccgttcgttcattcgaattcgtcgtcccccctttttttgtctgatgggattatccgaccccttccctaatttgccttccattttccttaattaccttttcgcttcgcttcgtccactttattttcattccttgctttatcatttaatgattgccttcctccccatttttgttgaatctttttctgtttttattctgtgatcgccgatgaaacatcgccgtcgcttgggggttttgccgggttaaaaagtgcccaaggggagaggctgcggaggcggtgggctgacccattggtgacggtggcatcgaaaaacgatttggcgctggcgccccagggaatggccgacgatggcaaatccaagtgggcttagagaaaaggcattgattttggaaatacaacaaatcagtggcatttcgtatcgacagacgctcttaccagccgacccggaggaaacggcggagagcaaagaggagacattggcacaacttctgaagagacacctgcgaaatttggtcggccggtgtcggcctatgcatttggcaaaaaaaaatggttgtcttcggcactttcccttttcaggtgcatttctttgtcgaggattggttcatctccggaatgctcggcttcatcaccgccgctatttcaatctccgtggacgttggctatgaatatttgaatcactgtagtctctttgcgctgtctctgctcaccttctctccttcttgtctcttttcaatttctcttttatttgtttctgatcactttttatgtccgtctgaattagtacagaaatatagaattcaataaatcattatacaaaaacaacggacatcacgcttggtacatctcgagcttcctttgcattgccttcctaaaaaagaagcaaagtgatttcaggatatgcacagtttaagtgaaaaactccatatttctctgcatacataataaaaagcgtctgtctctctgattttaaggtctgaatcggcccatttatacctgagttatacaaaacgaggaacgaaatgtgcaatgctatattgaattagtacagaaatatagaattcaataaatcattatacaaaaacaacggacatcacgcttggtacatctcgagcttccgttgcattgccttcctaaaaaagaagcaaagtgatttcaggatatgcacagattaagtgaaaaactccatatttctctgcatacataataaaaagcgtctgtctctctgattttaacgtctgaatcggcccatttatacctgagttatacaaaacgaggaacgaaatgtgcaatgatatattgaattagtacagaaatatagaattcaataaatcattatacaaaaacaacggacatcacgcttggtacatctcgagcttccgttgcattgccttcctaaaaaagaagcaaagtgatttcaggatatgcacagattaagtgaaaaactccatatttctctgcatacataataaaaagcgtctgtctctctgattttaaggtctgaatcggcccatttatacctgagttatacaaaacgaggaatgaaatgtgcaatgatatattgaattagtacaagaaatatagaattcaataaatcattatacaaaa

SEQ ID NO: 17744 - DNA, 844 bp, Heterodera glycines
  unsure (1)..(844): unsure at all n locations
tgtgcaatgatatatgaaattagtacagaantatagaattcaataatcatttatacaaanacaacggacatcacgcttggtacatctcgagcttccgttgcattgccttcctaaaaaagaagcaaagtgatttcaggatatgcacagattaagtgaaaaactccatatttctctgcatacataataaaaagcgtctgtctctctgattttaaggtctgaatcggcccatttatacctgagttatacaaaacgaggaatgaaatgtgcaatgatatattgaattagtacagaaatatagaattcaataaatcattatacaaaaacaacggacatcacgcttggtacatctcgagcttcctttgcattgccttcctaaaaaagaagcaatgtgatttcaggatatgcacagattaagtgaaaaactccatatttctctgcatacataataaaaagcgtctgtctctctgattttaaggtctgaatcggcccatttatacctgagttatacaaaacgaggaacgaaatgtgcaatgatatattgaattagtacagaaatatagaatcaataaatcattatacaaaaacaatggacatcacgcttggtacatctcgagcttcctttgcattgccttcctaaaaaagaagcaaagtgatttcaggatatgcacagattaagtgaaaaactccatatttctctgcatacataataaaaagcgtctgtctctctgattttaaggtctgaatcggcccatttatacctgagttatacaaaacgaggaacgaaatgtgcaatgatatattgaattagtacaaaagtatagaatcaataaatcattatacaaaa

SEQ ID NO: 17745 - DNA, 1772 bp, Heterodera glycines
  unsure (1)..(1772): unsure at all n locations
gtttgcatcgnccaggtcacaaattttgaaaaccccccgcccctaattgacaaactacgaattattggctctaatttcctcctttttttacagttggaaatccgtcacgaggactacaagcagcagttgggggacatcaaacaaacttattggattgctgaagtgaaagaggcaaaccctttaaatatttgattacttttatgacaatttttgtgtccaaccttcgaattttgctgggcaacaaaataagggacgaccgaaggaacaaaaaacaaaacaaaaaactgtgccaaattggcatttcgttgtcttcaattagcatcgaataatcttgataatgctgtgtccctttctctttagctcgtcggcttttaccttttgctgcgttacgaaggcatggacgaggagggcgacgaaagggacgacttttgggccaacatcggctcggacgatgtcaaaaacgtcggctattggtaagtttaggcattgttctttatgttccatttttttaaatgtcgctcgaggcaatttttattccaatataaaaattgccaaaaaaaaattagtcgaagagcggcgacttttttttgttcacagaaattatctttaccatttggagaatgcatgcattttccgggaattttagagtctaaatttattttgaccaattttgacaataaactctaggcctgaattcgaacaaaattcgataattcaaaaagtatgaattcagacgaaaaacttaataaaaccaacgcttgataaaaatcatagataaatctaaaattttcaaaacccaaaaacataatcgtgtttagcacgtgtatttttttttacccaaaactcaataaaaaaaaattttttagctaaattttcctgattgtgagggtattaccatgtttttaaaccgtctcgagacttgaccaaatactgcccgtttgtttgaccttgtcattccctttttgcatttggcagttccaaacacgacaattgcgagctgttgccgccgcggaaaatcgctggccgcaagacggactggcgcgaatacattgtgaccaaactgaatgactgcaaaactttgactggcaaatgggtgcgcgagcggcaactgtcgctggtcgaaggacggtttaaggtgggcaaaaaatgggcaacccaaaaaaaaaactatgggattattttttggatttgaataaatcgttttgattttttttgaataatttcgggtgcgtaaaagccaaaaagtgaaatgaaaaatgtgcggttgtaaatgttgtaataaagtctgattttattttgctatttttagctctttttttttgttaatgatgaaaaattttgtagggcccaaggctcctcatcttaaaaattagttagctctatgagaatcataacgcatcatcaaccagttaatccgtaaagaaataaatgaaatttcaaaaaaaaaaccgacagattggcacccgtctcgaactcctcgaccgcctttactcctcccgcgtgcgcccggcgcgcgtcatcgaacagttggggcggcgcatttgtgtgcaggtcggtttcttctgtcaaataatcggtggattattaagtgggcaagtggacgcaaacagggaaaacggacgtctttctaacaaaaagattttttttcttgaaaaaatttctcggcggggaaacgatgcggngggcggggaacccggcgggtgggaaccgagctgatctcggggcagacacggtcccgggatttccgcttggagaggtactgacgacttttt

SEQ ID NO: 17746 - DNA, 558 bp, Heterodera glycines
gttttattaataggttccaagtatatcggtacgaaggcgtttcaccgatttctgtttagtgtgttttttcttccgacctgctggggtgtttgctggtcaggaaatcgtgtggtcccacccttgattgtagtttatttataccttttttcgctttaccaaatgcaccaccttctcttacatcctttctctttgtgtatcgtttaaagtcgatccctctgacctttttgggcatttatgttgttggctgctttctctagcaaatttttgagctcccgtttttccgcatctctcgcaagcgactctttgaggtccgaactctccaaatttcacccaaaagtctctcattaacagacgggctcgtctgggccagggacgtatccaggatttgggcttggggggggggggggggggtaccgatccgaaaagtcaattcttaggggtgtatttttgaaaattcttcgcccgattcttaggggtgtattttttaaaatttttcgcccgattcttagggggtgtattttttaaaatttttcgcccgaattcttagggggtgtattt

SEQ ID NO: 17747 - DNA, 1795 bp, Heterodera glycines
tccgtgttgagcatgtgaaaccgtccggctcccggcttgagtttctgcagcgatgcaaagcgaatgacttgcagaagaagcagcacaaggagggcaacgcaccgtttgtggcgctgaagcggaagccgaaggagccccggggggcgcacttggtcaaagtgaagagcaccaaagttgagcggctggctcccgtcaaattcgaaattgtcgcttgaggcattatgggggcaaacgaatgcacgagcacagaaaaccaaccgacaattgttatttttaatttgttgatccgtttcgtgttaaagaaaaagttttgaaaattgaatgtccatgtcgaaaattgagtgtttatagtaagcttgatggatgtcgtagccctagttagcggccaattttgcgaagttggactaaatccacctgccatctctcaattttattacacatttctttctttacgatgaaaaaaaacctaattcccacttttttgtctggcccggttaaatccaacttatggccatgccaattaattgttttaaaaaaataaaagcatttgctaaaaatattcatataaaattcaccgggaatcaataagatggctagtttttagcagcacatttttattgagagcgcaacaaatttttcaaaaaaagcgataattgccgaatttagcaaaacgaattaaaatgacagacaaagttgaagaatggaacattcatcatcatcagctgggcccgaatttaaataccataaaaatagggccaaatatgcaaataaaataagtatttttatggatcaaaaggcatcattaaaaaatctgggctctaattgtcagtcaacagaattataattcgttggaaatcattttgatttgtttaatctgcacgacgtgatgatcgcatgcaaaaaactactgttgtcacacaggcactgatggcatggcaattgaaaaaatatacggacgaagccggcactttgaacgggccgaacttgtggacaatgcccaactttctcattgctttagccgtgtgagtgttttttagtaaaataatcaaacgggacgacaaaaaacaaaacaaatatttttgggccattaaatatgtccggagacaaaatggcgacaacaaacaaacaaaaaattactggccaagtgggggacctttattggcattggagtcccaaagaatctccagccaagcctttttctttaaatttatcagcttctgtgttaaaatttatctttttatgaaaattagggctaattgacggaaatacaaaatttaataaggagctccatcaaaatgaacgaacttggggggtgaaagtcagtaaccttattaatccaaatcaatactcagccatttgactcgcatcgttttttatacacatcattgaaaatccaaaacaaaaaaattaaaaagcatgtcaatccgtccatttgaatgattgtggccctaaagagggccgtttgggatagttttgtttgatgctttctctcctcgcctccgctcactgactttcgccgtgctgcgtcttcttgggcagaaggaccgcctgaatgttcggcaacacaccgccctgcgagatggtgacgcccgagagaagctgaaaaatcacaattttcaaaaaaaaacaaaaatcggctgctgtcggaccttgttcaactcctcgtcgttgcgcacagccaactgcaagtggcgtgggttgatccgcgtcttcttgttgtcccgcgatgcgttgccggccaactcgagcacatccgacgccaggtactccaacaccgctgccagatagacaggcg

SEQ ID NO: 17748 - DNA, 1171 bp, Heterodera glycines
  unsure (1)..(1171): unsure at all n locations
ttttcataaatacatttacaccgaaattttaggaaacccaattatgacgagctcncaacccattatttatgagaaaattgtgcaacaaaatggtagcaaaaacagcgctgaatggtgtctggcctcggaacggcgactgctccaaaaactgatccatcataagccggtggggatcaatcggcacttcaacctcaacttgttggtcatttacatgaacaacattttcgactttgaggaggacattaactttgatgttggtttttgggtttctccctctttttttgtaaacttttatcgacattcttttggattcggagtcgacaaaaatataaggacagaggccgaaaaccaaagggggcggggcggcactttttcggtttgcaaaaaaagaatcaatttagctttttatagctggaccgagacctggatcccggtccaagccatttttcagcaacctgggtttttcctggacattgtccaggaagcccatgtttccatgtccatgcatgaaaaagctggatttcctggactttgttatctttatgtagcgaaaatgttaagcttttttaaaatgctcaaagacaatatttgttcgtctaatggacgcggctgggcaaaacttgaaaatttcaattaatttttctctaaaagttgatgcttttcaaaatttctttggttttcgaccccctttggtttttaaacccaactaattttgccaatccctaaaaatttattatttgccctctaggactatctgagcgaaaaggatgttgaacagttgaagaggcggcgtatggagggcaagcaggacgagcgaaggccaatggcattttcaccgtcctacgcaattcgaccgaccacgaaacaggcaaaaaaaagaccaaaataatagccgaacttatgctaatttgtctgttttaaggttgaagaaaagttgaacgaatacttcgacatggagctgatcggggagaacgagtccccctctgaagaattggaaaagaaagctgtttttgaactgccccaagagtaccaattcaaggaggaaatggtcccacgataaatccatcacatttttggcatttaatacaatttttttacgtaataaccaaatcctttggtttctatcgaaattttctgtaaatgtgtaaaaaaatggcataaaaatacatag

SEQ ID NO: 17749 - DNA, 831 bp, Heterodera glycines
  unsure (1)..(831): unsure at all n locations
tttcaaatataaaatttagttaaaggttttgctttcttaattttacaatagattcatttatttacaaattattatctttatctatttagaaaaaaataaatatctcgctcctccgtgttctaatcgtttaaaatttattttaaatatacatataaaattaatgattattattattattattttatgatttcgctaaattaaaaagttcgaaagtcactattttcactcgcgtcatcagcaacggcattttatccatgataaatgctaataatcaagcatttaggttattttttgaaccgtaaaaattgtttatattcgatttatttttcaaaattttagctatactcaaaaatttaattttgtgatttgctttgagaaaatacatcctcaaaaagcactcagttttttttcatattattttatgagttctatattttgattcttcgatagaatgctctctttattatttgtttagaatttctgataattttctcgtattaaatgaaccttattttgaggctttttaagtctctaaaaaagtactacttttctattgctaaaaacatcataataaaaattattatgcaacaaaattgttaattacacattgcttttttaatggaaatttcacgttgcattccataatttatcattatcaattatttgttttattttctcactcgattccaacttaattttattacgtcaaattctaaatcttttttaaagttaagttatgattgcaaggatctccatgaatttaatttattactcattttgaaatggttataggacatttgcggnccggacntttgcggnccgganttttgc

SEQ ID NO: 17750 - DNA, 1758 bp, Heterodera glycines
tttatttagaaacattgtcgtttggttccagtcacgtatcaaaaataaataattgttttgtttttatcaaaaataaataatttttttatttaagaaaattaaaatgtttatattgtttatttatttcattatttttatttgtttattattttctaaatttttaattgcataaaatcatcccggacgggacaattcgaagcgtgcctgctccaacagtccgggagctatcatctatacgcgttgcggatgcaatcgcgtgcgttcgccactcgcagtgagtgcgaggagcatggctcgtcggccgcttatttgcattattttactattttaaatgtatccacatttttttaaaaagatcacagaaattgagaacgttgattttgatagtatctgattattctttcgttaggtttttcttatttcaaaatttttaattttgcatgtatcagtttgttcacgataattcatttttggaaacttgaaattgtattttaaatgatttcttataaacatttttccagtttttattattttataatataattatttttcattccagtttttttggttattaattatttaaatttttatttattttctatgcttatacatttgtcatcctaaatctatttatttaattttaaaaaatatttgtttcatatttttgcgcttataacttgagtttttgttttattttatattttatttttatgcaatatcaggcagctttatctatcaataattgcatacttttttttcctacgcctttttacaatcagtatacactgatcaactacagagtatcaggtaaagccatatgatgttcattactattttagtgacggagtcaccaaaatagtgatttctagtaacgaaaagtgacgtccaaatgaaaaaattttaacgcagaaatgcgttttttgagctcctttcttcaaaacaattgagcaaaaaaaagttttttcactaaaagttgctgccctactaatgaattagacaaaaattaattaaattttttattgtatttccttaattttaaacaaattttaattatttgatttataaaattattaatcatctacaataagaaaaaatacgatttgtaaaatttttttttaaatattctaattattgttttatttattattctgataattaattgttcttttaaataaatctcataacttgtaatattgccttggtcattctttatttaaattgaatttttttaagatcttttgttgcttatattattatatttaattttttaaaatttaattttagaatattttttttagtacttgttttttgttttactattttttaaccaccatgttagaggccatgtttgacatggcggcctgacattgtagacatatatttggactttttatttgatttcaattttgcctttccttcgttgatttataaattaacagatttctctaatttaaaatgctttattatttaggtaaataaaaaatctctgccatttcgcaccggcagtgcccgagggtgtaagctcacctccgccagtaaaatttttttctttatttaattaattttctcaaaataaaaatgatttagacgagcaataaaaaaagtcctcaatactttgttgcattttttgaatttatatttttctctgtatttttaataaaccttttctattttttccttttaatcttgacatttacacactgcaatagactctcgctttcggaagttatcgtatcaatatttatttgtaaaaattta

SEQ ID NO: 17751 - DNA, 1867 bp, Heterodera glycines
ctcatatcgagatcggatctcgcgcaacgctgtgctaagttcgcccagttcgcttcgctcttgctcagcaaattggctgacattgagcactttgatctccgacagatcatggtccaacgttttagaagccgattttgctgctgatggctgaccctcgggctaaattaaaaattgaaaatgcctaagtaagaaggcctaattagtgtcaattatcattttccaaattgctttattgtttgcctgtgccgactctttgcgccgttggctttccaatttttccatggctgagtccgccttttgcaccgccatgcgcatttcggccatcagcttctgctcctccgtctgccaattcgcctccattttgaccgcccttttctcctcctcctcctcctctttgttctgctgatgatgctgttccgtctcctttttcgtctcttttttttcttcttttgctgttttttctgttgttttttgatcgggcacctggccaattttgtgaacgcaataaattacataatttgaaggtattttcaattgggccctaataaatgaaatgataattaccaatacgactgattggacaattggcggtcgaatggtcgccttcagttcgaactgcggttgtgtcagaattgagtctgccgatgtggtcgggaattgcgttggagtgcttctacttgcagaggatggcacttcaatgcagaaatggacagagtttaacgagcaaagaccaaagtaataatgaaagcgtcttttcgaaattcagacattgactgattgcttcagtccacgaatttcaccttctccccgttttcgtgctcaccttctccccgttgattgtctgctccaatttcgatggtttgcaccgacactttctgatctgttgatcggtcttcatctgccgtttcttggtgttgttgttgtccttggtccaatttctgatcacgatcacttccacttttggccccaatgttccgcggcgccgggtaaatgctccattcgtttggcaaaatattcacattggtcaacagtttcggtctgatcagcctttgcccctcctgaggctgctttagcaaagttttcagctgatccagcatttcttgacgtgtgcttattgggccctggcattaaaaagacaatgcttttcctctttattgcgcttaattacctcttcattgttttccctctggccaaattgaccccggcgctgcttcctaacttgcttaagcaaaagtgccaattgtctgtcggtgagtcgcctcaacggtcgccgcaatgactcgtgaagagcactctgagactaacaattaatttttaaagattatttgacagggaataccttcgatcgccttggtccattttcagtgtattcaagagccacactttctgtcaattgatcacttgcgtttatcgccgcaactccattcaaaatcccaggcactttgacaggcactgaagggaaatcatagcggttaattagttagttcgtttatagttttgaaaaatagtttattgatgttggcattaaaacgctcttttaaaatgccactgccttttcgttgcctcttggttttggcataatttgctaaatgcccccgccccctccccaccgttatcagacggggcatccaccgatgccaatggctgcgcctctctcgaccccgtgagttcctgctcctcttcgtcgatcgatgctgctggtggaagctcaacagcaccgacaccgaatgggaccgaattggaaaggggccgccagggctcagcgcctttgtataagtgcaccggatgccgacgaatgcttttcccctgctcttcctctccttcgtcggcttctgcccttccgcccgtcgcacttcgttttccccgc

SEQ ID NO: 17752 - DNA, 802 bp, Heterodera glycines
cccccccccccccccccctccgtttggctgaccccccccgggggagatgatcccttcccttccctcaccctttttccatccatcatcattcattcattcattcaatcattctgccgagtttttcagcctaggagtgagaatattcagtgtcttctgcttcgcttcttcccgatgagctgctgctttaagcaacgaccggtcgcgcgccgcttttgccctttttcccatgcgtcgttgaacaaacgctgcagcccctcgggcagacgcgaagccgacgcaacaacagcagaacaacaaattgctcatccccccccccccaatttcgccccctttttcacatccatcggggcatattaagcggataatgaaaaaggaaagggaagggagcagagtcacccacccctctcttcttctcagcaagtcgcactcatcaacgacgcttcctttattttatgagatcattttccgaaaaagcgttgtgagtccgatgaaaggacaatttttgagtttgaatttgagtgtaatggaagtcagttcattgtttcaatgggaaaatcaattttaatcaaaaagaaaaagcgtaaaaattttgcatgaaaaataaggtgcaaattggactcaattttgattaaacaaaagagagaaaatgtatttgattattaaaaggtatttgatctgctcaatttgcagtaattcggccaaaaaatttttgttaatgttaacagcaaaaaaaaaaactttaaaacgcaacatttattaattaataaaattaaaacatttccgtttcaaaattccacaaaat

SEQ ID NO: 17753 - DNA, 2543 bp, Heterodera glycines
  unsure (1)..(2543): unsure at all n locations
tgggaattttatgtaacaaaatttgcaaaatatgtaaataaaatatgtataaaaaatgctaaaatatgtatgaaatatgtacaaaaatagccaaatatgtactaaaatatgtaaataaaaatttttttaaatggttattttttggaaaaaattcctaataaagggtgaaacaggcacaaaatgccttaaaaattacctaaattggcttagaatcacttttattattttaaaaattatttttgatatctcattttttgaaaaaaatagattttttagggatacattttaaaaaaatttttttaatttttcacaaaagattttctataatttccaaaaatcctcaaaatatgcaaaaaaaaatgaaaatatatatgaaaaattgcgaaatatatacgaaaaagtccaaaatatatgcatatgtaatatgtagaaaaatcccgaaatatgtaaaaatatgaaaaaaaagtcccaacttttgttcgcaaacacaaaaaagaaagtgtttttcctcctatttagagcatgaagaattcaggaaaaattatgtatttacataaaattcccatccctattaatgatatattttttacatcattttgttatataaacaattctaaaaaatgcttgttaatagattatacagaggacttgaaattctaaaaagaaatttaaattaaatctaattgcttccgaaaaaagttataatttataaagcattgaaaaatatattgaatggaaaaggactatttgttctcataaatcatgggtgtgatcttgttcttatttctaagaaatcttattacctaggagtagagccaattttcctttaaattcttcacaaaaattgaaattttatggcgaaatttcattatttaagtaagaaattttaaactttggcgcaaaattcttctgattttttgagttctattgaagtgaaatatatgatttactaatttattccacaaaattgttaaaattcatacgggaggcgaaaaataatatttaataaatttttgatggaataaattgtaaaaataactgatttgaatcaattttgcaaaatcttcttatttttcacctaaaatcttattttttagccatgatgttcttatagaaaatgtttcgatcagacccctgcattattctaaacgttttaatactgccacaaatttattgtttttattttattttataaaattttaattttggttttttcctttttcaggttcaatttccaatgcaacgaatggaacagatgaaaatggcgagtaccaaaatttttaaattaaatccgagtgaccccttcccaaataattcatgttttttcttctagacagaaaacaggctaaggaaattgccaaggcatttgggatgtatctgaagcaaatggtgccaaatcggaaataatttttaatattgtaaggaagaagctggctgggcggttaaaacgcggaaagcgggggttgataagatccataaaagaaagggcggatgtgcctcggtagcttaatggtagagctgcccacggaaagggtgcatgagtgtgttcgattcccacccgaggtttaacattttgcccatttcttattggtagcaccggatggttgccccaccgcgccagcagcaattaactaatggaccgagggaccggtcccgatgaggatggtactgtaaggaagaagctggctgggcggttaaaacgcggaaagcgggggttgataagatccataaaagaaagggcggatgtgcctcggtagcttaatggtagagctgcccacggaaagggtgcatgagtgggttcgattcccacccgaggtttaacattttgcccatttcttattgtacggaccccggcccagtccctagcaactcaatttactgtaaagttatcgaaagggccggagaatgttaaatttggctgagtttagacaattttatttttatttttcatcggtaatagctcataggttgcggaatataggaaaagcatcagtaaataaataaatataaaatgaattgctttttaatagttaaataagcattttatagatgttgacgttaaaaaccaaaaggaactgtatattcggctgccagacgggagccgacactaacgagcttaagcgagcagggctcgttccagttagctttttcaatttataaataaagtgacaaacttttataattaaaattttcgcattttcatctctcgctgaagattatttgttgaaatttttcaaagtctcaaagactggtgttgcaggggaaatttttgtaatttgagtgtgttttgtaaaaatattttttttttgcaaaatgtcaaaaaaagatgtatatatgtagtgattaaaaataaaataagttgttcctggaaactttcgcatatttatgtngtgtaaaatggggataacatcatactgttttataaaatttactaaatttttatgataaattcaggaactttttccaaaatggaaaaggggtgaaatatttttttaaaatttttttacatttgcaaacttttctttttacatacataccatttt

SEQ ID NO: 17754 - DNA, 2257 bp, Heterodera glycines
ttttaaagaggccaaaaagattgaccgggaaattacgaccgatgacgttaataaattcctagaaaagcagagaccatacacgattcataagcccatcaggaaaagattcccgagactaaagacgataccaagtggcttccataccgattggcagtgcgatttgtgcatatttgaccagttgaaaaagcataacgacggttataaatatttattggtctgcatcgacgtgctgagtcgaatgatcttcagttcaccggccaagtcaaagaagagtgaggacatgatcgaggctttttatcgggtgttcgaaaagtctaaaattatcccgatgaaaatatatagtgacagcggtttagagtttcaggcgggaaaatgaaaaaatattttgaggaaaaattcatcatcaaaaacgtaatgtatagtcctgatctgcacgccggagtcgttgaaagggcaaatcggacaataaaggagcgcttgtacagatattttacaaagaaagacactcttcgatgggtcgacgtaatagataaaatagtctcaaacattaagaacagtgtgaataggacactggggatcaagccgtcttcaattaattttgaaaatgcccgcgctctctgggaaaaattatataaggctagggaatttaaaatttcgaaaaagaacaaatttaaaattggcgatatcgttcgaattaccaaggaaaagggaaaatttgcaaaggggtatctcccaaactttaccgaagaattatttaaaatcgttattgttaattcgacgacacctgattcatacaggattaaagatttggaaggaaatttaataaaaggcatattttataaccaggaattagtgaaaatagatggatgatttttacattgtactaccctcgaacacaccgggaccagggaacagtacatcaaaattcacagtacgactccccgagactttggaattgggcaaaaattggtcagtagctctctcatcaattatttacccctactcattcaccgctctcggtataaatggtcaagagtttattaaagtatgggaaaatgacagcagtgtccccattcaagtttattaccggacatgaattttaaaaccgccgggggattgggaaataaaattaacgaagcattcacacatcattacaaaatcaaaaaacaacgtggaaagagagaagccaaggctgaagaaaccaacgactcaaaaattgatgtcgcaaagagggccgcagaacgcgccgggagagatgtagaaagacaactcaatcatatcaacaatgtctcgagttccatccaaaccaaactaagcacactaagagaagtaaatcctcaaattttagaagagcctgatataaaagtgtggtttgacaaaatggtagagaaggggcccgaaattcaaacataccgaaatgaacttaaatcttttcaagaataagtagataaagccaaaaacacaacattagagcatgtggaaaagaatgacttgaaagaagcaaagaaatcagccgacgtcgcaaagggaatagccaaacaggcaaaaagcaaatattcaacaactctcgaggaatataatgataaatcggaaaagggttatatcggaatagtgaataggcttaatgaggctttgggtgagcatattaaacgtaaagatattggaaatagacacgtatctgaagctgagaaaggaccacaaaaaagagagagactagccaatgaggatgttcaatttcaatatgacagcattaattaaaaatttattgtctatctttccgctgctgtctcccacatagatttgtcaaaacacctcgcctatgtgcttggttttaagaacacaaggctatttcacgcggaagaggcgaattatatgccagatttgacgggaggcgtaaggcagctatacatttatgcaccaaatttaatagaaaacacaattatcgggaaccagatggctccactcttaagaatagttaacgtcgtcaatgacccagggtcgattagtgaagttatatatagcaccgagtactttcatcgtctacagtcgaaacgaatttcagaaaatacaattgaaattcacacaccgtttgacgaattcgttaaatttcactggggaagttgtattctcacattacattttaagaaaagtatattttaaaaaatgacacatgtgtttttcgatcccgagtcggtcgattggtcatcttttttcacttcacaacatgggaggggacagaaacaatactttgtcggaa

SEQ ID NO: 17755 - DNA, 890 bp, Heterodera glycines
ccagtagatatagcgtgcacactttactgcccctacttgacttttttttgctgcaccttttggtgctcaacttttcgctgcccctttttgttttttttctgttttgtgcagctgcgggcctgagcttggggcaggggtggggtggggtgtgggcttgtgcttagcgcacaattttttctgcccctacatgactttttttgttttgggttcagaggacggaggggggggggggtggacctgttcttttctgtgctattttgccaacctttttttctctgcgagggacgtccgttcatcgccgggggggggcgtccgttcatcaccaattctcagcgagtgctgagcaattgattgcttcctcagctcaaccgtttggacatttgggttgttcgcccctccctccctctctgtcccccccccccccctctttcgaatgttgccattctccgccgtttggtctacgacgttgacttcggccaaggagtggcgggggggggggattcgctgctgctgtggaaatgccgagctgatcaacgacggataaggcgctgtgtgtgtacaaggacaagaaaaggtagggggtggagggcagggaaatggtggaaaaacggttgaaacatttggaatttgaataaatgtcatattttgtggtgagatgggcataaagatatgaaaatctcaacgacaccaatttggccaacagcaacaacagcggtcgtccgccggcccgttctcgccacccgccacaaaacgtcatgttcggcgagttggagctgctgctgaacccagcggcggcggtgggggaggaagacattgcgcaacagcgcaacaacaacagtggccacaacaaccaagtgaggaaatggggttaattaatggaaaaattaaaa

SEQ ID NO: 17756 - DNA, 691 bp, Heterodera glycines
gggagaagcacaaaaaaggcttctttgggctttttcaattttaatgcttttttaaattgaaattttcagcgaggtgtcagtggcggcgtgtcgtctttggcggacggaagtgaaatggtgcatgccgttggccagccgctttcactgcgcagcactggcggcattggcattggtggtggacttgaggtggacatttttgtggaaaatgagggaggcggagggcggggagggtaggggggcggggttgacaaagaatcgacagcaacaacaaaaatgggacaacatcctccccctcccatgttttaggctttgccgcgccgtgttcgtgaggcggtcgcgcaagtcaatgctcgccagttgcagcgaatggtgagcacacaacctgaattcgcgacggtcgtgccgccgattgccgagagcggcttttcgaacattcactggctccttttggaatggacgggcgatatgattatgaagtgagttggatggaaaggggtcaaaaacgaaattaaaatttttttttaaaattttgtagccgaattgttgggcttgttgtgttggccggcccattcaccacccaaagtgacatcagcggcttcgacgtgcggctgatttttgaccagcagagcatggaccacgaattggcaatgcacggatggcaagagtgcgtggcgcggatgaacaacatttc

SEQ ID NO: 17757 - DNA, 1983 bp, Heterodera glycines
tttttctatcaaaagggggagatgaataaaatttttaaaaatttttaattcccttttaaacaggacaaaaaagtttaggcttatatttaataaaagtttcatcgaacctagcgccttaaaaatcgatatatctctccaattcttgcaggccttctccattgtaagggactaagttaacgtgaaaaaatgccaacgcttgttgtgtttaaaatatttcgaaattctgactttttcattaattatttattattttgcaaaattaattcataaatattttttagaacgtgctctgaatcgcaccaaatgttaattaaaagttaaataaggctctctgatgctttttctatcaaaagggagatgaataaaatttttaaaaattttaattcctttttaaacaggccaaaaagtttaggcttatattttaaaaagtttcatcgaacctagcgcactaaaatcgatataatctctccaaattttgcaggccttctccattgtaaaggactaacttaacctgaaaaaatgccaacgcttgttgtttttaaaatttttcgaaattctgactttttcattaattatttattattttgcaaaattaattcataaatattttttagaacgtgctctgaaacgcaccaaatgttaattaaaagttaaataaggctctctgatgctttttctatcaaaagggagatgaataaaatttttaaaaatttttaattcctttttaaacaggccaaaaagtttaggcgtatattttaaaagtttcatcgaacctagcgcactaaaatcgatataatctctccaaattttgcaggccttctccattgtaaaggactaacttaacctgaaaaaatgccaacgcttgttgtttttaaaatttttcgaaattctgactttttcattaattatttattattttgcaaaattaattcataaatattttttagaacgtgctctgaaacgcaccaaatgttaattaaaagttaaataaggctctctgatgctttttctatcaaaagggagatgaataacatctttttaaaatattttccttatattttggttatttcgttctactttcggtggggtgcttggaaaattggaatcatgcgtacccgtccgatctgacaagttaagcaacgctggctgactagtcaaaaggatgggggccgtgatgaaacgaaaccagcactgcttaccccgcggcacccggcacggacccccgaaggaatggaattaattaaattctctccttcggggatttttttccattaggtcgaccgttagctttcgattggtctagtcaaatttttttatttaaaaaaaattaattaaggcactctgatgcttttctatcaaaagggagatgaataaatattttaaaaatgtttaattcctttttaaacaggccaaaaagtttaggcttatattttaaaaagtttcatcgaacttagcgcactaaaatcgatataatctctccaaattttgcaggccttctccattgtaaaggactaacttaacctgaaaaaatgccaacgcttgttgtttttaaaatttttcgaaattctgactttttcattaattatttattattttgcaaaattaattcataaatattttttagaacgtgctctgaaacgcaccaaatgttaattaaaagttaaataaggctctctgatgctttttctatcaaaagggagatgaataaaatttttaaaaatttttaattcctttttaaacaggccaaaaagtttaggcttatattttaaaaagtttcatcgaacttagcgcactaaaatcgatataatctctccaaattttgcaggccttctccattgtaaaggactaacttaacctgaaaaaatgccaacgcttgttgtttttaaaatttttcgaaattctgactttttcattaattatttattattttgcaaaattaattcataaatatttttttagaacgtgttctgaaacgcaccaaat

SEQ ID NO: 17758 - DNA, 1951 bp, Heterodera glycines
  unsure (1)..(1951): unsure at all n locations
aaacatgattccctctaaaaaaattcattgataaactttaataggttaaatttaaatcttaaaattaaaaaaataaataaaaataaattttatatttaaatcactcttaaacattctttaattaagtttaaaataccataacaaatttgggcattctaatattttagtttaaatttaaaaattaatagtttaaaaataagggattataaattcttggttaaggttgtagattttgccaccttatggggcattccctttttgaaggtcttaccccaattttgatcccttttttaatccttacaattatttttggtacttttgggatcgccaaaccctgtttttgggagtctcaacccatggtactctgaaattaattataaaaatattgaaatttagtaaaaaaaaaaaaaaaaaattttttttaccaattttaatgacaaaaccccatatacaaattgtcacattttgatcatttagctatgccgacgatacatttgcctattttgactcgtcaactttgactgtggcaaatacggaatttccgaacacgacctactgtcgttaccaagactaccggcgcccaccatgctcactgatcagtcagccgatcagtcgccaagtgtggggcgatgcgtttgagactgtctgcgacgacaattacgaattccaagacaaatggtggatcattttggcatttcgtctcgtttttgtgctcatttttgaggtggctcattttttttataaattttaataaattcattttaatttaatgatttaaatttttcaaaagaaaatatttttgttaacagtgtcacttcaattttgaataaatttttaaaataatttttaatgaaaaaatcccctaattatttttttaaatgcatttttcctctttttnagttggtggtcctctcgattaaagcattatttgcttatgtaagtttttgatatttaatctaaaataaattaattgtttgaaaattatttcagttgatccctgacatgccgactaaggtaaaattatctaaaaatttataataaaaaatgacaattattttttgttttactatatttgtatttatttcagattgtcattcaacttcaacggggtagcctaaattaataattttatatttaaataaaaattttaaaaaattctaaatttaagagcgttttttgatgcgccaagcaattctccaacgccgagattcacccgaagaactaaaagcggcagatttggaggaaaaggaattgtcacaattgacaactgataggtgatgaaaaaaaattggcaattttaaaattttgcgaatttgcttaacaaaattcattaaaattccaaaaaaaaaactccctggcggcatttaaaaaatgtaatattggagtgaaatcaattcctgtcactattagtgccgattatctattttggattacaaatacttaatttaaaaccgattttgggcataggcgcaaatgtcgggaacagtgatcatttctatgagaccaaagtttaataatattttagtgaaattttgggtaaataatgggaaacgggaaatcattgtggtgtttttcgttccccacccccctcgccgagaatttttaaaatttttgtcacaaatttttaagtaaataaaagttttcgaacttggctgttgaaaaatttttaaaactaataaagtaatttttgctttttttcccaaggccaaagcttggcggcagttggcacgacattgactcgctggcttatcaagcggatgtttgcgactcacaaaagagccaaccagcggaacaacaacggcggctatcaaatgccggatatgaaggactgttttccagacgtgacgcgcccgcactgtccccccgagcatcatttgttaatgagctgccattaagcatggaggaagctgacaccaatgaaaagatggtgagtttggttttgccgataaat

SEQ ID NO: 17759 - DNA, 1156 bp, Heterodera glycines
cgaaaaaagtttatacaattgaattttttatgtgttttgctacctaaaaagcgttaataaattttttttactattttcgtgcctattttaggatttttctgcctttttaagtgcctatttcgcgattttttgtgcctaaaaatcacatccctatacataatggattatggcttttttgcaaagaaatttaaataaaaattattttactttaatttaagctattattatgagccacccaatttggcaaatcggtctttttaaacgcattaaagaagattcagtcgattgcttggagtgtaagcaaaaaaacgttattaatttttcatcttcatcattttttggtttaaaaatatatttgaatacttttttatactttgaaagacttttttattaatacagaattttttgaaatttcctaaaatccgcaatcctgcgcaggatcctgcagattttaaatgcaggatttgcaggattaatcctgccggatcctgtcctgtaaaaaattttgaattccaatcctgcaacaggatccgcaaatttgaaatttccggtctctagttcatacatattcagcagatggaaaatttcactgcctggtggaatttttttggtagattttatctaaaaaatttaaaatttatttttggacagccttgaattttgaaaattttaaccatatgattatggtatgacatttaagaaattatggaaatgtatgaaaaggtataacagacattgtttttttctttattccattctttgtcacctttcttccacaaatggacttgcctttttttaattgcttgtcaactttctgtccatattttttgtattcaggtactctgtcaatttaatttttcaggttttctaattttctctttattctatcattattgcattttttgagaattctcggtgtaaaaattcaatttaatttaaaattttttttataaaaatagcttttttgaaatatgtgatttacttttttcaatagttaaaagttaacaaaaatatgtccttatattttttgaccttacaaaaatttttaaaattctttagaatttaataaaattttttattttgaattatgaatatttcttaataaatttttatagggaataattaaaaatattttgttaatatagtttaattttga

SEQ ID NO: 17760 - DNA, 1796 bp, Heterodera glycines
gggggggggggaaaccgacaaattaatggtacacacacaccacacagtgtccaccaccaccaccaccggcagcagcagcaacgaattaacgcattttcaggggccaaaaaggggggaggggagggaaagcgaagtgaatggggaggggaaatgaaaagaaaaaggggggaaaggggggggggcaaagaagtgggccaacgaatgccactcattcactcactcactacggtggacgcggcacagggcacagctgagagagttggcacaacgacgcaagacgggggaacaaacactatgggctaaaattaagaaaatgggggaataaaaagtaattaaaaataattaatttaaaaaaataccgaaaagcgacggagaaaaagacaaaaaacagttgttgaaaatatgcaaaaggtagcgaattctaaaaaactgtgctcacaatcggcagcgaaatatgatacagcgggcgaagaactgaagaaaatggcaaaaaataaaataaaatgataaaattaggaaatgcaaaaaaaattattttttattgaaaaaatacaatttttaaagagggataaatcaaaataattaccgaaaatggcaataaattgggaaaatgaaaaggaaggaaataaaaaaggacaaattaaggaagattaaatgagaaagtgtaacacggacagacagataataattaattttttatgaagtgaatacacattaattattagggctgcaaaaaaatgtacaaaaagtgatccaaatatgtacataaatatgtaagaaaaattccaaaatatgtacaaaaaaccccaaatatgtaaataaaatttttttaatggtattttttgggaaagaaattccccgtaaagtatgaaatagccacaaaatgacataaaaattactttttggtatttttaggcaacattttcaaacttattttttctttataaattttcaaaatatgtaaaaaaatgaaaatatgtacaaaaatatttgccgaaattttggattttttttttgaggatttccaaaaatttccataaaaaatactcaaaatatgtaaaaaaatgaaaatatatatgaaaaaaatccaaaatatgtacaaatatgtaagaaaatcccgaaatatgtaaatatgtataaaaaccccgaaatatgtaaaaatatgtaaataaaagtcccggtttttgttcgcaaacacaaaaaagaaactgtttttcctgctatttagagcaaggagaagccaggaaaaaatatatgtatttacataaaattggcagccctaataataactaattaaattaaaaaagaaaatttgatgtgccgttcgtgtcggttggacaaatgtttgttagtcggcatggacccaaccctcgtggaaattgaacaaactccggaactgaaaagcttcattaaatggctttaccaacgtcgtgagtttcttcagaatcatcaaaacagaaattgtgagaaaaatgacaccgacgataaaaaagtaaaattaattaattaatttctgtttaaaatcatccaattattatttaaggaatcagcaattaatcacgaagcaaaatgtgaatcatttgacaaaggcatctcttcttctaaaagtcagttttgtttttgtttttcattttctataataaaatagttttttttgttttgaaaaatcattatttttcctgaaaaggaattgttttttatgattataaaccaatcaatgctatatcgctataagggtttgttttaccaggaaatttaaaattttttatgattttagctttttctttttgactatt

SEQ ID NO: 17761 - DNA, 2082 bp, Heterodera glycines
ggcaagtctacctatacctatatcttttttttaaatcagcttaatttcagctgttgtcagtgctcaaacagaatcgtcggtggagcctcgacggcacattccgaagtgcgccaaagccgtggatgcaggtgttcgtcatcggctgctatgttaacaaccgaatggtggttgcagcgcaagccttgctacctggcaaagcctcgaagtattacacagaagtcattcaacagttgaagcgtgccgttgaacccatccttcccataaaaggcaaaaaaacagcagattatcttcattaataattattttaagtgatgagcgacttcgagattggaatgctgaaagcgatgcgtcatgtcttcccgtcatgcgaacgctcgggctgcagcttccacatggcgcaagcggtgttccgaaaagccagaagcatgggcatttttaatttgttgaacgaagatgacaacgaagcaccggttcaaaggaaatccgttcacaaaacattcaggtgtctttcattagcttatgtgtatttatttgttttttcaatcagatctgttctctctttggcactcattccgccactttacgttcggcgcgctttttgaactattgtcagcgcggcaccgcttggagttcaaggatggctggcgtattttgccaaaacctacattggcactactcaattcgagattgatcgcggggcggaggcatttgaaccgcatgctgatgtcggacactttcttctgcgtcgcactcgaagcacaactcgtaaatgcacctattctgtcatgaaatttatgaaatttttcaattttagcgttcagtatttcccaggcatccataatgacaggcagtggaccaatacaattcggactgcattcgccacaaccttcaactccaaccattccattgtcagaagaaagcagcttgcagcttattccacgctgggaacaagacatcgtctgtcctccacgtttcccgatctcgttttggaatgtatacaccagggctcaaatggcaattgagcgaacgaacaacggcatggaagccgcgcatggacaatttgcaataaaaaatttcatcggaaaacattattttttggtattttcagcgtgagctcaaccatcatccatcattgagtgacttcattgctgcattcacgaaggacatcaacaaacagttggacatcggacgcgcagaacagctccagaaaagcactaaacgacgacaacggtacgtcatcaaagaacaaaatgtggtgcggatccttgacgaggccgactttgaatcggaagaaggattgacaaacgccttgcacctgctcgggatcgtgatgcaaggctttgcggagggacttcacgtccgtggaaattcagagtggtgaagaaactgaggccgatgaaaattgattttaaacattttcatattattgttttttttattgatattttatatattttatgaagatttctttgcttgaagcacttttataataaatttaatatcattatatagttaaaattcaattttcgactagttggcgaaattagttggcgaaacgtcagattttggctgagttggcgaaatgaatgtttttggctgagttggcaaaacgtcaggttggcgagatgtcagttggcgagatgtaaagttggtgagatgtcagttggcaaaatgtctgattttggctgagttggcgaaatgaatgtttatggctgagttggcgaaatgtcagttggcgaaatgtcatatagcccgccaaaagcatggcccaaaaatgaactaattctgtgggttctcttaaaggaagcaaatactgatgaaaacactcgtgcagacctacagcgctggggccgacttcacgcggtgcgcactgtccttggcttaattgccactggcgtttatttatacgcagtaagcaaagaataaaaggagaaaggaactttaaatccgacaacataacataaaatgacatatttttaatgtcaattttgcatattcacaaatttgtgtgcgtacactttcaatcacatttttatatttacactttattacataaaaacattagcgtttacttagcttgtt

SEQ ID NO: 17762 - DNA, 962 bp, Heterodera glycines
aaaaaattttagcttctaaaaaagttattaggaaaaaacctcaaaatttccgacttttttgcaatttcatgttataacttttttggtaattgtctaatcgcgaagcaatagcttagaaatatcttctaaacttgttaagctttcgaataataccaagattattggatttggttaacaaataaaaaagttatagtccgaaaacttgggctggcgccaaaacggcggcgccaaaacgatacagacccgcgaaatgaatgtttttggctgagttggcgaaacgtcaggttggcgagatgtcagttggcgagatgtaaagttggtgagatgtcagttggcaaaatgtcatgtagccgtgacgaaatgttcggccaccaatttttttaatgattttttcgtcaattttttaatttgaattttaagacataatgccatttaatttttgacatgtttaataaatttcctagtttaaaacattttcatcgcaaatttaacccaaaatatatgaaaattttcctggcggcaccttttggcaatgccgacctacaaaaccttaactaaaaattgctaaaacttgagaccggaaatttcaaatttgcggatcccgctgcgggactggaactcaaaattttttgcgggacgggatcccgcgggattaatcccgcattttccaaaaaatgcgggattgcggactgggatcccgcgccggtctctactaaaaacagcgaaatttgttgtcatttaaaaaaaattgttggtacttttgtactttttcactttacgccacctaaaaaaaaatatatttttttaaaatttttctggggttttcggatgcgctgatcacgaatatgacattcatttccacctattcagaagcccggacccgaattcgaacaaaagtcgaaaattaatttttcaccaaaaaggggaaagtattatccaaaacgattcaaatgcacttaatg

SEQ ID NO: 17763 - DNA, 1877 bp, Heterodera glycines
aatgaccattaaatttgatagattaaaaaccataaatggcattttcttttctttttttaaattttgttttttcctaaaaaataaatgccaatttctttccttttattttttaattttgttttttccataaaattcattcactttctcactgaactccgcttaattagcattctgttcttcttgttttcttctttatctgtcctttcacatgataaacaatttttgagaatgcacgtaattagcaaacgcaccggtgaacaatttgaaatgccattcattcggtaatttttcttttatctaaaaattttcgaatttccaaaaactaaggcctgtaacaaaaaaaatgtagttcaaaaagctgccattcaaaatttgtgaatagcccaactaatttatttcaaattccctccctcttctatcttatggtaatcacgtgcttttgccaatttgaagaatttcttttcttttttcaatttaaccattttgtcattcctttttttgaaataaatgtctattaggaaaaagctccattaattcattaaacaataagctttttcatttgtcaaatacttaaattgtgtgggtgggtgggtagtatataatatattctataaatattctgtaggatcagttaacatttactgaaatcaaatttaaatattcatcggcaaaatactacctgcaaaatgtcacctcaatatggtaagtgatagcttatcaaaaagtattttgtaaatgactgtagaagtacagtatccttatacacagtattccgaaaaaaagaacaaatgcataagccaaagctcggaccttttcatttttaatttctgtaaaggctccatcgacttgaaaattgtactttacagtacccattaaaggaaaatcccaattacagccattcatttccaattaccgatttcttatggattgcaaactcattcaaatacaaattttaatatatttgcataatcagatttggtccgtaccgtgtacagcagttgcgccactttatgcttctcacttggcatgctgttcaacgcattcttagtttggctgatcctcaccaaaacgccggcaccgatgttggtctacagcaaattgttgttgaccccatgcatgatggtaaaaacaaagttttcaaattttagtgctctttggtgctttgaacacggtgtatattatgagtaaaaaactgactgattttaagtaggactgcttccgaacttcgggaagagaataatcggagagcgaaattccgcgaaaaaaaaatttgtcggaatggttttcggggagcaataccctcgtcgggggcgaaattttcataaaacgttggaaaaaataaagaaattttctaaatcaaaaaagccttagaaacttgtttcaaactctctcacttatcctttttgaagtgttattgacgttcccgaatcaggccgtgaggaaatctacttttgtgctgttggcttgaggcggactctctcagttcggcccagccaagtttttgatttataacttttttctttgtcaaccaaatccaacaatcttggtatcattggacagctctttacatactctattagtcttacaaaaagcaaaaagattttcaagcctggaaaaaatttattaagaaaaaacttcaaaaatttcggcttttcgcaattttcatgtataacttttttagaaattgtctaattgcaaagcaatatcttaaaaaaagcttctaaacatattaagctttcgaatgatactaaaaaatcgtttgatttggatgacaaagaaaagttatagtcacaaaattggctgaggccgaaccgtgcggggccgaactgaggtaacccagcttcagggtaattgatttactcgactttttcttattt

SEQ ID NO: 17764 - DNA, 2009 bp, Heterodera glycines
  unsure (1)..(2009): unsure at all n locations
gctcggaccttttcatttttaatttctgtaaaggctccatcgacttgaaaattgtactttacagtacccattaaagaaaatcnccattttccgtccttcatttccaattaccgttttcttatcgattgcaaactcatttcaaatacaaattttaatatatttgcataatcagatttggtccgtaccgtgtacagccagttgcgccactttatgcttctcacttggcctgctgttcaacgccattcttagtttggctgatcctcaccaaaaacgccggccaccgaatgttggttctacgagcaaattgttgttgaccccctgccatgatggtaaaaacaaagttttcaaattttagtgttctttggtgctttgaacacggtgtatattatgagtaaaaaactgactgattttaagtaggactgcttccgaacttcgggaaagagaaattaatcgggagaagcgagaattcctgcgaaaaaaaaatttgtcgggatggttttcggggagcgaataccctcgtcggggacgaaattttcgataaaacgtcgaaaaaaaaataaagaaattttctaaatcgaaaagccttagaaacttgtttcaaactctctcacttatcctttttgaagtgttattgacgttcccgaatcaggccgtgaggaaatctacttttgtgctgttggcttgaggcggactctctcagttcggcccagccaagtttttgatctataacttttttctttgtcaagcaaatccaataatcttggtatcattggaaagctctttacatactctattagtcttacaaaaagcaaaaagattttcaagcgtggaaaaaatttattaagaaaaaacttcaaaaatttcggcttttcgcaattttcatgtataacttttttagaaattgtctaatcgcaaagcaatatcttagaaaaagcttctaaacatattaagctttcgaatgatactaaaaaatcgtttgatttggttgacaaagaaaagttatagtcacaaaattggctggggccgaaccgtgcggggccgaactgaggtaaaccagcttcagggtaattgatttactcgactttttcttattttagcagtcttggtcttgataacggcattctctcgttgcttttactctgactattattttcgatttattttctcagctgatcataagaatatgtttaattattttaattctaatgcttttaggacattttcctgtgctttttcacattccttgtccagcccatcccggtaatgaaaattccattgttgtaaaaaacaaattagaaatttcaaaaacacagattgtcgaccatggttaccatgcggtggtacaaaatggcttctttcgtcaaatgtccggcatttacaattataccgtaagctctcacagtacagaaaactctgtagagtcgactttatactgtatataaacgataaatttttatttttcgaatctatcctaatcatccattttgtatttaaccatatcactcctcttaatgttaaaggctaatgttgtctggttccaagtgttattgctgtccgtatgtgccaccactgtacagtttgtgttccgctactacatgatattcaagtacaataatcggcataaattcatatgcgtataaaatatttcgacattgcgaaataagaaaatatttggcatcaaaaatatcatacaatagtgcttttataaccacagtactgttaccgtacacacaacatcacccaattcagtgatggtcatattccgtcacgtctcaagtacattacgggcaccgtactgtcgctgctcctcttcgcccatgtgatgttccactatttctcggactatccgtttgcaaaatacgctgatgagatggcccagttggccatttgggtgcacgaggaggttggcatcaccgacatccgcttctcctcatttacaccggcggtgagtgaaagcgtaccaaatagaaaattagcgagtgaagcgatacggtttttgtataaattta

SEQ ID NO: 17765 - DNA, 1788 bp, Heterodera glycines
gcgttgctgaactgtcgtgccagcaattgctcctcctcgcttcaatgtgtcctcgtcagctactgcaccaccattttcaacgtcgtcatttccaacgtcctgtcgactgcgtggcggatgagcaacagcaacaccaccactaacaccatcaacatcatcgtcagcaacaacaccaccattctcggcatcggcaccactgtgaacagctccgtcaccgcggggtggaagactcagtgggaaaatgtcaaccttaacggaggaaaggaaaatgggcaaatttggaggggcattaaccaaaatgggcaataccaaggagcgaaagcgaacctaggtgagccagggggcagcccctacctaggcgaaagggaaaaaacaaaaaaaatttttttggttggcccgttacgtccctccacccgttttttccaagtatgtgacacatacattgtgcagctactgcggcacccgcacgcatgacgctttttttaaaccgtatggataatttttaaccgaattttccggcatttttttatttcgccacgcatttaaatgttaagccttgaccccacctgcaaaagttttgccggtttggctttcgaactgttgacaaatgacgttgatgacgacgatgtggacgaggaagaagcggtcgattgtgaggcaccggcaaagtcgaaagaaaatggcattttgtcataaaaatttaccggaaaacccgaaaaatatggagcaaaaactaaagacagtgtttgaaaatgtagaaaaaaagacaaaatataaaaataattcgcaacaccaatgttttttaatgtgaaattaaaaaaaaactcgcgtaaaaatgcaaaaaatttatgcaaaattgcgaaaatataaataataaatgctctcatcttccgccgatgagtcgggcacaatttgcacaactcatgccgaagctgcagcagcactggcactgttactgctgttgaacttcaccgagtcggccaatgtttgcagctgtgcccgcctgtacttccagaaattgtgccgaatcgggtcaatccgctccaacacatccaaatactaaaacaatggtaatacatgaacaaaaaaaaaatgataagcagcaggaaaacggggagccaaacttaattccggtttaatttgaaaaaaaactagggatgtaagtgaaaatcggatatttttaggggaggaattttttgaattcaaaaatttttgataggtccgcaaaaatccatgttctagaaattgtttttatatgcattcgtattgttggtatttcaatgaatgaatatctctactatctactcaattctccactccaaaatgagtagattttatgtgtacttaaaattaattaaaaaaaaatttttttttttgcgattaacgcccttttggcacgaaaaataacaaaataataatttattaataaaattccaacttcgccacttttttgtgccatttctgtcaattgttgctcatttgcaaccgcattttcgcgcattttgtccgcaattttgtcgatgagaaattggaacagatgggacgagttgcacggcggctgacgagccaacagttcgtcacagcagtgcacaatttcgggacggtcagtgcccaacggttcattgatcagaatgctgaaaaaattttggcatagaccatttatgtacctatttagttttcaatttttttccattccatccgtttaaaaccaatttttcgtgtggcattttgttttttggctctgaagccaccccccccccaaaaaaatgtcagaaacaatcgaacaaa

SEQ ID NO: 17766 - DNA, 1674 bp, Heterodera glycines
ttgcaaaacccatctcctgctcgctgaacaggtcgaaccgctggaccacccattgtcttaaaacaggaaaaaaaaatgccaaaatcatggaatagctcgtcctcacacagcacatcaaaaaatattggaatttttacttttcggcacccttttttattgcatttttaattgtcctacaaaaaatggacctgtgttgccatgcgtggtaattcttcggctcgtcatgcaattgctgggcaatgaatggcagttcagcagcgtaaatgcccgactcgtccaccaatgttttacgattgtgcctaaaagcggcaattttagtgagacaattacgaaagaaagttcttcgaacttaaaacggaccaatttggcaatattttagagttaaaaacgaatcaaaacttggtaaaaaacaaaattgacaaaacttggcattcctttgggtttaaaatgggctagttggtagttttctatcatttcattgtaattatccggctaaaaatgggtaaatttggtattttcctgattaaacgaatcgatttggtatatttggggtttaaaaaaacggaccatggtaattaccaggacttgaaaaagaggataacttggtaattttttggatttaaaaacggaccaaacttggtagttcttcggattttcaatgatgatctcctcacagtagcgcagttcttcgctcacatccttgttcaaagcgcgcagaatggcacggcgatataaccgaaaaaaggaaattttgcaaaaaaaaaaaaatacaatattttggaaaatccaattttcttaccaaactgaataatttgcggggttttgtgcaatgcatgtctgtgtgagttcgagtgtccgctcactgagctcattggcattcattacggcacgcaaatacgcaaaggcatcgtcaactaaatcaaaaaaaattttcgcaaatttatttttattggcacggacattcctcgctggtggcaattcggacaacggcattctcctcagcactgttgtaaattggggtcacgtctcgccattctggcctgtctcggtagagcagcggaatataaccaacggaagaggaattcattccgcgttaaaattttcagatttgtaaacggtcgaaaaattgttttttttattattattaaccatttttaggcacatattttatgaaattttcaatagaaccatagtttcaacacagtccaaatccatcattttgttggttgacttttttgcaaggaaaaatttttttaaattaagttatttggcatttcattttggcgccttgtttatttttcaaacaaaaataaaacagcaactaataatttgatgatcaatttggccatttaacagaataattttaaatgatcgggatctttatccaatccaatttattcataggcacgagattatagcagatttacataaagagacacacaacaatacatacaaaaaaaaaaagaaaatttttgaaaattatatatgagcacggcaaaaatcacaattcatcatcgtccacgacgttgtttctccggcttaaaaaaggccatgtacacgccgatgaatgcgaggaagaacacggaaatgcacgcgacgacaatgtaattgccaaatccgccgaccaatgccgcgcgcgtcggagcgtagaacgaggcgcccagcgacagctct

SEQ ID NO: 17767 - DNA, 1216 bp, Heterodera glycines
ttgtgtactgaaatgacccttttctttttgctcttttctcttcaatccctattctcaatcgtattgacttagtcggaaaacattccgaatcagtgtgatattttaattggtcagtctgatcattgtcatcccaatccgaatgatcagagattgtgccttttgagctgacaatgaatatgccgttcctgtgtgcaaatcagtccgatcagtttcagatcagaatgtgccctcctctttttcggttgatcggactgtttgctgtcatttccggtgattgttcgtctgtttgctccccccccccacccacctgttcgttgtttcggtcccatccttcgctggccaaccaaatgattcgctttttcatttgtgtccgtttcccttttctcatctcttccgtttcctttccttcgattgtttcgtccgattctgtcagtttcatttgcattgccacctgcgtaattcacttgaataagtccaacttttcctctaaatttgcctgttgcagaagcggtgcgatgtattcggtgccgacgaaaagggcgacgacgcgggcgccctcttttttgtccgattggagcctaattaattggagggagggaattttgttttttaattaatcagtttagcagcggggcataaataactcaatgtgccgttttctttttttattgcgcaatttcggcctatttttaacccccccctcccccaatttcgcaattgctttgtttggccccatttttgctgctgatttgagcatccatcgctcacttcttcaccaaattggcgattgagtcgcgcaatgattcgggcttcatcgacactctctcctcaatggctatgcaaatgttcgcccttcgcgcctcctttttgaacgcatccgcccccaattcgccgtattcatccgccgaataaaccttcaaaaaggcaaaaaatagaagcaatttagaagataaaactcggagtgacactgaccagcgaaaggtaagtccagctgaaatgcacggcgatgtcaatcatcgcccgtgcctggtaattgtcactgggcaccgttctgaaattccctttggcacagttcgctaattaattgcgttatgctcgagagcgtcggcgtcgagtcgaaaagagtttcgctttttttttgcaatttagagccgcgattagactttcgcttcgagcataatttgccaagatttacctcgcaaaatactcaaaccga

SEQ ID NO: 17768 - DNA, 2103 bp, Heterodera glycines
  unsure (1)..(2103): unsure at all n locations
cccaatttcgaattgctttgtttggtcccatttttgctggcgannngagcanccancgcncactncgncaccaatttggcganngagncgcgcaagganncgggcnncancgacacncncnccncaagggcnangcaaaggnncgcccnncgcgccnccnnnnngaacgcanccgcccccaanncgccgaanncanccgccgaanaaaccnncaaaaaggcaaaaaanagaagcaannnagaagaaaaaacncggagggacaccgaccagcgaaagggaagnccagcngaaaggcacggcgangncaancancgcccgngccgggnaanngncacngggcaccgnncngaaanncccnnnggcacagnncgcnaannaanngcgnnangcncgagagcgncggcgncgagncgaaaagagnnncgcnnnnnnnnngcaannnagagccgcganaagacnnncgcnncgagcanaannngccaaannnaccncgcaaaanacncaaaccgannnnngncgcnaaggnccgcannngngcnggcnncaaaggannnnnncagcaaanngaannngagaggcnnaagcgaanccaaaagttgttctgattacctggactgacttggacaattcgaaacagtcgaagcaaattggcaatctttaaaaggaagaaacagttacagtaagaaccgttcgagggtcagtcggacctgtacagtaacggatgagtaactcgcgcccaccaccgccaccacactcttttttgggctcgggtgccgcagcgtcggctgtctaccgtctgcgcagctgtaatcagttagttcggatgagccgatcatttcacggacgaagtcgagcgattggttaagcgcataggcggggtttgaacatgaatcgaggatcaaagcaccctgaccaagtcaagtgggcaattcggatcagaaaacaagtccgatcactcaccaatttatagccgcgtaggaagtcggtctgtgcgttgatcatgtccaaagcgtagaggaaggcctccactcgatggacgcccctgaaaactgggcatcactttgccaattcttggccacccctctctgtccggtcccgctcctccaagtcgacaacattctcgactgacctcgtctcgaatatttctccgcagggcgaagtgccaccgcccttcgcgtgaacggggaatactccgccgattatcaaatccccggggattctcagctggcgcatgttctccgtcggttgtcccccgaaaacgcccccggcaccgtccactgcttttgccaacatatgaacatgggtcaaagtgcgaagtgtcatcgttatcaaagagaacattttgagcaactaatgatggggtggccgacaaaagtcaaagcactttttagaataaaaaattcaattaaaactcattaagttaataaacccaaaaacaaataagtgaaataattggcccagtgctaattggttatatttgctttttaaaattggtttttattttcactcttcagcatttgcttctgagcatcttaagctttgctttatgaagagtttgaactggcaacagatgcaaaacataagtcataaattaatgccatcattaaaaaagttcaaaagaaattaatttgtaagcattgaattggacgaggcacacatttaaacttttttacgattggcagaaagtcatttgttagtatcgcttatgggaaaagcggtgggaaggaaatgaaatgaattattcggtggagacaaagccgagagagagagagagagaaagagtcggtggcgtgggattgtcctttgccctgccaagctcaatcccattaagaatgagcataatgtgcggtttgaagggggttattacataaaaaaacattagtaaatggggggggggagaaggaatcggatggagggagtcaattggcggggtttttaattcaaattttaaaaacgaatgatttctgtaattcattagtctcttccattcgctaattgccatttccttaattgtctcacgtttatgttgaagctgaaattgcccaattcccatgggaataatcaaaaaaaacattaataatcaaagtttagcttttcggcaga

SEQ ID NO: 17769 - DNA, 1009 bp, Heterodera glycines
tgatcagacaaatgtgtcaattccaatagatgtgatcaatgaaagtgccaattcactgatcagtccattagttatgccaattgcacacagttctgcagctgatcaagcccatccaccattgtcagaaggtacaaccaataccaatttgacaagcgataaaagtgatcagacaggcccagaaacaccaaacagtcaacggaaacggtcaagacagcgaaagcaaagctcaagcaatatccagcggactgaatttttaggatttgcatcaacagaaacggaaatagcagttatcaaacaaaaagatcaaagaaatgatcaaccaaggaatcaaagaaatgatcaaccgagtgatcaaagaaatgatcaaccgagtgatcaaagaaatgatcaatcgagtgatcaaagaaatgatcaatcgagtgatcaaagaaattatgaattcaatgagcaacaaagttatcagatgcttggactttatgatcatgatgatcaaaatattgaaccaatgtttgttgacacaaatgcaccacaaatgatcgatacaagcgacttcgatcaaattgctcaactggctggtgacgatttgatgttcccccatccgatggaggtgtatgacgagccgaacaatgccgaagaacaatttgtgatgatcccggtcggaaacagcacacaacaaattgcagcagaaagtgttggcaaaacaaaaagcaattcaaaaagtgggcacggaaaaagccgtcaaagtgctgatcagagcatgcgcgactatgcttctccatcaattcaacagaagcaaaaagcgggtcggccaaaaaagccgaaaattgacgagaaaatggaaaaggccaaatcaaaaatgggagtggaagaagcgctgatcaaaccggcaaagcacaaatcaaaaatgacaatgggaaagaccactgatgagaaataaatcaataatgattacggaaaggaccacgatgaaaaccaatcaatggtgaaagtgagagatcaatgatgaaaa

SEQ ID NO: 17770 - DNA, 935 bp, Heterodera glycines
aaactttagatttaatagaaaaaaacaaaaataaataaggactttaaattcaaaataaataaattatcaaaattgaacaccctggaaaattagacaaaatgtcataattaacaattacccaaacacctgtaaaaatagttaatgtgttcattttcttttgtccaagtccaattttctggaactgccgaactttttttccaacttttgaaatattacaaaatatttttctttttatttgaccaactaaaaatattctttaacgatttttcacttgttacacatttggggtgtaacaaaagttttgtcccccgaacattttttctttttaaaaatcatatctcctttattttttcatatatttaaataattccttttttattgtgtatcctttgctgccttttctttaattttatcttttatctccatcgttaaacttttctattctctgtcaattttttcacccttttttcccgactatgccaaaattgtaaattagaaaactaaagtttctcgaattttttaagcttaaaaacgaaatctgaataacaataaacgaagtttttctgtacaatttagaccagtagaatccgaatatggtcttaaatctggcctatctttgctacctgagcttgtactgcttcaacttcatgcatgaagttggagctgtacaggctcagggggaattaagagatgaaatctatagccatactcgatctcagcgtggtcgatttacccagtttaattaaattcggaatttccaagaccacttttaaaacattttgttacttggtggtcttgaaaaatgccgtttttggagaccactttcagactcggtcctccaaaaattcaatttttatgaaacaaaattttatattttactaacttttctctatttaatcactattaataggaaactcaataatgataataatgcg

SEQ ID NO: 17771 - DNA, 1102 bp, Heterodera glycines
  unsure (1)..(1102): unsure at all n locations
ttttttcgaccataaggcttttaattgtcgccaccgccttttttgtgtcccnttattctttcccatgcaaataaaatgaattatttatgaaaataattttcgaatcaaagtctattcattggagtcaaaatgcggtatttattattttcaatttctgatttttatagttatttgttttaatatgattttgtttcaatttttatacaattatttttaattcaaaagattacttcatttcatttttgcattaataatcatgtccctgttagactgtaaatatgagttagagaaaatgaaacaattgccgagcatttgatgcctgtataaatttcgattaataagtatatcttcgatttgtaataagtgttgattttctttaagtcgattttctcactacttaattttattcaattatagataaagcctcccattattttcaaatatatatcatataatttttttagtttatatagaatttcgaaaattattttaaatttgtaatatttcatttaaatttgcaacttggacctagcctttcattacctttaatgaatatggtatattattattttctaaataatttttttatatttatttatttaatatttttttaatttccatatttttttatttattgtataactaagcctcgaattcccgtagattaatttattaaaaatgcggtcgttcaaaactgacatctgttgtccgtttgctccgattttttgagggtctatgaagcaatattttaaattctataaaattatttaagcataattttttttattaattttcttgttgttagatgaaacattattttaaaattaattttattttttttatttgattttatacatttattttaaaaggaacaattaatttttaacttgtcatatgttttattttctgctattagagcaaacaattattgatctttttcattattattgacaatgaaataaatataatgtaattaaattttttttgtttatttcattaactaatttaaaaatatgctaaaattttttcctgtaattaggtttcattactgttactctaatttcttataattacttttttcgtattcattaaagcaatttta

SEQ ID NO: 17772 - DNA, 1742 bp, Heterodera glycines
  unsure (1)..(1742): unsure at all n locations
tgtaagggatggcccaccctaaaacaattttcattttcctcagcagtcggactttccactttccattatcgcttttcttatctctttcatcnccgccccttttccgttcccttcacacttttcctttccccagcgatcagtcagtcgtcggagtcattggatttacaatcgatcaattaattcacccttctcatatcgtccgtccatggaatatttcgatcacatattttatccggagaataaattagtcttttaacatcgaggcaatttgggggatttaacatcgatcccagggcccgggattcatcctcccaaatcgtcctccccatttattcggaagcggtgagtcgtctgggggacccacacgcctccctcactgtatttagtttgttttttttaattttataaattttttaaacagaatttcttttaataaatccatgtagcttgtgacccttttttccgcacgtcgattcgaactgcaaacgtttgttcattttagcgtaacaaaataacttaaaacatttttttaattttaaataattttttcttattttaatgttcattttaaaatagttttatttattaaagaattttgaaaggataacttatttttaaattatcttcattgcttctgtttatttatttttataatttgttattaaaaatatattcagcgtaaatatatttaatttcaaaactaataaggtcataaagtgcaaaattcgatttcttggactggaagttgtttgtgagctcgaccaggtgtgagtgttttgatgaattgcagatcattgtcgattgtcttttttaaaatttatatttaaaaaaaagttcatttttttctttgaatatttaaaagttttaaaaaatatatttaattaacacctaaattgcttaaatactttaataattttcttatatttatattttagaaaattttatgtataaattaacatttgattattgttaataaaattattggacttttatcttgccgcaagaagcagcaacacagctcggtcaagcactaaaattggctatttccgcgctcgtaaaaattatttaaatatttattgtattattaaaaagaattaagagggtcctgacggtatcgacgtggcaaaaatgctttattggagtagttcatttattaaaatactcgttttatattttcatccattattaccattttttggtttatatattcattaaaagatattttgaatttcttcatttttaaattattttattcttaattttttttataaaatttaattttcaagcgataacatttaaaagtagaaatcgacattttgaaaaatgcctggacctggacctggatttcctggacaaaaatccaggaaaatccaggtccaggaaaaatccaggctcctcgagacctggatccaggcctggacctggatttttttaaactcattttaaaaatcaaaaaaatgtttgaaaaattcaattaattgcttgggaacatctaaaaatatctaatttacaataataatttgcttttaaatatatttaatcattttttgaaaactttaaaaaatatcggtcacttgaaataataaattctaaaattttgtccaggaaaatccaggatatttcctattttgcctggacctggattttttttcacatttgaccatggacctgcaaaaatagtagaaattcctaactgtataaattttattatatgctaaaacaaacttacatttttatatacc

SEQ ID NO: 17773 - DNA, 2888 bp, Heterodera glycines
  unsure (1)..(2888): unsure at all n locations
aaaacatgacgtaactttgctaaagacaatataattttacatccttggtactattcgatagcccagctttttctctattagcctggaaaacttcaaataaattataaaatttaacacaagttatgcagaaatagtacttgttttcatacaaatttttttatcgaaaaattcgctaaaatggcggattttatgaaatgcctaacaccgccccnaaggacaattggacagtgggcatttggacagtagagtagattttcttttttttgtcgatttatatatatttctttttttatggcgtatattcctattttataatcaatcatttatcgctggaatttaaattcttctgaaaattgaatagttaataattttttacgagaaatacattagttaaaacgaaactttttgaaacagattttatcaaaattttacaatgccctccggaaccacccctttttcacttccgatatttataccagtccttatggcaataaaaaaaagatataataatatattttctaaaattgtcattgattttgttggtataggcaataattttgatatatttctttttaattgtttaattgattgttttttatttcgtgaatatttttcgcatttatttttccttttcctacaaccacagcaattgtattaagtatttatttcaatttttatttaacaaataattgtaaaaaatataatgaattgcttttcgcttctattcgttttggctgcaataattgttcattttaaaaaaggtattgcaataaaaatttgtatgcccaatggtaaccctataagtgaccaacttgagcttcggctggaaaggcgacatgaagtttgggcaccgggaagtttgggcaccaggaagtttgggcaccagaaatttgggcaccgggaagtttgggcaccagagggagggatttcaaaaaaataaaacaatataaatatataaaatgttatataaatcattaaaatttagtaaatttaacaacccttgtgctcaaaaatttctatgttcttgaaaattaaaaagtttttatatggaaacctggcattcttattatttagtcaattcttacggttgtttaaacgtagaattaaacatgtactggttatggacttagaccctgaataccgtcttagttgggcccgaaatgacaagagacccgtctaatactatttaaatttataaattttaaatcttgaacatactgagccttgtaatgatacaaataatacatatatatgtaaggcattttatagaatgaatggtaatcagtttagcaaaataagcatgcttaatcgagtgaatattcgttaaaaaaactttctattcgtaacttgattaaatttactatgcttttaaaattagaatggatgcaatttataaacaattaaaaataattttatttttaaaatcctaaatttagtgtccaaacttccccggtgcccaaaatttctggtgggcaaacatttcgggtgggccaacatctccccccccccccccccctttttgagtattagtgcctattttctaggcttttatttttagcgcctaaaaagcctaaaaaattttgaaagaggctatttttgcctattttggcgttttgccgaaaatttgttaacaaaaatgcaataaaaagaaaaaaaatacacccctaagaatcgatttttttgaattttaaaaatacatccctaagcagagattcaaaaatttctgaaaataaatcccctaagaaattaaaattttctcaaaaatcgtctttaaaaatttttttggacaattttttgaatttaaaaaataatgtaactcaatactgaactgacttatttttttaccatttgaataaaattttttcattttacacccctaaatttgagactttttagagcctattttccattttttggagcctattttgggggttttttagagcctaaagcctacctattttagcggtttttagtgcctataaattggagccctagtcatgtcaatttctgcatattttttctgatttaagcaaatttgaatttaaataaaaaatgcccaattttttaaatttttaaacataaaataaccaaaatttttgagttttccatttcaaggacagatactttcaatgtttcccttttcaaggacccatccaatgcgtctcatcgtacctttgctggctctgttcttctggaaaggcgcagtttagtgctgattgctggccatgcctatcaaatgttgcacggcattgatgaagtgtgtcgctaacagaaataaaaaattaattaaattttataaaattatgtcatttttaaaatttattttagcgaaaaactgatcaaattgggacaattggtggtgcttcattgttaaatcgaaatttgttgtccaatccatcaatcaattggcaagagcttattagggaaacgaggtgggggcagagaaaaactaattattttaaaccctcattttttcaaaatcaaaaattttatcccacccccaaattaaaagctttacataaaaatatatttttttgaaattatcaacattttttgctggctttttaaaaaaaagaaaatgccgccgaaagaaaattttttttgaaaatatacatgaatttgtttaggaattaaaaaatcaccaaaaaaatgttacacctttagaaattagaatttttatggaaatatagagaattaggaaccctgtataaaaattatttttaaattattattattttttgtttgctagggtgtcgctgaccattcgcaatgtgccaatgacaaagcgtttgccgtcgatgctgaaaaacaaattgtttggtggtgcgggaaatcgttcgaataaatgatctttttcttgaatgttttgtttcttataatttattctt

SEQ ID NO: 17774 - DNA, 1391 bp, Heterodera glycines
ctagtgcatttctcattgtgaatgtcttcatatttaaactcattcacatgattgtaaatgcgctggtttgaccatggaattgtgcgctaattaactaattacccaattagcatttcctaattcggcgtaattcaccagcgttttgatttgacatcaaaagccactcatcagaatattaagatactgtcatcatcaggccttctttttatgtaagaaaaatcgcgaaaataaaaatgacctaaatagacttagaatcaacttttctaattgttgatatctcatttagcttcaaagggctttcgatttttcatttttagtctaaatatgtttttaaatgatcttttattgaagcaacgatgactttcagttcgtttccgtgtatcaaaaaagttttgaacaaaactgaaatttgaaacatttgaattttcgactttttcttcaaaatctggtctgggcttcgcaattgattgaaatggatgccggattcctgatcagctatggcacttttatacgtaaagtaaagggtggacagaaaatcggagatgggtcgaaaaatttaaacattaaaaatggataatttatacaaattcgaatataaatgtgattttttgaaaatattggattttggctttttgtttggtccgtgatttcgggtgcttaaaatgaatatcaaattcatgaatcgatctgtgacccaaacagctcagtccttttttattgtctgacctttttgagggactctagactataagtctgccctaaggcccccaaacctttgcttttcatctttcgacccctattacttttatatcagcgtttaacatttattctgttttatatacaaattgtacatacattaatttaaaaggctcattagaacaacacaatggacaaggacaaattatgtcgtatatacagcgatcgtttttcactccgtcttagaggtgttgccactccagtacgagatgttgtcctgcaacagtcccatgatcgtgacggactccgcgcaaatactctcgcccgttgtctgcgcatcggaagtcgcgtcgtcataagcctaaaaaaaattcgagcggttaaacttgaaatacaaattttctgttcatcaccagttgggcagtttggcaagcatcggctggtgatttctgcacttcgaattggagaatggcaaagttcagcgccacggtgagacgaatcggatgcattggccggagtttgttcttggcgaggtcgaacgcttcttggtacgcttgctttgccttctctgcaacacctgaaaattgaccaattgttgatccaccgtttgttcaatggcttcggtccgtcccatacattcacaaggtgtgtctcagcccaagggccatacgacggatgattggaaggggggggtg

SEQ ID NO: 17775 - DNA, 1682 bp, Heterodera glycines
ccctagtgatcagcgatcccgaaaatcactgcctgaaaaatcaattttggttgattatttcgtgcaaatctcaaaatttttgtgtttcgttcattttttgccatttttatacgtccgatttatttaccaatttagacattatttttcacaaaatgcatttgatcactgataaattatgatcgatcgatcattcttaattaatccatttcttcttctgcggctgatcactttttttgttgttttgtccgtcactaattgtcagcagaagacgccacttttgtgatgctttgtcccgtttcttctgccggtggcggagacaatggccttaattaagcgcaatttgaattatttaaacaaaattaaatgcctttttttaattgctcacccaatgcaattagtgccagcaaaaagccaaaagtacacattgttacaattgttgtcccaatttccgtctttccaatgaaccgccgcggactccccaataattttacaacgcttcattatccaactgttgtcccattcattttccttttctttggtcaatgtcagcttttcctttgtccattcgttaagaaattcaaatggcactatttgcattgactgcacacgaacagaaaaatgaatttggtaactgacggaagaaatggcattggcacggagaaaatgctaaacaattgatttgaaacggcgacattttgttctgctcccccgcccctcgggaccacacctcattgaaattgttgacccaatcagtagtgttcctttgttcgttgtaatttgcgcaacgcaatcgcttgggttggccatcttttctcggagagtgcaaccatttggacaatgcttggccagcagaaattgttgcatttggcccatcaaaatcatcaccaatcgaatcaggcaacaaatcataggaattgattgaaaccaactgattgagatcagtgaaaattgtcggcgaagtgcgacgaagcaaatagtccaaatcatcaccaccggtaaagcgcaagtggcgaatgtttgtcgaaaaaattggccaaatttcacgaattaaaatgtcccaaatccgctggccatccgtggtgtctggtgatggaatccacaaatataaattggtgcctcttttgtcgaaaatttggtgatttgaacgaagaaaagcgatgacggagtgatccatgtacctaaaaatggaatgaatgcttttattgccataaatctctgattccgaattactcaatctgaaggcgcttaaaacggattttgctgggcaacggacgatcgtcgggcaatggaaatgacaaagatttgtcatccatttgtacagacagcttcggttcatgtcctttgtccttgtctattatgatcgttctccaaattgtcaattcgcttttggcatcgaaatgtttgtccaccaacgcattgaaacgtggcgaaagaattgccaatttgaggccgagttgaggacggtcaaaactgggcaaaatgtccatccaaacgtcgttgcaaatccaactgaaatgggaaaacagtttagctaaataatgccgaatttagacttttaaaaatgccttaccgtcggttcatttttggcagcaattagcacaattaggccgagttccgaatgatgtcacacaaatatatagcagaaaaattaatttcgttggaaactttttttataatgagag

SEQ ID NO: 17776 - DNA, 2979 bp, Heterodera glycines
atcatttttagggtttttaattaaattaaaatatttttcttttttaaattttcttttcaattaaattacgtatttaaaaacatcaacaaccacaacaggtgttccaacgttatttggagcttgtccagcaccagcaacgcgtttgctttgccggcgatgaacaccaacagcaaaatgacagtactaatggttacagtaacaacgagccagccgggggtaattttgccatcgcatttcggcacttttttcttgacttttttctggcatacttagaaatttattagctggatttttatcactatgattgaaatttccggtttttgttttacattttggcactttaaagcttcatcattgatagaaaaatctattctattttggcatttttatagagggcattttgtatcctgcataattggaattttggcttaattgatcatagttggacttctcctgttgcttttgccattctggatgaattttcttttcacttaaacattggtatctttggcctaatcattggtcggattttgtttttatttttagcatttttccttggcttaatcatagatgggctcttctcttcccatttcggcactttttggtttaattacacctatcaaatgcatttcctgttccagcttttccgttccattcttttggccaattggcgacagccgcttcttcctccacacccacttccaatggcttttcctctccatccgcggcacaacagcagcagcaacaaccatctccgtttctccagccgtcgcccgccggcctcatggcagccgctgctgcggcagcggctggcaccaacaacgacggcacatttggccacctgttttcgggccagaatatgttgctgaacagtttgatgggccaacaatcggctagcggcggcacagcatcctctacctccatgccgtcgtcgcaaatgggcgatgccgtgccatgctcatcctcctcctcgtcatccgcttcggttccgccctcatccgccggtggcacagcaacgaccggggcggctggcggcacaacaatgggcagtggacgaagggtaattaatttttttaaataaaattccgaaataaaatttgccaattttgtggcaggctaatcgcacacgcttcacggacttccagctgagaacgctgcaacagttctttgacaaacaggcctatccgaaggacgacgacttggagatgctcagcaaaaaaatgggtgagtgattaaattataattctctttgatcactcttgctgatcaatttcaatcctgatcgctctgtccaccggattttttttaaatctgtgatcagttctagttttggttttctaatcaccttttttcttctaatcactgatcatccctcatttttacgcttgaattttcccactcaaaacactttttttctgatcactttcattggacaagtccttcttttcaatactcgttttgcaataagtaatttgcctcttccggtgatcactttatcactcttttattcccactgatcagaaacttttttgtctttctaattaccgatcacgttcacttggctctattgctgatcagtgatcactttttgtcaaaaaccatatcaattcaccattgctttgctttcataacaggtctgtcgccacgcgtgatcgtcgtttggttccaaaatgcgcgccaaaaggcgcgcaaggtgttcgagcagcagccccacctgctaatgcatgccaatctggcagccggcggcggcattgccgggcccaccgatctgccagccgatgatcagcaacagcttcagcagcatggtggcaccaacttcaacccgttcaacaatgccaacaacaacagtagcgtgcagcagcagcaacaacagcaacgctttgtgcgtacgccgtccgccaatttccaatgtgttcgttgcaaattggtgcggcgtttaattatggctaattaactaattaattaccgattggagaagttttaaaaaagcataaaggaaggcattagtagttttctatcaaaaatgataccgaaaaactatttgcgcttgtccattatttgtatatattcatggttttggctgcaaattgatgtaacatttaattagggtcattaattaattaaatgttggaaaaaatcaattaaaaattctgggcggactcacaatttgaatattttgaaaattatcatttttaaggtttttaattaaattaaaatattttttgattttaaattttcttttcaattaaattacgtatttaaaaacaacaacaaccacaacaggtgttccaacgttatttggagcttgtccagcaccagcaacgcgtttgctttgccggcgatgaacaccaacaacagcaaaatgacaacagtaccaatggttacagtaacaacgagccattggtgtcttcatcggcccttttggtggacgaacaaaagcagcagcagtacaacagcaacaacaacatgacgacgacgtcgagcagtaacagtaactacaactgcaacacaaccaccacaaccacaaccagtgcagcaacaacagacgcaacttcttctgcagcaactgccgcaacaatgtatgcaatggagcagagcacgcaggagttactgcgccagctggtggccgcgcattgtcaccagaatttggggccaacgccgggccatggccatggccatggcgatgatgatgaacatgaacatggtgctggagatgaatatcatcatggtgatgaggatgatcaacaccacgaggaggtgtgcaggaaatgatgaattttcttttttacataggcactttttgggttttttgtcggcgaattttgtcccaagatttgggctcgaaatcaggattaacagtgcttccaagttttactgcattgaacggttggcgatttgatatcacgaattttctagattttcaaaatttttagagttaaacaaatttttgaaagggaaattgacctcaggcagcaagct

SEQ ID NO: 17777 - DNA, 1456 bp, Heterodera glycines
  unsure (1)..(1456): unsure at all n locations
tctagagtcanntttttgaaaaatttaaaaaataatgaaacctttataatatgtttttgaaataattaattacctgttgcggtgcagtcagtttttgagcagaaatttcttcctcgcggacattcatcttttctggtggcgttcacattaattgtgtcaaaaatgttaaaaacaatgcccgaccaacactgaagcgctacaattaatttatttcaatgaatattaattatttgcttgagtcaattaaataattaattaaacgcaattaggtgcatttgtaattgtggcacttaccgtttactttttgtgtaaaactcaataaaacaagcaataaataaaaaaatgatgtcattttgttactggattatcatttaattattactgacaagcaattccgaaccaaaaaaatacaaaagtaatcaaatcagaggcatttttagaaattcgtttaaataaaaatttacacaaaaatttaaaaataaatttataatttaactatttaagaaaggaaatggggaaggcaatttctttgttaggataaaattaatgggagaaagcaaatcagaagttaaactaatcaaagttatcacataactggttggtccgtcttattattcattttattgctcgtgctctttcctccaattaactaattgggggggggggggagcatctgctgattggaagagttaatttagttcaattgaccattgactatcaaatcagcatctgtttgatcaattaattaatcatttacgatttttcataagcagggattggattaaatatgataattgcatttttattcgaacattaattttcatttttctctaaatcaagtgcttaaccaattaatgaaatttggagaaaatgcaaaggaataattaaactaaagttaaatatagaaaaacgagaataacctaaaatgaaaattcttccttttcaattcctacttaaattttttatttttcttattgcccgtgatcagcgtttgtctaaaacaaattattttaatggctttttctttcaaaaataattgctttcatgatgaatatctgttgactaagcgattggtttcaaattataattataaattttattagttttagaaggaacagttgcacagttctcagccatcggttgcacattttgccgaagaattaaaattttgaaatgttttgcttaataaaaagggaatgtttaaatacatatagccaaatcataaaaaccgataaatttacagacattaattacacctgaatcgccttagcgaataatttctgaaaaatctaaaattggctaaatctaaaaccatttcaaaataaaaaagcgtaattttttaaatttaattttacatttagaaattgtctttaatgaataataaaattgttgcaatttaccaattctcagcgcgtcctttgcaaaaacacttcgatagcttttgattatgtaaatt

SEQ ID NO: 17778 - DNA, 1682 bp, Heterodera glycines
  unsure (1)..(1682): unsure at all n locations
gaaaaaatttcattaactaatgntcagcagagtgaaaattttttgccaactccaaaatttaataatgataattagaaaaaaggcaccgtaatntaatggcacatgacgggccgttagaactattaagtgatcttttgataacattaatattgcaataaactaattggtgaataaggcaatgaaattctaaaggataaatttaaatgaatttttttaatttaataattggactcggaattttgaaaaaaaagccttggtctgggcctggattacatttttaacccttgacctggcttcctgtacaaaaatccatgaaagtcaaagtcaaggaaaaattgccgagacctggatccaggcctggatctgttttttttaaatttgttttaaaaagcaaacaaatatttgaaaaagcaaataatgcctaggaaaatttcaaagtatcgaattgacagtatatttttaaatctatttaccggatctgtacctggattttttttcatatttaacctgtatatgaagacaaaatcggtaagaaacaattcacccaggcaagccaatcgaaacaacctgtccctcccctcctaccttccttaaaaatgtctgagaaatttcactaaaattcaaagcacgagaggtttttccagaaaactttcaattgctggatttattgaaaaaccaacaaaaagaaaattaatttaaccaattngacaaattgctattgtaaaaagctcaacaacattcaaaatctttgtcttacttaatatgataacatatcgcatgagaatgaatttggtcgagcagactttatgcaggaattttaataaataaataagtgtatatttgaagggccgatatttttaggatgctaaaaacccaaaaatggggcggggccttgggaaattaattatgacaattttttgctgaattttttattttgtatctgtagtagtgggctttattcttatcacatattcctattttatgtctttatgaaaaaaggaaaaccctaaaaatattagccctatttccggcatctcacagcggttgacgacgctcactgcgcggtatggtgcgcgcgaagttgtagcggcacacggggcaattggtgtggtcgtggagccagcggtacaagcagcgatgatggaacggatgggtgcagccgagcatcgtccgcgtgatggcgctcacgtttctcatgcgcgcatcgctcgccccgcatatttttcagcagctaaaatttggaagaactcattttttttttgatttttattaaacttacatttcctgcgcgtccagctgccgccctcctcagcttggcatcgcgcagcttcgccttggcactccgggccctcgccgcgtttgctggagtggtcatgctgaagccaaaaaagtgatggaattggaaagacccagaaaattagaaatgaaatttagaggagaataagcgctgaataaatgtgatgtgaatcgacgaatgggaggggaggagagaattgggaatgtgaagagaaggaaggaaaactgtgagtggaaggaaaagagttgtgatgagtgtggtgagaatgtgcgtacattagcaactcggacatttgagtccgaacatttgagccaaaaacaattaggcgtaattgttttggttcaaatgttcgagacgcaaaagatcgagggagcaaatgtcactt

SEQ ID NO: 17779 - DNA, 2181 bp, Heterodera glycines
gggggcggggttttgatttgaattaactccaaaaaattttacaaaaaattaattttttatgaatgatgtgatggctccacattcctttagtcaatgtatcgcctcaattcaattccttttggcataaattacacagattttgtctaaagaattaccaaattttagagatttttggctaattttttaagaaaaaataggtttttggggggcccgcggtgccgataggccgccaggcagattttgaaatttaagctcgatttctaacagatgtttacaaaaaaaaatataagatttttacgataaatttttgttttttttaatatattaaattatcatgatttactcaagcaaaattggaactcagatttgtaacatattttcttgtggcacatttttccaacaaaaaaaaaacttggtgaatgtgcgagcgtagaggtccggcggtgcagataggcgccgccgggaaaattttttgaaaactgatggatctgttaattgtccaaaaaatgataggtttttgcaatttttagagaatttttttaataagatttacgaatttttgggccctgcgatgccgataggaagcgccaggcgaattttaaaattaaaaaaataaattaaaaaagaaaccatcaacctgaatcgaactcacgacagaaagtaatgtcaaggttgattcactaaccactacaccacactacacaccataaccaataataaattaactttaattcataaaaaatttgtcaaaatggttaaaaaaaatcaaaattgtataaattttttgccttttatccatgaatatgtcattcttaggggtgtattttcaccccctgccccccgcgggggtgaaggtcgcgggggcgggggatggcgggggtcagagtcgcgggggcggggacgggggtgaggccaaaaaacctgtcccgcccccggcgggggcgggggtgacgggggcagggtccgaaccctagaaaaaataatttgtccaacgttaaatgaactaaaaaaacagcattcctttaatttttaaaattatcaaagaatcttattaaatgtataaatttcaagttttctcaggcgtactcctcggcactgccgggttcttgagatttgaaaatttcaagaaaatgccaagtttgcaaaatttggccacttttatcatttctaaaaaattttctcttattttttcttctagtaaaaatattaagtttttcccaatttatatattttttacttctaagaaaatatttataaatcattgttttcaaaaaaaaaatccattttttaaattattttactagaaaaaattctaagaaagttagagaactcaaaaaatttccgcttttttcaaatttttcagaggtagggcaatgatacgcggtaggggaacggtggtggaacgtaatgccgcagacagaagctgcccaatgctctctcttcgccctcgggggttgtcatttatataaccacacacatgttggccccttctcccatttcaccttttctcgactcttaaaaagccctcctgctggggctctcgagaacaacacagcggtggccctgcattaaattgcctcgggcggcaaaatttgccgccggcggttggcgacggttgccaaacaccgccgccacccaccccatttcccccggggcgctttctccgccccggcttccgtcccactccccagccacgcggcttccgcctgtccaaccgcgccgccgcccttccggcgttcatagaagagcgaccgtggccaaaggaccaaaaggccataaaatgtatatttatgctgccacatgccgtacccaacacatacatacatcccacatttgttgttcattcgtccgcaaaatgttttattttttggccaacaaagggcgggcaactcagcgcggtgacatttgagtcccgagctccggcgtgctctgtggatgagttaagcccaaagaaatcggacattgtttcgtacccattgggaaaaattgttggtcggacattttgtcgcattggcatttccgcccccatggaatccatttttttatcaaaatcagacatttcgtccaaccccaaaatggcgaaaatctgagttaactccgcccttttatcccagcaggatttcctcggtaatttcaaaatctattgaaaaaataacgatcacttcatggaaatgaagagat

SEQ ID NO: 17780 - DNA, 1485 bp, Heterodera glycines
ccgacttaaaaccctttaatagactctgtggagggtcacaactccgtcctgccaaatccgtcccagtcatatgaagccataactttttacatttatgaccaaactcaaaaaatttaataccctttatgacgtcctaaagtttggttgggacggaattggcggcacggaattggcccacgccgaataactgtgtcaattagcaattattgaaattggcttgagtcggcttcggcaaagcatggattagcccaaaaaggacctttggatcggcgcgggactccgaatgaaatggaagcaagccaatttttcagaaattaaattgaaatatgaattgttatttcctctaattttgtaaattttatcaatcaacgaaatatttgtaaacataaataaaacaaaaaaaatttttattattgaacaaaggtccattttatcttaaaaatgaaaaaatcttagtttaaaaatttgagcgtttaatttaattttaattcaaaaaattaaataaaagatttcgtgttttttaatttttgtacatatgtagtcaagatttatcattagggttaaaaaaatgccaaatatggacataaaatatggactaaaaaacccaaaaaatggactaaaaagctcaaaaatggccaaatatggaccaaaatatggactaaaaactgccaaaatatatgttttaaaccctaataaattccgaaaacgtgtttgtattcattatttgcttaaacagtacttaaaaatacattaaaaattgccaaaaaatgaattaacattaaaaaatgccaattttttaaaattaaattctagcttcacaatttcaatccaatacatctcaaaaattattttaaaatttccaaaatttcgaagaaattctcttttttaggggtgtattttttaaaaatttcaaaaaagtcgatcattaggggtgtatttttcgtttttttttgcatttttcttattaaaattttcaaaaaatggccaaaatatggactaaaaacgcaaaaacccaaaaatggcgaaatatggatttattcccgaaaacccccaaaatatggatttatatggactaaaaactttcaccaaatcaaaacattttaacgcagaaatgctatttttgagcccttttcttcatagtacatatatgcagaaaaaatatttaaatccatataatttataactctatttatcatgctaaattttatttatttcatatcccacaatttatctagggtctagcggattaggctccaccgtcggggacaggaatttccccgaccaaatttctcggggatgggtgatgaattaaaaaaaaacattgtcggggataaaggtttataaacaataaaaaaatttgctaattgctggtattaaatgatttatcaacaaaaattaattagccacaattttccactcgtcggatggcatccaaattgtgccatttttatattgccgcatttccgctcttcatatgttggtgcg

SEQ ID NO: 17781 - DNA, 2290 bp, Heterodera glycines
ataatgacacccaaatgccttcgtttgaacctcggcttttccattggtcggtcctcctaaatacataaagcacaattcccattcttcccttgaggccatttggtgtttccttcggccaaaagagggccaacccctggggcgacgaaagaaaatcgattgaaaattgggagaggaaaagctgagggaagaagcgggggaggggggggggggtgggcactgcttatttacttatttatgacaatttcatcgcatggcaaaatgaacgtcgtcaaaaaggtatcaaataataatttgatgcaaaaatgggcttggccggagagtagtctgaattgtgttttggtcgactatcgcactcaatgctttgctggcaccggcactgtctcccaaatggatccgtggcgggatcagcccacaaaggcgtcttgtcccaatgccccgtgcccacagcggtcgtcccgaccttttctggtacagcgccgccctctctcgagggctcccctgctagggaatgccatccccggggggacgggggcaatttctcagaccttcccaggaactgaagcacaggcaacagaaagtgccttttggtggttcctcacagtcatcttccagccaagccatgctcatcaagtgaaaaggtgatcttttataaacgaaaagaaaaataatgaaatttaaatgatgggttagaaaagaggaaagaaaaaagagaaataattaatgctttctctgttttctctcatttcttttccctctctcattgctttactgtctctctttatattttcttttctctcgcatagaaagaaagcaaatgaattacgagagaataacgaaaagaaaaaaaaggaaagaagagtagagaaatgaaaatagtgtgtgcattttctcgtttctctttcctctttttaaactcataaaatattttcttatttttctttttcccttataaaaatgattctctttctatctttttccaagtggtgatggcgttgggcgtttgtcggaaccacaaaacagtccaagcgaagtgactggtcattgttctgaggaaagtccctggaccagcggccgaaagggtccgcgcccaaacggcgcgcagtcggacacgaaaaaccccaaaaggggcccttgggtgaccgaaagggccacgatgcctccaggggaagagcccggtcgctttcggaaagggagtgccgatgttcgtcgaagcgcaaagtgatgcgtcataacggaatagggcttacaacgcccgtcaccaccatttttgcatttaattataaaacattaaaagggaaaatgttcacgtaaccctgaagaggcagctgttactcctcttcctttcttcccattccaattgatcgcttgacctgagtgagcttttcctctgatcattccttaatttcccccccccccccctcaaaatgtctcttccgtcgatgttttccgtgggccaatcggaggcaatttgtgagatttgtggtggcacagtcggtcctttggagcaaaaagtgcaaacgcaaaagcgcacgagttagtcgttttcaattgttaatttgaacccagaaaaagcctaccgaattgtttttgaatttgatgaaaatgggaatttgtccgttcctttctttgccattcgtttgttttaccatttttaattacttttctaattcccgcttaatttgttttgttcttttgaagtgcacagagagtgctttaaatgtgccatttgcgacgttccgctgactgtcggcgcctgcgctttggaccattcgctttgtcgctacgtcggcccgctttggttctgcaacactcacatgatgctcgggtcgggcgagaagtatcagaagatgaagcagaaaaggggaggagcgaaatgaggcgagaaaagggaccgaaataatgaaagaaacggaagaaaaagccaccacagagaacaaatgaaataatgatcagagtgaagaaagacacggcaccaaacacgggctcaatcttttcgattaccatttttggaggaaagtcccggttaaaatgcgatgtttaattgattttactgtgattaattaattatattattggaataaatttggaaaacttcgagtttggtgcttcgaacttcagtttcgggtagaaattgggcttaagcttcgccgtcgagtctaagccgagcttctcccttccctgaaatgttcaagtcgaatagcaagcgaagtcgaagccaaccgacgagcagcgataaaacttcggatggactgttaaaacgtttatctgatcacaacatatgtcatttctt

SEQ ID NO: 17782 - DNA, 2141 bp, Heterodera glycines
aaaaaattgatataatttatttagatcttcaaaaagcctttgatcaagtaccgcatgatcttttaatatacaaactcaaaaaaactggaataactggcaacttattaaattggcttcaggattttcttcttggaagaacctttaaagtaagaataaatcaaaaattttcaaatgaatttcctgccaaatcaggagtcccacaagggtcagttctaggacctattttatttttaatttttattaatgatttgcctgaaaaaattccaaaagaaatctcaattaaactttttgcagatgatacaaaaatttaccattgctattcaaatgaatcccaacgtaaagttttagaaacagctctaatttcagtctttaattgggctgaaacatggggcttatatttttcagtaaaaaaatcttccgtcttatatttaggaaaaaataacaaaaaaaataccgtacacaattaaacatgcaactattcctgaatcaaaaattattcgtgatttaggcattttaattgacaacaaactcaaattcaacgaacagttttcaataattctccaaaaagcttatctcaaaagcagaattctttttaaaaaaattaaaaccaagtcaaccaagacttggattacagtttataaaagttttattcgaccccttttagaatacgcaaccgaaatttggaatcctcgaaccaaaaaagaaataaatcgcctggaaaattttcagaaaaactttacaaaaaatgttttcagaaaatgctgtctcccctacatctcatacagcgaaaggctaaaatttctaaaactttccaagcttgaaaccaggagaaaatatcttgatatcataacagcctttaaaattatcaaaaatactactcaccttaacccaaaaaacctttataatttttcaaataggaagatcaccttttcctattttggtaactaaacgaaaaattaccaaaacagagcactcctttactaacagaaccacaaaacatctacaagaaatctgcaaaaattcagatatttcaatatcaaattcattgcccaccttcaagaaaaaagtaaaaagtattttacaagattaatttcaagttggagatctgtcaccatcatgtttcccggactatcattctcttccgaaagtataagcggcctttgtcccttcttttggacttttattacttgaataaataaataaaattccttttctaattcccgcttaatttgttttgttcttttgaagtgcacagagagtgctttaaatgtgccatttgcgacgttccgctgactgtcggcgcctgcgctttggaccattcgctttgtcgttacgtcggcccgctttggttctgcaacactcacatgatgctcgggtcgggcgagaagtatcagaagatgaagcagaaaaggggaggagcgaaatgaggcgagaaaagggaccgaaataatgaaagaaacggaagaaaaagccaccacagagaacaaatgaaataatgatcagagtgaaaaaagacacggcaccaaacacgggctcaatcttttcgattaccatttttggaggaaagtcccggttaaaatgcgctgtttaattgattttactgtgattaattaattatattattggaataaatttggaaaacttcgagtttggtgcttcgaacttcagtttcgggtagaaattgggctttagcttcgccgtcgagtctaagccgagcttctccctttcctgaatgttcaagtcgaatagcaagcgaagtcgaagccaaccgacgagcagcgataaaacttcggatggactgttaaaacgtttatctgatcacaacatatgtcatttctttcgaactgtaattttaaggtcattatactgtacgtaaaagaataataattattattattattttattatttttgattgtactttaatataaaattatcaatgaaaatataataggcaattatttttttaattaaaagcccctttatttttcgtttttctccacccattaatgaatgaccttctttttcagtgcttcgatttgatcgcttaatttatgaatggggtttttattctgtcattccttcgccacgccattggcggggcggggttcgttcgttcattcaaatgcaattaaaaacaat

SEQ ID NO: 17783 - DNA, 2067 bp, Heterodera glycines
accctcttctacacccgtactatatctcttcactctttttccctacctatcatcaaacacctgcactatttctccacacccgaactgcttcgacccctataaataggctcttcccttttgatttggcatttattgaccgtatcattccaatcattcaaaaaacgcgttggtaactcatttttgtcttcttcactttcattttggcctcctcacatgggttctgcactaacaactgcttcaactcgtcgccgttctccattttcttcatcatgccatcaatataggcatttgtcgacttacaataaaagccgaacattacttcaaatgcatgttaaaattgtttggtgaacttatctttgtattttgcacttttccttacattccaaactttctatgaatgcatgggctgccattgctttcattttccaattttcacaaatttcttttaattctccgatggaattttttccaattacctgcggctcattataaaatatagggttcgagccccgtgggcgggggtggcttttcgcgggggcgggggtcagagtcgcgggggcggtggcgggggcacgataattccgcccccgcgggggcgggggcgggggtttgctttgaattagctccaaaaatctcacaaaaaaaatattttttatgaataatttctttggctccacattcttttattcgttgatcgccttgataatatttattttgacataaattgcacagattttgtctaaaaataatcaaatttagcgatttttgggtaattttttaagaaaaaaaggtttttttttggggggggggcggcgtgccgatagaagcgaattttaaatttatttctaacagatattcaaatttgcaaaatatctactaaaatatgtaaataaaagtccaaacttttgtttgcaaacacaaaaaagaaagtgttttcctactgattaggctatggagaagccaggaaaaaatatgtatttacataaaattagcagccctaatcattagggatgcgatttttagttaaatacctaaaattttgcgcatttaatacgtacagataagcacgaaaaaagcattttacacttggttttgggtgtctacgatgacttttataatacctatttttacctttttggagtttttctacctattatacctatttaaggattttcagaaaattccttaacaaaaatgcaataaaatcaaaaaatacacccctaagaattggaaaatttttcccaaaaatttatttgtttttttatgtaacaaaatttttaatttaaaatgtcaatcttttcgcggggacgggggttggcgggggtcagagtcgcgggggcggtggcgggggcacgataattccgcccccgcgggggcgggggcgggggtttgctttgaattagctccaaaaatctcacaaaaaaaatattttttatgaataatttctttggctccacattcttttattcgttgatcgccttgataatatttattttgacataaattgcacagattttgtctaaaaataatcaaatttagcgatttttgggtaattttttaagaaaaaaaggtttttttttgggggggggggcggcgtgccgatagaagcgaattttaaatttatttctaacagatattcaaatttgcaaaatatctactaaaatatgcatataatagtccagaattttgggaactaacattatatagatagtgcttgcctactgtttatgctatggataagctgaaagagcatagtggaagaagataaaattagcagccctaatcattagggatgcgatttttagttaaatacctaaaattttgcgcatttaatacgtacagataagcacgaaaaaagcattttacacttggttttgggtgtctacgatgaattttataatacctatttttacctttttggaagtttttctacaaattataccttatttaaaggattttcagaaaattcctttaaaaaaaatggcaaaaaaatcaaaaaataaacccccttaaaaattgaaagaattttttcccaaaatttaatttgtttttttatggaacaaaatt

SEQ ID NO: 17784 - DNA, 1441 bp, Heterodera glycines
  unsure (1)..(1441): unsure at all n locations
aaatgaataaaataagaatatttccgttttttcaccttttaagtgcncaacccgnnnnaanaaaannaaaaannaatcattaaaagcccaaggacangaaaagnnnnangggagnacggaangannngnnnncaaggacagcnngaaacaattgtctatcaaaatgnaaaaaaagagattttgaaggaatcattcgagccatcataaaaaatattgttacacctttacatattcctttactaaaattttgttccaatgttccacaaaatcttttaaaaatgggtcccagtttccatattcaatccaaatttatataaattataattttttaggaatatttatattgctttaaggaaaaacaaacaaaaaacaataaaagaaatatgcaaattgaaataaaaaatgcgttttaataaaactgctttaacgtttaaatgctaataaaccgaaaaaagctaataaaacttggagaaaaaaatttgtaaaaaaaatggtatgataattaaaaaaaaataattaaaaaaattattcctttttttttgaaagcggtgcttaccaaatttgttctgtcacactttgaaatatatgtacgttttataaaatgagatgagagggaggggagcagcagcagcagaaggggggacgacgataaatcggcgattgtgcggcagagaaaacagagaaaagcacaaggggcagagagcacagagacagcgcctcactttttttctctgcccctccccccgtacgttaaaatgcacgttctattttaatacatttgctattcatcgcggcacacccacacgcacagccagacagacagagacgcgcaaagacagtgtgttcagcaaagagagcggcagacagacagagtaaaattgttctccccacatttaacacacacacacacactgtgttggcaccaaagaaacgagaggaaaaggcataatagtgcacaaaagtggacagctcccgtgagcgcagagaaacagagtgcgaagaaatagtccagtgtatggcatctgttgctgctgtgttctttcgctgcagcgctaaacgcgcgcgcgtgcaaattgcgccaagcaacgcgcgtgcgtgtcgcggacgaccacccaaaatcgaaaaccaactgacaaagagagactgagggagggtatacggtaggcgaaaggaaaggcattcgtggcgaaaaactcactgctgactgaccacagagaaatgggaagcgaagtaaatgtgctgtgatgatgatgatgagtagaaaggattgaagttgttgaataggaggggggagggaggaataaattaaattaattatgccattaattatgtaaacctatgagattttatttggaatctaatttgagcaccaaaatataagtaacttggatatcatcaaatcccgcccaccaaaatgtatgaaaaaagtcccgaagttagt

SEQ ID NO: 17785 - DNA, 1677 bp, Heterodera glycines
tcagggttcgtatcggacaaactccctttccaaggacgggtataccggtttccaaggacataaggggaaaattctattaaattcaaggacatttaaaaattttatcatatgcaatgaaaattattaaattttatccaaatggtttacatttttcaatttttactagggtaggtcgggaccgggaattttggcgaaaaacataaatttcataaatatttaaaccaaatcacatgcaatcaatcagcagcctagaaaatccccgtggcattttttcatgcattttaatacataaagttttttttctcaaaaaaagttcgctctttgattttccttaattggacgtttttaggcaaaccttttaagaaatcattgtggaattgatgaaaaacttagttcttattaatttttttttatcaaaaatatgcaaattcaagttttataattgcattattaaaaaatatgtacttattttttttgatcagtagggctgggaatttaagttaaatgactttttttttgctgactctaaatggccttaaaatgacttaaaaagtgttctaaactttgtttgaagcttcttctatcatgcattttttttgtgacttttttttgacttttttacactttgggatttttatgacttttttgagtttttgcgactttttcgtgatttttttgacttttttgaggcaaaattcgaaatcaccaaagaaaatgccgaaaaatacaaagaaaattccaaaaattaaaatttcgattggtgaaaagacaatgaagcctggatgaaatttttcgtaattattggcagaatcactttttatgcctattttaggtagctttttaaaaaattaagtgtccaaaaatctcatcgaaatgttattctataaatcattaaaaatgggattttttatctttcgctttatctttcaggacttttttgcattttttcatgcttttttgattctttttgtgactttttggctattttttcaggactttattagtcgactttttgaagatttttagtgacttaaattcccagccctattgatcagtgatgtgcttattttggaaaaaatttatttagcttttttgaaaacctactgaatttccagaaaaaaacgaaaaaacttcaaaaaaaattttgtttttcccttgaattttcttaataaaaattttttcgagttttttctcgaaccagttaggtaagtaaaagtttttgattatttttttttctaaaataactaaaaaaatgtgcgcgacgttatgtcccagcgacgtttcggctgtcgacgttttgtcccagcgacgtttcggcggcgacgttttgtcctgctcccaaaaaaagttgcgaaaaattaaggaatattttcctaaaactttcattttcccccaaaaattgcaagaaatcgtttaatgattttattcaacaaaataataatgaaaaatacacaaattcattaaaattctcataaatttttgcactgtctctgcttggcctgttcaaggccaacctctgctgcaattttcataaattccttcgattttttccaaaaagtcgtgcacgaaactgcgaaggatggcctatttgatttctaccgtagtgtttccaatctcttctaccgtatcctcaatttttcgtgacgaaatttgccgctcaatggcgccaaacaaacg

SEQ ID NO: 17786 - DNA, 1282 bp, Heterodera glycines
  unsure (1)..(1282): unsure at all n locations
gcaggtcctggttgaccacagtcaaaccatgacagccgaaagtgaacctataaaaaaatnngaaatncggaaanccgcagagggcaagctttttaatctcncagaanngaagangacattcaaaaaaaaatgaaaggcaaagatcagtcaattttgttgttgttgaaaaattcaaaatcgtcaaacaccaaaaggtttacaaaaatagaacaaatcaagtttatattgtcaaatttttccaaatatgaaaacatcaaaattccttctaatacatatgtgtcctccctaacatataaaatacagtaggtaaaaatctcataccggtaacctaactatgttaaaggcagatggttagtgggagagggcgggtggtgggtgggtagaggtgtgccgtgactgaaaaacccgtgaaccgtgaatcgtgaccgtgagtgaaaaaacacgtgaaattcacggtaaccgtaacagtgaatcacggcaacctctagtgttcggcaggtaatttgcccaagaggaaaacagcagaaataggtaggccagtcaaattatcccgcaaatggcaccccttccaaatgtcatagtatcccggttccaatcaaaaatactgcgacatcctaatgtcctcaatacctccagtcgctcccccctcgcccgcccccgccattccgccaaaacaatcgccgatcgtcgggtggagatggaggttgagatggagacaatgttttttgttatgttgtgtcctggcactgtccaccgacaaggacggcagcgaatgggacggacgagtggacgagcggtgcgcaaacaaaaaaattttggggttgaggtcggcgccgccggagttttggggggccggggggcgagagaattggaaatggacgataggacgggggaaggaggacggaagattgggatgatgaggatgatcggggttgggcggaagggatgaatggtgttggagacgacgatggacaaggggggggggaccatcgacggaagatgagacggaagctcgggcggcaatgtcgagagccgcgacgaggacagagcggtgggtggaagcggtccgtaaaattaatggaattagaattggattggtatggaagagcagcatgtgaagtgtgaaaaatttaaagagggagagggagagagagagagagagagagagagagatgaaatggacgtagggggaggggtagagggtaaagatttttggaaaatttttgttttttaagagggctttctaaaaattttattttattttttaccgagatggcccttc

SEQ ID NO: 17787 - DNA, 1809 bp, Heterodera glycines
gcgagagaattggaaatgaacgatagacggggggaaggaggacggaagattgggatgatgaggatgatcggggttgggcggaagggatgaatggtgttggagacgacgatggacaaggggggggggaccatcgacggaagatgagacggaagctcgggcggcaatgtcgagagccgcgacgaggacagagcggtgggtggaagcggtccgtaaaatgaatggaattagaattggaattggattggtatggaagagcagcatgtgaagtgcgaaaaatttagagagagagagagagagagaggatagagagagagatgaaatggacggagggggaggggtagagggtaaagaatttttggaaaatttttgttttttaagagggcttcctagaaatttttatttaattttttaccgagatggtccttctgtgatatgcgactctctcaaactaatgaagagagctttctttcccctaaagttgggattgaaaggagtgcaaagggcgccctgtgtagctcagtggttagagcattccacggaaaggaagggacgtgggttcgaatcccaccgcaggctgatcttttgcacttacgccatccgccaataataccacacttcgagtttttgttttgggatggattttcaatgggatagggatttaaatttaaaaaaattgtaaactttttatgtattcaaaatgataaagtttttcgtgttttactgaaatcagacatcataagaaaatttaaaaaataaacatgtagaagcatgaattttttaagaaattaattttaattttttgaatgaaaatttttcttaagcataagtgtttaaaaatttatttttttaaattttagatgaagtatttttgaatatagatttttgcataaaaaacttttcatttaaaaacaaaaatttagaatttttgatttaagaaaatatattattagacggtaattacaaatttaattgatcgcctaatttgctaaattaatagcattttaatggacacacttttacccactaaaattccgtcgccgccggcggaggtagcgaactaatggcatgtcaaaaagtgaccttggatgaatgggaatgtgctccaccgatgatgatttatgcacttatgcagttccaagttcgtctgaaacgtacgatcaatcaaaatagtggaaaattaaaaaaaaattcaatttggaaaataaatttgaaattataattattaattaaatttcaagtttttgaaaaaaataattaaaaaaatataaaaattatttctataaagtacaatcaaaaacaatgaaaattaaaaaaattcactttgaaaacaaatttactttatttatttaaattttagggaaaaaattttaaaagtattttttataaatttaaaaaaaaattaaaatttgaaaataaatttaatattatttattaatttataaatttttgggaaaaaaattcaaaatttaaaaatgattttttaaataatttaataaaatcagtcgaaaatttaaaaaaatcaatttatttaaaattatttatttaaattttaagtttttgggaaaaaaaattaaaaaatttaaaaattaataaaaaatgaaaaaacaaatataagaaaattgaaaaagatgtgtaaaattgaaaagtaattaattaaaaaactaaaatattgtagagtttattaattataaatgtattccaaataaatgattgacttttggtttcaaatattttaaatataaatctaagaaaaattttaaaattttctcgtgaagaaaaaaattccaaattttccccatttgtccgatg

SEQ ID NO: 17788 - DNA, 2124 bp, Heterodera glycines
gactgctgcggttttggcgctgctggtgcggctgctgctggtggtgcattctgacaaaagatgttcggatccacacggcccagcgtctcaatacttcggatgatgttctgaaatgggacagaggacacgaattatttggttggaccttctgcaagctgaacctgttgctcttactcggaacgaattgcgatccccccagcctttgcctgctgcggattaggatctgaaaaaatgaatttggttagaatatttgctgaccatgaaccactgggccattttttcgtgcttttttgggttttttgtgactttggcgattttttatgacctttttagtcgattttttgaagatttctagtgacttaaattcaccgccctatcattttccagaaaaccgaccagttgctcacgttcaacaacagcgccattctcaacaacatcgcaccaaaatggcacgccgacgaagaaagaaggagacgcgaaaggtgtcgtacaaggtgcggtttacaacgaaagcaaaatgccaaggaaattgtgtcaatgattccccgtttttccccctcatttcagttgtacgttcgacgggtgctgaaggaagttcatccgggcaaggaaatctcaatgcgtgcgttgaacatcatgaactcgtgagttgcggctgctgctgaaagctcaacaacaaataacattcgttttccccatttttttccagcttcgtcatcgacgccttggatcgcattgcaacggaggcgacgcgcatggcccactacgaccggcgcaagaccgtcacgcttcgcgacatggagttttcgtgccgactgtgcctgcccgacatcatggccaaacatgcgaaccaaaaggcttcggtggggacaaatttatgattagcccgatttgtaaagcacactcataattattttttgaacatgaatcttaacacccgcaattgaattcgaacaaaaaatcgtaaattctcagagcccatggggattgggactcccgcgggattcacggttcagattgcattttttgctcactgggagttttacgtgattcccggtcgcgctcccgtcaatttttcaaatcccaaatgacccaatcgccggagaacggactttcgccttaaaaactcagattcggacacccagttttttttcaaaagtccacaaagaccccctaaaagctcgaattaaaatttcaaacacctttttggcttttactttttattcgatttaatacatacagtaagacagaggcatacaatatgagatatgacatttgtaagcagtcacagcgttgaaaatggaaatcacatatacaatacgaataatatacacacaattacaaagtggcaaaatgcagattttatcggtgaatcaatttctgcctaagtgatcatgccctcggagcggctcgtcatcagttcacacacttgatattgcgaagattggcagcctcggcgtagtcctctccagccaaaacaaaccgcatcgatcatgacgagtgcattcttcggcaacttgaccacttggaagaagctgcgcgcagggtacgtgtccggattgaagtcgaaacgaggacatccatggttacgacctgtagccctccgcagcaggcgctttggacgtggtgatgggacgcatggagggagcagacatttggagaatggtggtttcagaaattaggacgttggttgtttgttcgctgaaaatttgttaattgaaaaaaaattatttgagacgaagaaataaaaacaggtagatagaaaaaatggaaaaaaatgaaaaaagtgcaatatttatacggggataggtatgttatgaaatgtcaaagtcaaaacttgtctgttcttttttttagtataatttttatagaagcatccaaatttaacattcttgctatcattcgatcggtcagggtcattccaagaatttgcaacgccattttgaacttttcattgcgttttgaggccgctttgctaaaggtttgcatggaggcaaaaagttccgactgtttcttgtcgaactcggcgttggaccttgagaaaatgaacaatttaaatgtacaaaattgggatgaaattcttattttttggggggggggggtcagaaattcgcaattttcgac

SEQ ID NO: 17789 - DNA, 3240 bp, Heterodera glycines
  unsure (1)..(3240): unsure at all n locations
gctcttccatcatcgtggcagcagacgcgtccaaaatcgtaattggcgcaacgattggccacatttttccggataagtccgagaaagtgatcgaacacgcatcttgtgttttgtcagattcccagcagaattacagccagatcgaaaaagaagcattggctcttgtgttcgcagtgcagaaattccaccgaatgttattcggcaggaaattcaccttatttactgatcacaagcctttgcttgccattttcggttccaaaaagggaattccgatttattccgccagccgattacaacggtgggcgttgatcatggcaaattatgatttcgacatcaaatacacgaatacagcatcatttggacaagcagatgtcctctcaaggctaatagccaattatccaaagcctgaggaagatgtgttgattgccaacatttgcgtcgaaacagactgttatattaacaccattttacagtcgcaaaccgatcatcttccagtcacggcacaagaaattgcggaatcaacaaccaaagatgagacactccagaaaattgttaattttgttatttctggttggccaacgaagtgcagggaacccgaaattgcaccatttcatccgaaaagaaatgaaattttggaaattgggggctgccttctctacaaaagtcgtgttatcgttccaagccaactgcgtggccgaattttaaaggcattgcattttgcacatccgggaattgtgcgaatgaagcccttggcacgccagtatgtatattggccaggaatcgattcggaaattgagagagttgtacggcaatgtgatgaatgccaaggtgcacagaaatgtccgattaaggcaccattggccccatggacagtcaccgacaaagcatttcaacgcgtacacatcgactttgctggaccctgccaagatggatatgtttattttattctggtggacgccttttccaaatggccggaagtctatcaaatgtcttcaattacggccaagtccacagttttcacacttcgttccataatccatcgccttggcattcctgaggaaatagtgtcagataatggcacacaattcaagtctgctgaatttgccgctttttgtaaagaatttggcatcaagcacaccttttcaccgccatttcacccgcagtcaaatggccaagtcgaacgatttgttgacacctttaaaagagcaatgaaaaagtgttcaaaagacgataaaaattggaccgaaaaggtgctgctcgcttacaggacaacgccaaacaatgccattgatggctattctcccgatcaattattcttcggacggaaactccgaacgaaattggcattagtcctcccgcaagagcacaaaaacaattcagagaacattgacaaaattcagcttaacaaaagaaggaaggactactcgaacaacatggcaaaacaattcgatggacggcatggtgtcaaagaaaaagtgtttgtccccgccgattctgtcctccttttgaactataggaaccaaaagacatattggctccacggtacaattgtagagcgagtcaggaactcgcctacataccgagtccatgtaccggttcttggtcgaattgtccatcgacattcgaaccaacttcgtcggaattgtgttttcgaagagaattcgaaacataatcctggtgccggtcaacagccaattccaccagccaacggacaaactcaaaatttggcgcatcaaattgctgatccggtcgatcaacggactgatcaacaagccgcaaatgacccgccgacattggctcttcgacgatcgcagcgtaagccgaagccggtgattcgcttctcgccttccggccgctgaaggagttagaagcttgagaagggaggtgttggagatgttaaattggcgttttgacctttttaattattttcatatctgtactttgttctccacgccccaaccctcctctttgtgtttataaggagaccattcccctcctttttttgactcttccctcattcattcgtttttattattatttgcatttgtccaccgaccgatcaataaatatttttattctttgtgtgttcaattggaggaacacaacagtgttcattgatcatcaacggtgttcactgatcatcactgattacgtatgatcatcagctgattacccccaaacgattcgtccaattaagcaaacccaatcagtcatgatcaatttgcatttttgtgtcgtcatcataatttttctgcatctttttctcctcttctcccatactctctcatcatcgtccatcaatagataaaaacagaattggctgacctctaatgggtgaataaatgaatgttttttttgcatttgtcgtcccctccctgtcttctccccaattcgtcaattcacattttgcctatctattgatcagcagattttaaagccaatatggatggatagttacggagatttgggccaagtgaaatattgtaacattaaaaaaaataatgattattttccaaccccctaggttttttcgagaattttcccgtttttcagtgtattttgatgtgtatcggttaccatgaagaagtgatctgaacaagttgatataaaatacttttgatcagccaaaagttaacttagaggaattttttcagatttttggcttctcaaaaatttaaacctaatttgttagaaattcggggttttcaaataataaataaatttgttttttgcacctgactgttaattaaattgcattaaacttttcattttttctggccaattaggttttccccgtccttcgttccattttcatattgaaaagttttcagttttcgtaaacaaaaattttaaaaaattttggccactgaaattctattttgcaatcatttcagagcatgctccaacaaattcaaagtcagcgtccgatggttgcgaagtttgagcggaatgtggccgggttgagcgaactgtgctccgaggcggatgaacaaaatttgaagcaaattgcggaaaatgtggccgaaagtgagtgggccaaatgagggaatcttaactggacaaacggagtttgtgacctaattaaatgagtgtgattgtcgagattgattaatgtagtcgagtaaaacgcccccttnaaaattnaaaaaaaaaattattttttaattttcaaatttagaaatttttcaaaaaaatcataaaattnttanattcaagaaattttagaaaaatttttctagc

SEQ ID NO: 17790 - DNA, 1196 bp, Heterodera glycines
cttttacggcgccaaaaaagtcattttatataggggcgccaaaacggccgcgccaaagtgaccccgaccctcaaaaacagggttcccaaatgaaaatcttaaaagcttcataatttttttatcaattttaagaatcaatcaaatcaaacattttcattgggctacaaaaaatttaaatccaaaaatcttttttttgaagtacgaattgcatacattaaatagtagggggtcgacccgacttcatacgaacgaagtccagtggagtcgaagggggggggggtggtcggagaccaaaatttacgaagtcctccagtcatgtaaatgccaaattttgcgatttcgggacaattttttgaaaaaaattgaggtttttgtaaaccgccaagaaaaagttttgatttttgagtgaaagttattttcaaattttctataaattttacgaagtcatatttggtaaaaaaaacacgaaatttattaattttcgtaaattttttgagttttctatacgaaattgactaaattttaaagaattttgttaaattatttaaattctcttcgtctttacgaatcacctctctctcttatccctccgtctcttatttgaccgaccgaggatgggaagcgttgactttcgtccggaagtggcgttcctcccccggcgattcatttccgccggcggtgccccccccccccggcgtttttaatccgtcgaatgttttgatggaaaatacacaaagacaataaaatttcctttttatttttcttcagatatacattttgatgagcccttttcaaaattagcaaaatatttttgcttttgaatgggaaaaagggaggggggggggaagaaaggcaattcgaacactgacaatgaaacagaaatatcacgagtggtgggtggggagagggggggggggcaaaacaaaacattggcgacggtcggcgcagccgacgcccgaggggaaatggacttccgtcgatgggtggcggacaacgacccccgcgaatgattttgtgtattcattcactcttttcgtctccaagttatttttgattactattattattgtcgtcagaaactcgattcacgcccgcaaaatgcgggagggaaagggacgcaaagagaaaacgatggacaaattgggggggggggagaaaaatatttagtggaaatttcagtgatttattcataaaat

SEQ ID NO: 17791 - DNA, 1697 bp, Heterodera glycines
  unsure (1)..(1697): unsure at all n locations
aaatcatgatnttgtctaagatattcatcaagaactgattttttttaataatttttatgtaagaaaaacatgtattctggttttcgtagtcgctgatgcgacccagaaaactcccatttttgctgtatttctccattntagtgttgaaaattagcctaagaatgagtaaggtaaggattttatgggcgaaaaatccttaaataagggaacaaaaaaggcaaaataatagtagtgatgaaaaatggcaaattatttgtgcaaattacaatgtactttttattcatttgttataaatgagttcatcttttttgaatgaaacaaatttaaattattccaatgaaagggcaattgaccaatttattcatttttgtttcattcgaaagaatttttttttttttgagacagaaaaaccttttttaattttgatggtgtattttaagaaaattttctaaattcaaattatgaattcaaactaagtgaaaaaattgcaaaaacccataacccgttatttgtaagtgaatggcaacgagaaaaatgcaggaaaaagtctttagattgattagtcaagtttttctctcctattcccactcaaatccaacctcagtccggcaactgcgcttttgctgcattttgctgtgaatgtcggctcaacctccttcccatcctcggctaattgaacgtttattttgcaattgaaaatgagcaattcgcctgtgctgctgccactgtaaaggtaacggtcgaatgggtccaattggaagaaaaagcgctggttggtttcaactgttctctgataattcgccaacaaatgcccaggcattcgcaaatcgaagcattgaatcgagggtttctatacaaaacaatttcataaaacaaaaggaaaaatacctttcggaggccagcaaaaagcaaattcccatcggaagaatattgcaaatgtgtgacagcagaaccatcggaagagccattcaaaaggcaatcgcacgaattcgtaagggtggagtaaaggcccactgaaagccgaaaaaggatacaattagaaagaaaagaaagagagacggggggggggggaattaccagagccattggaagaagcgactgcgaacactccgccaaaagtcgggcacatcgaaagggcagacacaattcccttttgtccgccaaattttcctttgactgtttataaacatttaattggtttcaacttcggatttcaaatgtttaccaaatgttttaatttctcgcgactgtttgccgcttcgttcgcattcgaaaattcgcaaccgattgcgataacctccaaaaatgcactgcccatccaatgaaaaacttagcgaataagcatgttccaattcgtcctaaggagaaaaggtttttgttccatttgctaaattacgatgtaaaaaatccgaaaatcgctgattattcattagtaggagccattaaattttgacactcggaattcggaccgggtcgaatgggccccgccgttgggccccatgggcagtcatttttttggtcgacttttggtttactttcactaaagaaaatttttttttataaaatttaaataaaacaagatttttaaatctttaactttgttacacaaattaaaatgtatttattttcatgtatggttcgaacccagttttatagcgttgaattacgaattttatcggtgttctagaaattatcag

SEQ ID NO: 17792 - DNA, 2411 bp, Heterodera glycines
cggggacctctagagtcattccgttctgcacaatcgaacccgacaaaaaatcagaaacgcagttgaagcggtgaacctctgattgtaagaggcggtaatatggaagtgaatttgaaagatttttttggaatttgcttactcagtccaatgtcatgcaaagaattcatcactcggtcggactcgttcaaccgcatgaacccattgtcaatgtgaatggcatgctaaagccggaaagtcaattgggaggtcttaacgctaaagaatcgccgccagaaaacaaaaaataatcgtttggaatggaaaaatttgtcggaggtttcaaatccgtgccttcaacccttaccactctctctgcgcccaatgctttggtgcacaacgcggcacaaacggtggagtcgacgccgcccgacaccaaaacgagcacttcacccttctctcccaccgcacttcgaatgcgttcctcgcacatttgttcgcgattgcgcagtgtgtaatggcacttcagtgagcaaatccgacgaaggaaattgtcgatgatttgaataccctggtcggtgaggtcggcttctgaaaaagtgcgggttcgaactatttgcaaaatacgtaaatcccttgccaattcccatttaaatatttgttctcttacccggatgaaattgaagaccataaatgcgccgttcagtattttcgatggctgaattctcaagtttttgttgttcattaaccccaattaattaattacccgccacaaattccccgctgaagccaattggttgaaacccatttttggctgacgtttccggtgtcactccgtccccgtgggtgagcagcacaaattggtccggcttcaacgagtggaaaaggtccgactttgggctgacttggatctgagttcgcccatcctcccgccgcggctgcaaactgacggagccaccgaagtgtttgttgattagctaaaatgggaaggattgcaaatatgaaaaaatgcactcaaattctggcaataaatatgaatcatttggaccggacttggaacccgtagcaaatgccgagcagcggaagacgaccaccgagcagttccgggtcgtacacgggcgcattgtccacataaactgaatttggtcctccgctgagaattacggcactaaatttatttttcttgacatttaaatgcgccatgaaagtgttcttatattacctgtatccgttgtggaccagttcattcattgttgtgctgaatgggagcaaatcactgcacacattgcactcgcggacacgacggtcgatgagctaaacgaatcgggaaaaagcaagtcgaaattgtccgaattctccagagaaaaacctttccgtactgcgccccaaagtcgagaatggccacgcgctccgttgtgaattcctttccgcactcttttggctcgttggatgatttatttaattttggagatgcatcgccaattttcggtggcattttaattttttcgcttgtcattgtattctctgtttccatgggttccattaaatatgcaataaattaatagctaaaagacaataagtgaaaaactaatgaattacaaaaatagaaggtgtttatttcgtcactaatcttttaggtgctatttaaaagttgtcttttttgtcaaaattgatgtcggattcgtgatcactgatcagtgacccaaaaaacacaccggggacaaattttcatgatgactagggctgggaatttaagtcaaatgacttttttttgctgactctaaatggccttaaaatgacttaaagtgttctaaactttgtctgaagcctctaacatgcttttttgtgacttttttacactttttgggatttttatgactttttcgagtttttgcgacttttttcgtaatttttttgaatttttgaggcaaaatttgaattttaaccgacatggacgctatagataggggctatatagatcaattcgcatatggatcgaacggcactttattctcatattacccgctcgatgcccgacttaacttcgaaacaggatttgccacgcattgtctatcattatgaattttgatcgcctcacttcccgggaagttcatgggcggaaaatggggttgaatttcgccactcttgccatcatgtgcaaagtgacgcttttattttcaacggtccgttgagagtagtgaaataaatcttatactgtatccatttgcaattgggacaacccttttctataaaaaaaaatgggtttacgtgtatacagtgaccgccatcgactttatagaaagtgaccataaaatcagttcgtttaatgagacaagtgcactatattgtcatatgagacgtccaatccccgacttaaattcagaatatgttaagctacacattctctatcattatgaattttgatcgcctcactt

SEQ ID NO: 17793 - DNA, 964 bp, Heterodera glycines
tggaagatcaatttctttaagagttagaatgttgattattatttactaaaatatcccataaggatagttataaataaatcatcaagataaattttggaaaatttcttaatcaagaattaaatgataaaatgggattttctaaatgacgcctgaaaaatttgaatttttactgatttgttaaatagttattaaaatttcgtattaattaaaatcaattaaagagtttaaagaaatctgaaaaatgttccattccactgaagttaatattttaagcttgtttaatttatttaaataatttatttatttttaatgataaataaatttgtaaaaaagaactaaaaaatagcattttagaaaattttaaccgtaaacttaggtagttcaaaaataaaactttataaaaatgctctgcaataaaaaaaaaattaaaaagtgaaacaaaatgcggtccgcgacgcaatttcacggaatcttgaatgtggtcttggtcaaacgcatgatactaaataaataaattcagtttataaaatactatcattttctataaacctaactaaattcaaagataaatgtaatattaaaaaagttttttttaaattaaaaaattgcaaaaacttattatctataattaaacataaattataatatagtatttaaaatatgataaaacttttttgaaacttttaaatatttgatgcaggcactaaaattaataatatatttaaatatgaaactttaaaattaataaaataacttgtaacaaatataaaaatataataacaatgaaaattaatgctcagtatcgatatacactagcaatcaaactgcaaatgtatctttattagaatgttgaaactatcaaatagtcaaagataaattattttcataattgactttatttttcatcacatcaataagcaaatacttaataataaataaaataatgcgagtgaatattaaaatt

SEQ ID NO: 17794 - DNA, 2045 bp, Heterodera glycines
  unsure (1)..(2045): unsure at all n locations
tatcgatatacactagcaatcaagctgcaaatctatcttttttagaatgttgaaactatcaaatagtcaaagataaattattttcataattgactttatttttcatcacatcaataagcaaatacttaataataaacactactaccggccgaaaaaaatacggattaggactacagatccgtgaaaatccgtatacaagtcttgcgcttaatactattattattagggacgccatttttaggcacaaaaaatcgcgaaataggtaccttaaaaggcaaaaaaaaaatcgcaaaataagcattaaataggcacacaaatcccaaaataggcaaaaataggcaaataaatttttttattaacgctttttagttagaaaagcatataaaaacttaataaaactcttaattttgattatttttaattatacatgaagttattaattattttaaattaataccaatctacaaataataggaaaataaaatgtaaacaaaatagactaaaaagaattaataaaataattaaacattttatttgtgcatataaaattgcaactccagcttaattattaaaaaatgtctgaataattttcacctccatttatttcgtgtcttgctattacgatattaatacctttatatcggtgattgctttcatttttaaatggtattttttttgggactttacaaatttagcattgaatattcgacatattttttatattacaaataaataaataaggaattaaaataaaaaattcaaaaatattaaattagtaagtaattattgcaaataaatacttttcaaaattaaaattaattgatggttaaaataaagaaatatgaaaataattaaatttgatcattaaatttaaaaaaaaattagggacacaaatttcataaacatacaataaatctaaaattttagtatttactaattaaaaaactatttaactacgcaagttcgataaatataaattacgataaacaaaatatacaagattatttaatttcaaaactgtataaaatattaaatttagtacatcatgaaatgttgtatgaagctgctgaatgcttattgacaaaagtttttgtctttactgttattttacgacttttaattattaaaatataaattaagaaagttaatatttgatcaaaaataatcatttttacataattcnaatactacacaagcaagataaatattttgctattgttttgtttgtatgaagctgctgaatgcttattgacaaaagtttttgtctttactgttattttaaagactttttcatgtttagaatctgttatgctggtcagttcatatttttggagaaaattttaaagaaaactgaaagtaggatttttgttggattttctatactgaaatgaaatcaatattttaaatttgataaataaaaataatatttttgttaatttatttctattatcatattggcggatttaagaaacgccctggcggatttaagaaacgcccattatggcggatttaagaaacgcccacttggcggatttaagaaacgccctggcggatttaagaaacgccctggcggatttaagaaacgccctggcggatttaagaaacgcccaatgtggcggaatttaagaaacgacacagcacgaattcataatcatatggtatcaaaattaaaacaagcaaaatgcaagaaaattgaatgcctagtaaaaatacaaataaattattgtaacttataggatgacggaaataaatttaaaacaaaataagaaaattaaattttaatatacaaaaaatcttcaagcaaaaaaaagaacttgtgacattgtaaacataaataatagagctttttgaataatataagtataacaattcaattaaataaaaacacggtttcaaaaagaaacttatcaaatagagaatattgtgaaataaaaatgataaaaaatttaatgaacaaacgaagaagaaatttggattaaatgaatggtgatattccggggggggggtgcttcacaaactaaaaatatttactggtgaacaagtct

SEQ ID NO: 17795 - DNA, 2854 bp, Heterodera glycines
  unsure (1)..(2854): unsure at all n locations
attgaaaggtgggagaaaggataaaaggaggggagagaatgatggaagacacatttcagtgaaagccgtggtggaagagacgacgacaaatgaacagggcaaaactgagacaaacgtcgaacagagcgaaaaggaggggccgatgaactgaccgaaagggtccgactgatcggcaggaacgtcatccctgacggggatttgtcacggagaatagaaacaaaaaaagccacttgcatttgcgttgttttattttgttgctacagtaatcacatagttcacctttgtagatgctttactgtactcttttcatttttctctctttctctgtccctctctttcttttctttccgcttttggcttataaattcctttttctctattgcacaaacattgaattcgattgaatatttgccgatttggttgagagagcaaagggacaaacacacaaaatgacgaaagaaacagcggatggacattttcaacatttccatccgtacacttcgacaaattcaattccaatattcaattggcatttaagtggggcaattatttaatcaccgatcagctgaggacaaaatccgatcggattggccgacaaaggtcgacagattgccgatggttgcgcatttttgcccctttttccttcccttttccgttttttccgttctgctgttagctgcgcaaggactcgtctgtcgaaagggtaaagcattacgaaacgaaaggaaagattaagcaaaaagctccctcagagaaggtcagccccgtgggcatgaattctggtgctatgaatgtcgaatgtggccaatacgtgcagcattgtctgaaggcattttgatcggcagggcggaccaaaaaagggaacgaataaaacgaaaggggggggggggggaaagagaggggtgccgaaaagcaaaacgaagtcccgacaaattttatacaaatntaaatctccaattagcaaatcgcaaatcgtccaaaacgcaattcgtccgccctgctgctgttccaacaaaacttttcattagcaacaaaatttgcttaaggtgcgcatgtgggagggaacaatcattcggtcggtaattagtcggcatttcgaatgttcgactgattatgtgcaattcgccgcattttttagggactgcgatccgttggcgttttgtccgcccgacggaagcaaagtgttcaaaaacgcggattatttttgctgtggggggaatgtgtgcaacggaaagcggcgacacattcatcaaatgataattttatttatcttttccatcggacaaattatattctttttatttttatgatgaaaagggaaaataaaatggaaaagaaaggtaattagcacaaaatgagtcaaaacacaacaaaaattaattggtttaattagggaaaattgcaattaatacaaaagaggcaaattaataataacaattgtttatatatatttttttggaaatccacagaagaatgaatgaatgcataatgaatagggatgatgcaatttttaggtttttatctttttttctgagctcccagaaaaggacaaaaacaagtttttttttggtggttgataagctccttttcgagttattggtgcctattttctgttttatttttagagcctaaacctaaaaaaattgaaaaaacttattttaactttttgaagaaagttttcgattttacatccctaaattagaaagtttttcaactattttcccatttttacacttatttttggggtttttagagcctaaaaactaactattttggcagtttttagcacctaaaaattgtatcactaataatgaatgaatgataaatggttgaatttgtcacgggtcatttgggggtggaccccccccccccccctccccctgcccctttatgtgaatgatcgcaaatgtcagcccatccgtctcctcttcctcctccgacggtatcccatcatcttctcttatcattgtcctttcgtccctttcttttccttccgccctctttttggccacttcctcccccactttttctgccttctcccccactttcttccgccaatgctctcatcgtccccaaaggaatttgttgcgcctgtgggagaggtgaaaagattggcaaaaaaacaataattaatttgtcaattgaggcaattaattacccaatctgcaggtgcatgcgtttgtggtcaaatgtatgcaaagtgtcggcacttcggcggcgcacgccgcgcaattagcggaccttttgttggatgccgacatcgtcggccattacaggtcaaagggagcgattagccgagcatctgctgatcaatgatcaaaacacttcgtcaattatactaaagatggcacttcccatttacagtcatggccttaaccgcctttgcatttacattgaggacgtcgcctcgggcgtaaaaggcgacggtcagagaataaaaagggaaaagccaaaaaagaaaagagttttcaggtgaaccgaaggtgctcaagcaggtccatttgaaacagaattgaaatgccaaaacaaaaagcaattacgctgaatttacagaagggtgccaccgcttgggtggacgggtgcgatttgcttggcgccgtcgtcggtaatttctgcacagaattggccataaagttggccaaagagcacggcatcggctgggtggtgtgcaagcggtcgaatcattacggcatttgccaacattatgccaaaaagatagcaaatgccggcttgttggtgagccttgccaattgaatggctgaatgacattgtttactcttttcctaccccttcccatggccacccttccctcccccagggactgtcggtcaccaacaacttcgcccatcatttt

SEQ ID NO: 17796 - DNA, 1045 bp, Heterodera glycines
acaccgccggaattttggacaccaaaggaaaattggacaccgggaaactggacaccaaattcctaaaataaacacaggaatgaagttgaaaaacaaatttgtgtagggtaaatggattaataattaataattatggcacttaaagtagctcaggcattcaacaggccagatgattgatcaatgtgccaaaaaaatgcacgaaaaagggtggagaattggtcaatgtgctaaaattgcataagagaccagcagatcagtcaatattggtcccaaccccgtcgttttcgaattcacattccattttttcgaccgattagacccctggaatttatgtattcaccagctttgaatccatggcatttcgggtcccaaccgccgaaatccccttattcttggacctattggactcattaagacccactcactactaacattcaactaatgcagtcagtgttgacacgtttgccgttttccgcctgcccgccggcaacaccaaaccgtacgtcttcaattggtcgcgcaacgatttgccaccatctttggactttgcactgaaaatttaaattttaaaaatatacatttgttggcattctgtttccataccggcgcagaatgccgccaagaacagatgcattcaaacactcgggcggattgatccgtctgtgagaagttggcatggaaaaattgttatcataaattctcggtaaaataaaccggtggatttcgccaactgtgacacggtatttgggagtggagctgagcaacgacagtcgtcctgagaatagagtatacgatataatgtacagtaagaaagcaccagaggccaaaccctttggccatttctcattgcaagacgagattaaaattttgcagttgtgtaattagtgtcggtactttgccatttgtgcctaatttgtttttacttttttaatgttgaaggtcatgagccttatttgatcctgcaaaatccttttcaaaacatagacgtcacaattcgagaaacaaaaattttgataaatttctgtattataaaacttattttcca

SEQ ID NO: 17797 - DNA, 2126 bp, Heterodera glycines
  unsure (1)..(2126): unsure at all n locations
attaattgtcaaggcatcttggccatgggatgaccattgttggatcaatccacccgcctggcacggtgcaaaatgtctccatgggattgatgctgcccggtggcacaatgccaggggagggaatgcccgatgccattccggaatcgctcaacgaagtggacatgtgattgacaccaatcggtgtcggcattgaattgtttggtggcacaatgccaagcaaatgccgtgattggcgagaacctgtgaagtaaaggacaatctgctactgcttacaattttttgtcactagtccaggatagttttgatcaggattttcagtcagattttgatcttaatccattaaggcaaatatttttgctaaatttttaaagattttttcattaagaatttttgaataaaagcgaaaatcctgactgagtatagaattcccgattccgggctctagtacccagttctgttcagggctaacaataaatccccttaactgatcagcactgttagaatcgatcattttctgatcaaaatgggaagaaccaaattatcggaccataaaatttctggacatgcactcactgctgttgttgccaatgttttttaccttttcggatgacgccttcagcgccagtcattgtgccggcaccgccacctcttcgtctggcattgtgccgttttacaccccttccccggcctccgttcattgatggcgaatccgagtccgaactttgctcctaaaatagcataaagcgccttaacaagggcagaaaatcagaatttagaatttcttgaaaacaagatacggtagagtataatgatttgaaaattttaggcgtaaatgatatgggaacaaacatacaataatccaatacagtatattcgtttttacggactttggtaatttctcaaaaattattcaagaatttttgaagcttttagcaaaatgaattgacgatttaagaacgaggttctcaagtacaatttagaccttttgtactacaaatacttaatgtaaagtactttatttgagaactaccgtaatactgacgcattttccgggggcactctaattgtgccgccccctgctcgcgcccaccatattgcaaattttaaattgtatttaatatatatatatatatatatatatattatatatatatatatatatatatatataaatgatttaattattaccccatcactgttgtccatcttcatttccaccgcctcgcgcggcgagtggtggagaaagggtggcaacacgcgcagcaatgttccgccgacggcaccgccaccgttgccggcaccgacgacatcaccaccgctagcggaagtgccctgctgttgttgctggtgtataaacacggtggtgccgttgttgttggcatgttgttgttgttgggatgatgttgcgttctgttgttgttgttgttgttgcaatgtgtgcaccggattcagtgccaccatgtagtcaagcggagactgctgctgatggtgaatgcatgaatgtacaatatacataccagggatgtaaaggaaatccgattccggcattttttagcccggaattcaaacttccggcattattggtgccctggttccgccttccgacatattttggagcccgaaaaccaaccggtttcggccctttttgtgaaattccggctttcggcattttggagcaaatcccgattacctgctcttgaccgtaggcacgtccaacaattgtttgatgttgtgtgccgaggaacattgagggatatccctgaagaagcaactcattacaactttatccaaaacaaaaatgctctctacaacactttaaaaattgataattccactcaaaaaatatttaaaaccaacaattatagaagaagagattaatggatgggggatatcaattgagacgctgattaatcgatcctatatgatcgagcaatattctctcaatctcgcccatctcattaatttatacatattgtaaaataccaagcaaattttgttcattttgatactgtactcaaccgtatccccgtatcgcgcacaattcctgatcccntcccctaatgtcatccgatccccaattctctcacataaatcggtgctgaatatgagaatgtgtacgggttgac

SEQ ID NO: 17798 - DNA, 2949 bp, Heterodera glycines
ggaagagagcgtgcgaaagggaagaaaagaggccgagagaaagagagaataacaaagaaagagagaaaaaagcgatggagagagagagaaaaacataaagagaaagagatgaataaggagaagggaaagaaattgtcagagaggaagtgagggagaagatgtgagagagagataaagaaaaggagagtataaagagagagaaagagaaagaaaggaagagaaacatttggaggaataatataaatttttaaaattttgactagcgcggagtgggagtgcccgagcgaagcgagcgtgcctgcgctagtttaaatgaaaaaagatcttcaaatttcatttttattaggttattcattttgataccctatggcattctgccgggccagggcgttttcgcgccgccgttttcgcgcgggggtcgttttcgcgccaatgcgtttttagcattataatttgggacggatttatacggacaaaaaaatccaaaaaattgattataatatggaaaaaaatcacaaaatatggacaaatatgaacaaaaaacacaaaaacattgacaaaaaatttctgaaaaatggcttgaattttcgaaaaattcataaacccttttgagagcttaataatacctagtctaataagtttaaaaatatcaaaataatcttttcctccagcgggattcgaacctgatctcccccggcctggttcagaatcccagatacgcagggattctgcggccatagcgattccctaattgaaacctgatttcagattctgatcagcagggtctggaactaatttatttgatcagcggcataaattaattagccccagaaaacttttttgaaattttccgacttccggtttccgacgtttttggtatcggaattccgatttccgaaaaatttttgggcctcggaatgccattcctgatacagaagtcgaaattcggaaaatcgttttaatcgtagagcacaccagagaaatgttctcattctgatggacataataattttttgcaggaaaattttctgtcccctaggaattttcgaaaattttcccgattttctgtgtgttttggggcgttccgattaccatgaaggaatgatcttgggtctgactgggtcgaatgggcgtcgccaaatggtggccaatattttttttcagttgcacgtcaataataaaaaatatttttaggattattgttatttcaatattttggggttttcaattttttatattttcacctttttaaggcaaaatttcagcaggaattatttaatagttcagctaaatcttgcatgaattcgtttcggaatataaaatattttacacttcattagctatgaaaaaacaaaaattaatatcctgccatagcaaaattggaatcctatggcctttcgacagtgggagcgatggatatcttttcgaacgtgcaaaccaacttgagatggccgatggagaaggcagaaaataaaaaatcttttttgtttaaaaaaaattgcgcggtcacttcttgcgatgttaaacatacttttcgatccaattttatctgataatcggatgagttttgctggagaatttggaaatgcatctcaatatgggtagaataattcccaaccctaaatattacagtgaaaaaattattttccttaaattcttgatcaatagggctgggatttttagacaaatgcctaaaatttctgcgccttgatacgcttagataagcatgaaaaaagcattttccgcttggtttggggtgtttacgatgacttttataatgcctaactttgcctattttggactttttgtgcttaatgcctatttttatgcctatttcgccaattttggcgcctactttcaggattttcgaaaaataacaaaaatgcaataaaaatgaaaaatacacccctaaaaatggatctgaaaaaatttcagaaaatacaccactaattgtaagaattgaaaaaaaaaatgttcaacaaaaattcttccccaaaaattattttgtttttttcattatttttatcgaaaaactttaaaacaattgaaatataagcaaaaaaaaagtggtttgatggatttttacgtgttttcctactaaaaagctttaataagaaattttatttgcctattttagtgcctatttgaggatttttgtgcctgtttaatgcctattttgcgattttttgtgcctaaaaatcccagccctattgatcaatatttcggactttttagtaaatatctatttaatattccaggttttaataggtataattccctgtcctaattataacctaaggttttgtcaaacattcaaagggactaattaaaaaataaacataataatttttgaatacaattaccctttttttgttgcatatccattcgtacgaaaatattttggcccggaataaatataccaatcgcttcttctcgacatgtaaataatatatccgaaagaatttttggacaaaataaaattgacaaaagttattggtcctcaaaaacctccgaaaatgactatgataagaaaaaataatttaggtgagcagtaaacacataaaatcactttcagacttcgaacttcgcaaggcgttgttcctttgctcaccgccctccgtttctttccgctgtttttctcttcctccgctttctccccttttcttttcctctcttccgcccttttcctcccctttcttttgctctccgccgcgcttccgttgctgtctgagctcccgcagcatcgccttttgttccgcgcgcacttcgctcactgacatcgctagccgagtgcgcacttcgtccatgcgagcctcgcaccgacgcgtgcatgccgcctgctcctcgcgtaggcgctgctgttgccgtgcaagacgtgcgcacaacggacgaaagaagcggggtggctccggttaggcagaaatgacgccacccattggcctagattga

SEQ ID NO: 17799 - DNA, 1487 bp, Heterodera glycines
  unsure (1)..(1487): unsure at all n locations
gcggtgcgctgcccgaccattggccgcgccgcttctgtccgcagggaccgcccattttggcacagccgaccaccacatttaagcgctgattaaagagataatcctaaggattaaaattaagcacaactgaaaatgggcattttaagacttgaaacaaataaacaaatataagaagcaccgatttgaatttctatgtgtgctcatccaaaagcgaggatgtccaaattcaatctgcacgtttgatctgtaccccgagacgattgctgatatggatgagccaaatgaaatttctgcttgccaagcgttgtacaaatggttgcacatttcgagacatgatggacagccaaaacgattgcgctgcttcgattctttgaatgaactgaacaaaaattgtgaatggatcaaaagtttcaaaaaggtcgccccagttttcttttgataaatgcaggcgatggtgctcttatgagtagggatgcaatttttagactctaaaaaaactgcaaaataggtaggatttaggttctaaaaaccccaatttatgatcaaaaatttaaaaagctgttccattccaaacatatttaacgtaaatttttgaaacttaacaaaatttatattctattagaaagtttggataattgtggaaggcgttataccaaaaaaccgggtttcgcccagttggccatccccaatttagaataaaaaataataattgaaatcgacttgggcactcttggcccaaaagattgagaaatgtcgcgtaacctataaaagtggtaaatttttaaaactcgtttttgcgtttgatttcctttcttcttattcaggcatttctctgttccacctcttcggtcaattatttaattatttttgaactgtctatattatttgaaattgtgcctttcgaatttgttaacgagcgaaccatggaaaagctgacattgcaagaagaatccgatagcgacgaagttgttatattcaaattgcagagatgtccaattatttgtgagacggtggcgggcgtggagggcgttcagtgggcagtagagactggacgggatcggatcccgcgggattaaattcgggatcccgacctcgggatccgtcccgaacgattttttaaattcatcgggatttatcgggatcgggatttcatcgggatcccgaatcgggatccctcccgaccattttaccaatcccgcgggatcccgcgggattgaagtcacgataatttttcgaaaattctccattttttaattaagatcttgattaaaaattaaaaaatattgtcatctgctaatttttcttaaaaaatctcttacaaatcccaaaaaatttccacgggtctccaaaataccactaaaattttcaaaatttgacgtaaaagttggccattttgtgacttttatttttttanaaaagaatatcaaaaaatttttcatttcctanatattatttcgaatctttttaggtagtattatgacacaaca

SEQ ID NO: 17800 - DNA, 1732 bp, Heterodera glycines
ttttgaaaaaattcgctgcgaaaaattcttaaaaatctatttttggtcccgatgcagttacaatttcttaatttccctaaaattattaaaatgataataggagacgaaaatacaaaaattgacattaattgataaaattataaaaatatatatttaaagctatgttgttaaatgttctaattcttgaccttaaagtctgactttttaggcaggatattctctatttttggaaaacaaaattctataaaaagctgatataattaccatccatatttttctaatcgaattgatcaattataaatatattagataagcatttgaacaaaacttatcacaaaacttgaaaaaaattgggttttagcaaatcccgataatcccgcgggatcccgaaaaaaaatcttcgggattcatcgggattcggtcgggatccgccccgattgtttttccaaaatgttcgggattgatcgggatcgggcttcagtcgggatcccgactcgggatccctccgacccctgttgtccggtctctagtgggcagacgaaaattcggaaaatttgaaccacgtcatcatcgatttgtctgctggtgtcacttacagcgctgatggaccagcgaaaatcagtcacttccattaatttattcagcttttaattaaatagcattcaattaaaatggggaagggaaaaataataattcctttcggtttaaatacagctctttggaaatgaatagggttccgaccatgttgtatttaagattggaattttatgttttggtgggctttctccctccgggtggaaggaacttggacaatttttacgtgacgtgtcacagcacaccacccaagtccatcccaccccccgccctgctgggctggtggttggcgccaaagaaataaaccattttcattaccagaaaaagcaaaagatctcatttaagaaaaatagtaaagccattaaagctatatcgaatgctgggtactaattgggtttgggtcccatattttggtcaaatttttcaaaatttaaaaaaaaatttttttaccgtgtaaaacacatttccttggggttttctaggtcgcggatcacgaatctggattttgactaatttcgaatcccggacccgaattcgaacaaaaagtcgaaaattaaaaaatttcaaaattgtaactggcaacaattagcataattggggaattggccacaattagcgtaattggcgacacttagcgtaattaacatctctttactgccccaaatcgcttatttttattttttgcgcacatggtagcgtaacaatatgttacccgtgctcataattgcccaaacaaatggcgcacattctgctgattgttcaccctcttggacaattcgttgcggcactttgtaaaatatttatacttgaataaaaaaaataaaaaattacgaaaaattaccatatttccagtaatatagatctcttttcccagacgcaacaaaattgtacattcttggtatcataagatagccattggattgcgttattagcttgccaaatttcaaaaaattttattaagtttttcaaaagttctagccaaaaaaatgaaaaaattgtcataacttttaaaaaccaataaaattttttgaatttagcaagctaataaagcaactcaagggctatcgtatgataccaagattgtgcaatttggttgcgtatgagaaaagttacgagtttatttagtcaaaaacttagc

SEQ ID NO: 17801 - DNA, 3041 bp, Heterodera glycines
  unsure (1)..(3041): unsure at all n locations
ggtagacatgcacctgctcaaaaaggaattgaaacccccaaaatgaaaaagcgaaaatcatttaagaagtacaataatttgtatataaaagnccgcccgtggccagttgtcaaaacttgagcaaatacggnccgaattatttggaaggcttttattgggctaaacaaaatttaataatggtagtcttaatcaaatttcaaattttttccaattattttaaacgaaaattgcacgatgagattattattattttatttttttcatttttacattcgtctcattgaatgaatatttcgttgttattaaagcccggattttaaggcatatgccttttttccttacctctacggcttaattcacacgaaaattaattttagcttggttttcagcttatcaccttttagtattttaaaaataaatttcaaggtcccggtcccggtcctggcttctcaggtcccggcaagtcccggtcccccggtcgcgtctatagtaaaaacattttttacttttaaatcgtttttttgcggcgcgccttttccgaaatcttgttggaactgggggtccggtagtgccgataggcaccgtcgggtttatgaaagaaaatggacggacaacaaaaaaaaaattgataattatgaaagaaaatggaaggacaacaaaattaaactcagtaaaaattgaaattaatgttcaaatgctaaagtaagaaaagttggttatgaattgtgtgtgcctttgagatttactccatccatcatctccaaccaaacatttcttccgtacatggcatttcttccattttccatttctccactttttgctccgcattcagcaaagtattcttattttaccagcagacggcaatgtgaatgaggtcaatgaagattaaatttaatggtactcaaaaattaacttagaaaaaagtacccgtaagaaaatgggtgaaatatgcataaaatgctataaaaataagatcacctttatagattttgaaattaatttttggtattttttggtttaaaaaaataaaatttttcacaagaatttctattatttttcaaaaaatacatatttacacaaaatttacatttcttattcattactgttcattcgtctcttattataaaaaaattattttaaaagctctctaaaactaatttttggtaagagtaccaatgatagcccccctttctcgtaaatttttgaaatttaaaaataaaaatatgggtttcgaggtcgttgatcatgaaattaacttggccaaaatgaaatgaaactgctgctcgctgctcatattcagcaaaatttgacgcgaattgttgaattagtcaaagtgtatggtctcgggtcggggggctcggggtcggagagcaaccctagtttatttaataaatagagccaaaatttgcactttttcacgcggcgacgcctaaaacgatcaaatttttctcaaaaattcgtttcataattctaatttccccgttggagcggacaaaaacaaaaccattaatttttcctaaaaaaaaattcgatctaaatcacaaaattcttgtgaaaaattttattttttttaaaccaaaaaataccaaaaattaatttcaaaatctataaaggtgatcttatttttatagcattttatgcatatttcacccattttcttacgggtacttttttctaagttaatttttgagtaccattaaatttaatcttcattgacctcattcacattgccgtctgctggtaaaataagaatactttgctgaatgcggagcaaaaagtggagaaatggaaaatggaagaaatgccatgtacggaagaaatgtttggttggagatgatggatggagtaaatctcaaaggcacacacaattcataaccaacttttcttactttagcattgaacattaatttcaatttttactgagtttaattttgttgtccttccattttctttcataattatcaatttttttttgttgtccgtccattttctttcataaacccgatggtgcctatcggcactaccggaccccccagttccaacaagatttcggaaaaggcgcgccgcaaaaaaacgatttaaaagtaaaaaatgttttcactatagacgcgaccgggggaccgggacttgccgggacctgagaagccaggaccgggaccgggaccttgaaatttatttttaaaatactaaaaggtgataagctgaaaaccaagctaaaattaattttcgtgtgaattaagccgtagaggtaaggaaaaaaggcatatgccttaaaatccgggctttaataacaacgaaatattcattcaatgagacgaatgtaaaaatgaaaaaaataaaataataataatctcatcgtgcaattttcgtttaaaataattggaaaaaatttgaaatttgattaagactaccattattaaattttgtttaagcccaataaaagccttccaaaataattgggcccgtatttgctcaagttttgacaatcgactggccacgggcggccttttaattaacaaattattgtacttcttaaatgattttcgcttttcattttgggttttcaattctttttgagcagttgcatgtctaccaaattgtatagaatggcagtggttaagcgggccagaaggtcctataaatgggtcataaagataacggacaactccactcgcgcaccccacggcgctctctctctctctctgcaccacaacccatccatgggagagacacttttcttttttatgaggttttggcgtctttttttggggacgagcacaggcggggggggggggggcttagccgcctcagcccctcccctcccccccacccctcccccgcgtaggcccttggggacgagccaatgcgcatatggacattctcagagagggatggattaacggcaagcgaggcgcagaaattgcgaggaattagacagggattctgaggttagataattatttgtttgcagctccactttaccttggtatttcttatgaggaaatgactactttgcctaattgagccatccaggctctggc

SEQ ID NO: 17802 - DNA, 1578 bp, Heterodera glycines
  unsure (1)..(1578): unsure at all n locations
tatgacaccaattgctgttgcactttcatgacccttctctattggcatttgcttttgccttttttggcatttcctcccccttaaaaaagccaatataggtaatagaaatattcagctgaacccttaaaaaggccagtcaaattttgcctttccactgcttccaacccctcaaatgatgctgcgctgccctctgatgacctttctttttgtcctttgcttaatgtgtgtccattgtaacttggccaaaccgaccaattcgatgacgcgaattcaggcaaagcgaacggacggacggagaacagagtgaaagtgcctttcccgttttaggaagtgtttcgaactctcatgggccccaagccgatgatgttggcttctcgtggcaaaaaagccgatggactgcgcggcgagaacactttccctgaaagcgccgcagaacgaccgacgcaggccttgggagaccgaaacgcggactcattttgggtggtggcggatgaacgcgtcccagtggcggtgttgaggaacgattggacatggccaacggacgcgagacgaagacgctgacaaaggcggacggagagaaaggcaccgaaaggaacggcacttttgggcaacgaaaagcgaagtcaaaagcacaacaatcagcgaaaccattctccgatcagaccattcatttgtctattcttttgcccattccaatttcattattgttttaccaagtaagcaaattataattaaatctttttatttattatttgatcagctgatcggccgcgagaattattcaactcttgaaattgtgactcgtttaaaagaaataactgaattagaaaagtaagaatttgcattccagaatatttatatgttacactagcataaaaaatttataaatatatgtggaaaaaatttctcgcagtcagcaggattcgaacctgcgcgggcaaagcccaattgatttctagtcaatctccttaaccactcggacatgactgcacgtgtgttcgtttgccattttttctttttaaggtcattttttaattcaaattaacaatctttctttgtgcaaaatccattcgtcttttcttaaataatttttagctttaaaaaaaatttctttttcttgacgactttattcgccaacgaaattattgataaattggattaaggcctttttcgcatccattaattaatatttatttaattaattgatgaaaagtcaaaaaatttggatacgccaatattaaagtcatttatttaaagtaaagtgaaaaatacttgtaagaacatttaaacatatgaatcatcagttttgtctttcttttcgtcctttttcctcttctctcacttttcctttttttctttgtccatcattctttcttttcctcttttttcccctctctttctttttccactaaagcttttcgtcggagaattcgccaaagcaaatcgggcgcaaagagtcggagaacgatggccaatcgaatgggcagtggggcgagcaccaattcggtgctgcgccgctccaactcggctancatgcgacgagcggcgctttccggactcatccnnccgcactgatca

SEQ ID NO: 17803 - DNA, 1685 bp, Heterodera glycines
  unsure (1)..(1685): unsure at all n locations
aaggataacagaatggaaggaatgtcatttacgaatggtaaaaactcaaccaatttatgtaccggccattcacagttagaatttggagttgcggtcgctcttcgccgcggagactgtcaaagaatgccttaaaaaaantttgaaaagaagggaatttagccgaattacttgaatggcatgcttggagcatgaatagggactgcggtagggaagtgccactctgccttggatgctgttgatgtttagaatggcaccatcgtcgggaatacaccccaaanagggatttggtgatggccacgaagccgaagaaattcacctgaaaaatgaaataaatattcacagttttgtgtagactaaaatgattctgtggggataatttcgaccccttcccttacaccttttgtctcaccatttcgattcgaactcttacaccctctgtctccccttttctctcccccccctcgttcggttcggcctcctccgattaacctccatcaatcgccgatagacttccatcgatgtctcatcacatgatcctcggctggaaagtcccgcgttgttaaccaaaacatcaatggttttcccatcaattgaacattcgcataattcccttatttgttccattccatcgccgttaagttccgaaatgtccaaatagcggaagacaggcaaattggcattttcaacgccattttcgtccccccatttgattagttcggcacacagtgcttttaggcggtcgatgcttcgggcaaccaaaatcaatttggagcccttaaggaaaactttatttaacagaaaaagaattttttgaaaatcgttcattaattttttttctgacctttgcgtaaaactcaaaggcaagtgaacggccaagtcccgagctggcgccaacaattagcacagttttgtttttcaattcgagttttttttgcgattgtccgccgaataaatatttaattaatttgtaagcggcgaaagcacaaaatggcgcaaaagcataaggaagaagaggaaacacattttgcgaaaaggcttttaattgggcataattatgggcgaggcgcgggggcggctgataatcggcggagaaacgaaagtcggaattcataggcaaaagggtaaaacagacagacaatgcttagaagaaaaccaaaattaatatgtattcaaaataatattcatagcacttagtgctgctaattgtgcgctgatcatttaagtaccgccgatggctttatgcccattgttcaaggtctcatttcgtcactgatgagaacaatattaaaaaatattggataacttcaataaaattatctaaagtactaattaccgtacttaatcgaattctggcgctttttaataatcagcaactaaatgtgaccaacgctgaaattctttcagcatcccttttaacaaagccgatggtaaaaatatattaaaaaatataaaatcaagatttccattatattattttaaaattaattctcagtgacgaaatgatcggcacagttttcattggcattttgtccaatgttaaattgacaaatgaaatgaattgtcctccctcaattcgcttcgtccgctttttctccttccgtttcgcttttttcttcttccattacgtcttcgtcagcagtggggcgggatactgctgatattcgctgatcagatcgcccaatgtt

SEQ ID NO: 17804 - DNA, 355 bp, Heterodera glycines
aatttatcgtaaaaatcatttttttttgtaaagatctgttagaaatcgagcttaaatttcaaaattcgccaggcggcctatcggcaccgccggccccccaaaaacctattttttcttaaaaaattagccaaaaatctctaaaatttggtaattctttagacaaaatctgtgtaatttatgccaaaaggaattgaattgaggcgatacattgaccaaaggaatgtggagccatcacatcattcataaaaaattaattttttgtaaaattttttggagttaattcaaatcaaacccccgcccccgcccccgcgggggcggaattatcgtgcccccgtccccgcccccgatactctga

SEQ ID NO: 17805 - DNA, 1834 bp, Heterodera glycines
ttttggtatgttgctccttgtccctttatgaaagttgcagcaaaagctaatcttactggaaactgatgtctttttaacggaacggggaattcgctttcagttattaaagaaattctatgtatgtaaacttctgaaccatttttatcgcccccgagaattacacatcttaatacgttttcttttaattctaaaacttgcaacattgtcccgttacaaagtccttcttcaatattaatattacgtaacaacattactttgcagttctgttttagttttagctcgtgtaaaggaaagccaggtgcattaaaagaattcattatttcagtagttactggaaaattgtttgtggtttcaacttcatcaatacttaaatagctaactaactgtcccggaaaatgttctaaagcaactgcattatggtaatcagttaaatcattataaggtgaaagaataatacggtttttaagttcattaaaattattatttaaaaatatatctccatatatttcgtgaactaaatttgaattttcagataatatacattcgtttggaagttgaataaacccattttgattaaatccatttcctatttcgagtacttgttttgaaaaactttcatcttttgctctgttatttataatcaatttcatatgctcaaatttattccaaaaaatcgaccttttaatcgttaaatcaattatttcagattttactgcaaacttttttacaggtagtgtttgtcgaaaatcaccagcaagtattattgtttttcctccaaacaattgattgcttttagttaattcgcgtaattttttttcaatagcatcaagcgcaaatcttggagccataggcgcctcatcgattacaaaaaaatcactccttaaaatttcttcagatgcttttgtaccattaacaacaccggaaacagtatacgcgttaagatttaatggaaatttaaatcgattatgtatagttctaccattttttaataaagtcgcagcaattcctgaaaaggccatattagttatttgttttttataaccacgaatcaaatgataaagcgtatttaaagtaaaagattttcctgtgccaccaggaccatcaatgtatattaatttttgtttaatttcacccgttaacacttttttaataatatcataaatttttttttggtcgttgttcataaatttatataaatcttccgcaatttttctttcttcttcatagtttatgttttcctgttcttcttttgtggttgtttcttgaggtaggtttttgaaatcagctaaggatttactttcttgtaataattttttatttataattgttaatgacaatttataagcaacactttcagaatttttttttaaaaaatcttccgataaattatttttaaattgttcccataaaagttcgggatattttggatcgccaaataacaaaatacttgtgaatagactccttagtgcagctgggaatcgaaactgacatgcttcttttaggcaatatttccattcgtcatcgtttttggttaaaccccgtgccaaacatgcttttgcgaatgtgttatacctttcaccatttacaacttttagctcatcaaaatttttaccatgcacatgaagcaaaagatatctaagataatatttctcaccttcagtcggattaactgggtacattctaccaattgttttacttatttccgggttttttcgcaataaccattttccttgtttggaattccacgtacaaaatttgggcatttcaggatacaaataattaggtgcctgaggattttctttaaaaaaatcgaaataagccatcaatttgcttt

SEQ ID NO: 17806 - DNA, 1469 bp, Heterodera glycines
  unsure (1)..(1469): unsure at all n locations
gtgggtcagcggaatggacgaatcaaaaagaacacaaagaaacggaatgccaaaatgtgctaaattattcaaatntaaacatggaaaggctaaattcgctgtttgaaagtgtggaaaatataataaaatcagtggaaaacgcagaaaaaatgttaaaacaacagaaaattggtaaaaaatataataaaaagttgtaaaaataattaaatttctaaaagtatcaagccgacaggttggtttcctttctccttaatttaaattaaattttgtatttttagatttttgattttattgctccgtttgaaatgggccaaaataaaaagaaaaaataacaaagattaaaaataaaattggtgcattaattgcggaatgggcagcgaagcacaacgccatcatcagttgatatgcacttaattgacccttttctgatttgattatattaattagtgattcctttttcaattaaagctccaacaaaatattattaatatataaaaacatgaaagtcaattataaaggggatttccttttaaaatttatcaattatttactaatacaacctttaaaaatgtgtttgcttgagcagagctgcactaatcaaacctccatctatttccattgaaacagaagtgctcttcaatgggtcattggacaaatccaaaacgaatcaggcatttattcgttagggcacaaagaatttgcgaaccttttgaaaaccataaaaatttgggcaaaaagtcgcttatatgtttgaattttgctttccaattttgtttttcagctcgactcatttgttccggcatttttggctattttaacggcgttactttggcaattatggcatcaaaaatttgtctactctttcctaatgcgcctttatcatttttactgtaccaatttttctccgtttattcaaaatggtaaaaaaaaataataaatgaaaattatttaaataatttaaatccaaaatctactcggaataaatatttcatggattggatcaatgcttcgattttgcttggaattgttaacgccaatgacaattaatgcaattgtgtcacgttggcccccattaattggccaaagtgtaatgactgtaattaccccaaaatttccggagcaaaacgcatctttaaatgtgaacaaattcacactccaaacaattctcgaagaattagccatcggtaaaaaaggatattcattaaagcaaaacccaatttaattattcaaattcctggtaatttagcaagtgaattctttccgaggaccaaaaaaactggaaagcaatttttgaagaaattaaaattgagcaaaaatttgaacttttgcgctcattgtctgctcggcttcccacttcgagaatttcactacaaattgtgcttttcaacggagcaaaatccaaacaaatttgctgaaatgggccaattcagcaagtgttgccgacaaattggtccattaccaattaatag

SEQ ID NO: 17807 - DNA, 1565 bp, Heterodera glycines
  unsure (1)..(1565): unsure at all n locations
aatggtatttctcgatttttcgttcccaattttcaattgtttgctaatgatttcgcgcattttgacgaagcccacaaaagcaacctgaaaatgaaaaaattaattaaaatttgtttttggtgttttgtttaccaggctgggatgaccaccgtggaaaggtcattaacncatgggttctggttaaaatttgcgaaaaaaagaatgtcattttgggccgatgagacattaaaccattcttggacataggaaaagcgattgttgtgctcgtcaccaaaatttgttgcagttatgcagacaaaaaactgaaacttatataaattataaaattgctcaatatttccatcttttggcattaattaatgtgactgatttctatgtaatgtcggttctaattgtgggccctaatttccccgtacaataataatatacacatggaataatgtcctttattccgaaggcggatccaagaaatacaatatgctaatataatgagtaaaaaggggaaagggaccccgatacgtacaggacggaaggggaggggatcgggggtaaatgtgatcccggttataagaatgaattgaggtgattgatcgctaggaaatgggccacattacgagaaggggcggagttaaagttgatcagagtgatcagaggcactaacaaaaccagacagtcagataataagaaataatgtaatgtacaattaattatagagatatcatgaccataaataacgccatgagcagttggccaaagaatgtggccaccgtgtaaatggtcattttacattcatttgccgcattttggccattttgttggtaattgctgcgcaatttgtagaccaaaagtgtggccacattcagaaaaaggcaaacgatgccaaaaagaacggcagaccaagcggcgatttcgctgctgttcaactcctaaaaggacaattttagtaaaatataattaaaactattaattaaaataatacattttccgtcttatggtcgtccagagtaaaggtggcattgtcattttgaacatggatgtacatgtccaacccaaaaattggggcggtgaaaggcagcggaaagatgaaagagaaagcgacaacaaagggcaagccgacacgccacaactttaattaaatgggaatttaaaacaaatttaaaataggttaacaccttttcatatttcatcgggaaaagaatggcgcttaatcgatttaacagcaaaaaagcggtcaacaaattctccacatgaaaaacgtaataaccaataaaaaacagaaatgccagcaaaagccgcggaaatttgaggtaaatgggaaggaaaaggccaatcttgccaaaacgatgggccaaaaatgcaacgaagtaattgatcagactctgaaaaagagattaatttatgtaaataaagccgtaactttaattgcaatgattaatttttaattattttcctactaaaattgcacggatgataatgaggatgaaaagtggggacgaaaagtgtttgaagttcgcgacgatcacagtgaggagcgagcagtacagcacggcagacggaatgccaat

SEQ ID NO: 17808 - DNA, 1346 bp, Heterodera glycines
tcattttaacatactttgaatttttattaatctgctctttttatttcagtatcaaatggtgcaaaaagagctcattgggaaattcgcatcgggagactatgccaagaaaccaataagtttccgtgagtcagtttcatgtttaggggagaggaaagaattagtaataaacagtccaagatgaaaaccaatgaaagttcatgggaatcgggagacgaactccacccccatcctatggatgaatagttttaaataactaatattttcaaatgggtaccgtaacaattgtttagtcggataaccattactctttgcaaaaggaatcgacgaaattacgcttgcgggggcggcagcacagaaggctttcaatcctggtccaacagtcgctgagtactttttgaagaaaaatggtattacacttaaacatccgcaattgccttgtttggtgcaaagcggcggtggaaaccataaaagcttttatcccatggaactgttgttctttgcccaataatttgaagatgtccatttctttttcattttttatttgtttatttttctataagtaaaaatttcgattgttcgattatgctaattaatttgttttattacaatattcaattacctttttacttgacttttcatttcaattgtcctatgttaatttgttacttactgttagctattacaacaatttcaaatcgtccagcaaccacgaacgtcttttcttttcagaatatgccgatcttcggcgatccttcctccccttatgacgaagccgtagagaaagcgactgcggagacgatgacaaatgagaactggacattgatgttgtgagtgcgtacggattcacacaattaacggcgaacaaattgttgattcgttgcagatattaggaagggactgaaggcggacagaaaccttaagtaatggaatgaatgaaaggcaaactaataaaatcggtaaatataatccaaaaggcgacccgctgtccctctgaaggatcgggccagacgacgcgccggttcccctgccaaaattgggcaaatttccttctgccccaccgccgtctctgctggacagcagtgatgagagcgttctgtggccctgcgacgtcttcagtagtcccatggctgctccataaaaatcagtgacaccgaatggaagcaaagcgttgacatcgtttgcagttgaattgccggagaaggtggggaaggtaaagggaatccgtacgacccatggccatctgaaaagggaaatggacagatttcacattgcaaaatgaacgaaagaaagcgacgaattgctaacgtgtttgttcgttcattctttccccttctctctttgtcttt

SEQ ID NO: 17809 - DNA, 1373 bp, Heterodera glycines
  unsure (1)..(1373): unsure at all n locations
taaagaatcgcaaaaatttggcagtttttaatgaaaatatgttaacaaattgcactgaattttcaaaaaaaatttccggcggcgcctagcggcaccaccggacccccccccaaaaaaaaatttaaaaaaagttgtttgaaaagccaaaaaaaaggtcgtcaatttcatggctgccctccagaccatttcacaaaaattttggttgactcccccccccccccctcttctcatgtatggatactaaaattattctcccccccccccccccctaaaggactgagctttgagctcgattcgacaaccaacaatcattgtcagaagaagaaggcgattgtcagcaacgatccgaatgtcgtgtcgagtgagcaggaagaagcggacattgcgaagggtcctttttggttggcttaaactgagaatttaaatggttcagccattgctttgtcattgcaagagggagggaagcagcagcaatcctcacaaaatttctacccgagtgccgtcgttggcacagctccgacaaggttttggcatatttcagaaccttcaattgaaatgggacaattattcaaatgttaagccaaatgcccattaatcccacgacacaaaaatcgcagttcaaaaaagtgaaggccctttatgactttgaggcggcggaggacaacgagttgtcctttttagctggcgaattgataatcgtatacgacgataggtttttattttttggcttttcgttttgcgatcacttcgaattccgtccgttgtcagtgaccaaaattggtggcgcgggtcgacggaacgcggcggcggagcgagcggactttttccggcgagttttgtgaccgaaaacttcgacaacggacaaatttcgaacggaacggaacgaaacggcgagagaacggaggcagtggaaacggcggttgtcccaaaagtgcaaatcgatgaaactgtgctgatgaaatgcatcgaactgctcgagaagtgtgaccccggggccgacccgtcgtccgaccctgccgaattgccttttctcgagcaaatggcgaaggctcaagcaccactcatcgatcagaaactcgtcaaaattgacaaagtgagcaaggacgggtgagccattgtccacttgaggtgtgtttagcagctcagcatgttggccgaggtggacatcgcaattcgcgaggtgctcaccgcgtatgacacggcccgtgcagcgggtgcccatgccaatgcctttctcctctcccgcgggctcactcgcctcgtccgcccctccgcccgtctccttcgcctcacccgctttcaggtccgtctgttaatacgccttcttttcccacccaatggactatgaatggacagtgncaacagcagcagaa

SEQ ID NO: 17810 - DNA, 1485 bp, Heterodera glycines
ccccccccccccctcaaatgctttgtcttcgcttttttaaatgcgatttttttttgtctcacaaaaaaagagctgaaaatgatcgcccctcttcccaaacccaaggccaaaaaacagcgaattgtaataatgacaaacgattgaatgttatgcaatccgtcggatgcccccgccctttggcaaactttgcaatttcttctccaaaatgaattcgtttcgttcatcaggttgtgaccgtccgtccgtccgtccgatctgtccctcccttttccacttttccctttcgccccccttttttcaccaatcattcgttgcgcatattatcaatatttatttatttctctattttcttcgcaatttcattttttaaattgcaattgcctcaggtcaaaattaaaattcgatttgcgtcggtcgcctttttccgtcttcgccatgaattacttctcttttcttattcttttgaatattatttttttgaattttggcctttcttccgcaatcgaagggacggcaaacgaagaaagcggtaataaattaattagaaaataaaaattaataaaattgaaaattaaatatttttagttaaagagacaaccgaaaaagacatttaatgtttttatgaccaaactcaagaaataaaataaaagaagacaaattcacgagacgaaataaaaagaaagtaatgaaagatggacacaaaaacaaagacataaattttgatttaataccatcaaaatgcgtaggaaaattcaaatgccaaattggtcgaaattgtctcgatttattcatagtgccactttagcgtgttctcgggtcggatttggcctttttggcagaatttcatggccaaacgatgggacaaaaggggcggaaaagaaggacaaatgggccaaatggctgagtgtggagacaaaagcgaggacggtgtcagattgtgtcaggcaatgttacgaataccgattttggtcagtttgtggagggaagaccatggatcaaagcgagaatcagtcgggaatgagagtcaggaatggaaagggccgagtcgagagtgagtctcgagtactccgctgattccctttcagccattccgtcctcttcgagttcaaaacacacggcgcttcctccaaaaagggacagtgtcaaatgtttttgcacgcctcggacaattgtcggggagaacaattgacgccaatttaccgggtaaattccaactaattttttgcttcgtaactttaccgtatcatatcgtatgccttaacagattgaaccgacgctgggaaagccgagcaaagtgttcgtggaatgtttgaaatgtgctgcattcgcaaaggaagacggaacgccaacgacagttatttttgagcaattggaaaagccgcaagaaatcgccggaaaacggaaaagcacacgtaaaattaaaaaaaaagcatgaaattctgaatttaatttgaagcgattctggaaattcaatggttgaaatga

SEQ ID NO: 17811 - DNA, 2076 bp, Heterodera glycines
  unsure (1)..(2076): unsure at all n locations
caaatccaaccaaaacattgtccgcttcagcgtgtgtggtcacttcgaaagttctcncagcggacgcctctgaaaaggcactgcaacaattccgagcaacaaaaacggcatcagtgagcaggtgaagcagaagtcaaagcaaaggaaagacaaaatgaagtgggaaagaacagcagggagaagccggaccaaatttcccagaaaactcaaaaatcgcaaattaaaactttcccctctaccgttacctcttttgaaaaatagggttgaaaaattctttaagtgaattaagcacgttaaaatttcagtaattcagtcggtcattccacggcttggggaagggccgtgggttcgagaataaataatgaatggattgttaagtctgaacgaatgtgccttcatttgcttccaaaatggctgcctaaacgcattctttgagcagagcgaagagtcggagaggacggcgaaatgccatttggacatggaaacggaaaagtggggaaaacggattcaattgtcagagaatatttccatttctatgggcttttgtagtgaaatttgcacgcccggccaacagagggattattcgtacccaaacaaaaacggatcagtgatcagttgcgtacgctgtggtaagtgaagtggcaaaagggcggcggagcgattcattagaaaaattaataatgatttatcacattaaaaagttgccactttgccatcgactttggtgccgagaatggaagggacgacaacaacaacagaaagcgcaacaacagaaacagcaatcgaagcagagaaaaatgccaccgaaattggggcaagtgaaaaagggaaaaattaaggacaaaaaggcataattaaggacaaaaaggcataattaaggacaaaaaaggcataattaaggacaaaaaaggacagaagaccgaaaacaaactaatttctttttagatagaaagtgaaaccgccacttcgatgcttttcagtcagccgatggaattggccggggatgtgagagacgaaacggaagggaacggaacggaaaaggtaaaggaaaagcggaaaacggaaaacaaattagcaaacaaatgaaggtgatcgagacgacgggagaagcaaaaattgaaacgatcactcaaaaaggaaaaacggcggaggaggaagaggaaaaagaggagaaaaaggagcacaaagagacaaaggaggagccggaattctcaatggacgaagagaatcagacagaaaaggaaaaagaaacggtaagggaaaagagaaagaaaagaaagagggaaaaagggagagaaagagagtgaaaaaaagtaaatttagacggaagaaagcacaacagtgacggacagagtgccaacattgccaattttgataatgaatgaacaccaaggcagtgaaggaaggccaaagtcagtgggaatagcagtgccaagcgaaacgaacccaacggcaacaacagcaacaacagaaggatcagaagaaggcgaagaagaggaagaagcacaaaagaccagggaaaacggcacgacaaaggcagctgatcagccgatcagcgaaagaaaagtcatgttgaaaagcgaagaaaaggtgcaacagcaggaggacgatgtaaatgcaacgacggcatcaagcagtacagaagaaacagcagtgactgtaaaggtggaacagcaggaggacgatgtaaatgcaacgacggcttcaagcagtacagaagaaacagcagtgactgtaaaggtggaacagcaggaggacgatgtaaatgcaacgacggcttcaagcagtacagaagaaacagcagttactgcaaaggtggaactgcaggaagatgatgcaaatgcaacgacggcttcaagcagtacagaagaaacagcagttactgcaaaggtggaactgcaggaagatgatgcaaatgcgacgaaggcttcgagcagtacagaagaaacagcagtgactgcaaaggtggaactgcaggaagatgatgcaaacgcaacgacgggatcaagcagtacagaagaaacagctgttactgcaaaggtggaactgcaggaagatgatgcaaatgcaacgacg

SEQ ID NO: 17812 - DNA, 3690 bp, Heterodera glycines
  unsure (1)..(3690): unsure at all n locations
aaaggcctaaataggaaacagagctggcttatggaaaaaatganctgctaattaagagttttaatagttcaaacgctacgctaaaattaaggtttttcatattaaaaaaaaaacacnaatttcctnttattgnaatgaataaaaaactattaaaaataattattaaaagaatcatggcgaacaaattgctctcaaaaaaaacaacaacaccaaccaacttattatttatgcatttgtgcataacatttttggtgtcatgtagtggtgacgaaacaaaaattattattatttgttattaatttggttttagtatttgcccgcaggtggcaggcaaataaatgaatgaatgaatgttaatgacaggcgcgagaaaatataccgtaatcccctgtaattgatccctttgatgcccggctaattaggccttgtgctgctttctgaacaacaccaccgccccgaagctgtgtatgtacaacaacgacaacaaaaataataatgatgacttgtttttacttgaaaaattgagtacgggaaaaaggaattaatgacccctgagaagaggaagaagccatttatttaatagccccctcattaattggggatttttattcgagattctcgagatcagccttttgccggtgaagaaaagaaagataattgttgagaaggaaaatgcttaaaatgtatttaatagatagaaaataattaaggaaaaatttataaaataatatttttaaaatattattattattaaacgaaaaatcgttaaaaacactaaaaatgccaacatcagaacaaggattagagtttttttaattagttagtatagtcccaagttttttttatccaaatttaggacaaaaaagttaataaatttagattttggccaaaaattcaggtttgatttcagcacaaatatgaaaatcagcaggaccaccttctctggactctgtttattatagagcgggtttttagttattaaaaaaacgaccaaaaaattgttggaaaaaaatataaaataaaaatagaaatagaaattaaatagaaaaaataaaataaaataaaaagtgcgaaacattacatttttattcaaaagcgtctaaattaatgcacaattttgtatttaaaaaaaaaataaatgaaacattgaaattttacaatattattagattatcaaagttagataatagaaaatcgaaaatacatattgtacatagcaacattattgaattgaaatttttaggaagaaaaaaaaattaaataattttttttttaatttttcccccaaaatttgggggatttgagaggcaaaaacatcaaaaggaaaggaaacagagcaaataaaatatgcaaatgagcaaccctctccaacaaacacacatatgtaggtattatgtgtgcaatgaaattgattggctcccaattcgctgcccctcgggggaaattaatatgaaaaatatgcaaaaaataaaaattggcggcttcgattttaaataaaaaataaaattttataatttttaattttttgaaagaatatgtattataaaaatacggcatttaagtccccaccttgacaagtcgggatttctcctggaccgggattttttctgggttttttccggaacatacaagtttaaaaaaaaattatacataatatctttgaaaaattcctagaattgtttgtttaggaactataacaaagtttcattgaactgaaaaaatttaagcccatgtatttcggccagcaaaattttttaatttaaaaacaaatttttaaaattttgcaggctatggctagtgcctacctagcccggcagcaggtggtggctctccaagcgtataaccatggcaattaaataaattaatattaatgttcgatttttttttttgctctaagctaacttaaacccaaaatttcccaccactttttggtacaaatcgtcggattaaagtggaagaattttttttgttttctgccccattattatggtggaatggagattttggttgtgtagtgacttacttacttacataagtgagtggagaatgaatgaatgaatgaatttgtatatggaaaatgggggaaaaatataatttaatgcatttttgcatccgtccgtccgacgacggacaaatggacacaaaaatggggggggggacgaagacggggggtgggggacgtccacaaaaaaaatcattttatgcacataaaagcgctttcgcaacagtaataaaatatattttttttgtgaaaagtgcaaaaaaaagcaaatgaagcgacgatatttatgagcggcaaaaaaatttgtgcgttggaataaataaatcaaaaatttttttttaataataatagtaaaacagataggttcggcacgaagataatgtgcggcatttttttcagggggggggagaaaaattttaatctttaaatttgaatcgattgctttaaggaaggcctttagtgaatgggctcagtttttctattattttcgttcattttttccccaaacatatccatttcttttggatatccgctgaaggaataaatgaaatgcgaaactgtttattttatgggggcattaatttgaaattcaatgaaaaattcaaaagaattttaacttaaaatatttcaaaactcgaaaaatattatttttataaaacaaaaaagtttaaatgtgaattcgagaaaattgtgcaaaatttaaaatgtaaattcttggacagaaatcgaaaggatttgaaaagttaaaaatgcaaaattcgaaagaacatttcaaataaaaatttaaagatttgaaaataaatgcaaattcctaaatatttttttgaaaattgtcgatggcactttttgcctttcaaattacttcgaacccgaaagcaaattgaatttgcattttcaaataaaaaaaaatgttaaaatgaatgtcagcagtttgtgacagacagcagcaagtttctccaccggattttattatcggacaatttaatttcggcttactttataaaaaatgcttgcactaaagtacatgttttgttacaaaatgctaaaaataaaataaaaatatatttaaattttatttaaatttaaaaaatgctaaaaaaaatatgaataaatcttcgaattttatgttggcagttgaatttaggtgtactttaattcttcctacaaattgcttaatgtatggtattgtgtaaaataatatggcctttttgttgccatggagaaattaacgaattaaaagtaaatgaataaaacaggtaaaaatccaggtaatttaaaataaaaatttataatacaaaattgaacaaaatttagtttaaaaaattatgaaaaattgttaattttttgtgtaataaagccattaaatttcaaaataattttaaaaatattttggggttaaaaatatttaaaaataaattttaaagaaatactgaactacgaattaaaaaaggctattcgatttctatctataaagatagaaaaacccgcattcaacaaatttaaaattttttttattagaaatgtgaaaacaattcgtttaaataaaaaaaaatgagtgaaaaaatgtttttttggaattaaaagatatatttaaaagtaaattatttaaataaaattaaaataacatacatttgtatgatctatctataaatggtataacagggaacagcaattctgattgaaaataa

SEQ ID NO: 17813 - DNA, 3346 bp, Heterodera glycines
cctcattaaaatagaattaaaatataaatgaaagctatacttttattgcttatgtttttgaaaattcttttaaagctaaaatttcttaattttcactgacgaaaaccaaaagtcggaattccgtgggtacggcggggctctcagcgagcggcgctgcggaatgagtgtgcagcagagaagggccaaacctaaaaataaaatgcgaaacgctaaatttattaacatctcggttatacggactataaaacaaaagaaaaactgacaaaagaatttctgaaattaaaaaagaaccccacacgaaaattctaattgattggccaataaaatggatattaacccaaatcaattttgtaattaatcaaatgcataaaataaataaatttcgacatgggcaatgatcattagagtttttcatggatccaggtccaatttatttttgtcaacctaggtttttcctagtcctaattttcttggatttttccaaaatgccgaggcacagattcaataaatggaatcaataatatttgagtcatttttgattggataaattgtaaaataatagattagaagcaatttcacaaaatgttctgatgttcgactacataatcaggttttttgactcgatgctctgatttttaaaaatttttcgataccataccctgttataacattcaattttttaattgttaattttattttgggttttttgccaattatttaattttcaaataattttcatttatacgtattttgaaaataaatgcctcctattgttatgaatagggatgcgacttttagtgacgaaaaatcccaaagtagttaactaaaatagtgagtaaaaatgccaaaatagtgagaaaatagtgccaaaaagtccaaaatagtgacataattttcagccaaaaattgagcaaaaataatttttattcactatttgcagttgcaaatgagtaggactgggatttttgagggcaaaaaatccaaaataggtacctaaaaaataatttttagaattaaaaatttttgcaaagaaagtgaattttgtgaaaatttttctatttcttaggagtgatttttgaaaatttttatgtcgattcttaggggtgtattttttgaaaaaaaattttaggtcgattcttaggggtgtattttttggttttattgcgtttttgttaaggaattttccaaaaaatgttgaaatagtgacaaaacgccaaaatagtgatttttaactattttagtgacgaagtagccaaaataatgatttctagtgaccgatagtgacatcagaatcgaaaatttttaatgcagtaatgcgttttttgagctcctttcttcaaatcaattgagcaaaaaatttagttaaaacctaaaaatcgcatccctagttatgaagatcaaaagaaagcatgaaatcaaatgtacagaaatttgctaatgatttcattcctccagcttgttgtccccaaatttttcttccatttaaaaatggtctttttgacaatttccaaaatttaagcaattttccgataactaatttttaggttttgtctttttattttccaataatttttaattttttttttcattttttctttcttcgttattttttatagctaatgcaaaattgtttcttccatcactcaattgtaccattgattatgccaattttcttgcaaatttctatataattttggtgcgattctatgtttgatgtttttttttttgcttaatttcacttttcattaaaatgaattttttacaatttcaaatgttactttatttgcttttaatttaaaatgagttttattatcagggttgccagattaaaatttttaaaagcttcatttggcatgcaaaaaaaactcatttgggtcaaaaagcttcttttacaaatttattcaaaacacatttaaaatgttcaaatgttatatttttgattgtccatgatcaatttgaacaattttatgttaggactaagtattttgtgaaattctatgcatgaaaaatcgaatttgatttttttgcggcactttttccaaaaaacttctggccaacaacaggggcaggcggtgccatgctccgcagggaaacattttgtgaagaatttgaccatatttttagcagattttcattaaaaaattcttaattttatgccttttccccaaaagcaccaaaaatcctcaacctcaaaatttttcagaaaaccacaaaaagcctcattttaaaaagctagcctcatttacctaccacaaaatgagctaaactagactagtgataaaaacaaaaacttcaaagatgctaaactttgcaaaaaaaaaatacaagaaacgagagcttcataatatataaatttaaaaaaagtaacaaagtaaataatacattaattaaaaaataaaataaatttttcaaaataacgattaaaaattataaatattttttaaatataagcgcaaaatcaataattatattaatcagtgagcaaagtgttgtttaacggatttttttattcttgaatgcaagatgcgcaaaagaacagattgttacatttctttagaatactattgattttttcttaaaaacaatttatttcaatagtgaacagcaaatataaatgaaaaatgctttatacacaaaataattaatttaaatagttgaaaggaattattaacattaattgatcatggtttgaacagataagtctacgatttaaagaaaaaaccgattttaaaatatttttaaaatccttcatttgttggtaccaaaatgaacaaataaatatatgtcaaattttttaaatggtataatgatggttagaatctagcatataataaatagtagaaataagtatacaaatgcaaaatttgaaaataaaatgaaaaataagataaataaaatctattataaataaagcaaaatttaaatttgaaaaaaaatcaaatctatctttaattttatttcattttattttataaattatgtacttgttcagaaaaatgtaaataaattattatataacatgaaatgtaaatgaaatacaaatagcatttacagtgcataatgacttttaatatgcataaaaattaaaggaagaactattgttttcgtttaatccaatgataaaaatataaaagtgaattcaattgaaaattcattttaaaatattttaattaatttttaaaaacaagttaattgcctttgcttacattaaaatataataaaatataaatgaaaatgaaatatccgagacaggattattaaaagtagaagaaattattgctggacgagagttgtaggggttggatgagaaaatctttcatatatgcattaaaaagctaaaattaca

SEQ ID NO: 17814 - DNA, 602 bp, Heterodera glycines
aaatttaataaataataataattaaaatttatttttcttgtttattctcatttctcttcctctttcttctagagtagagcggtaccgggaccgggccgggaattcccggtcatccgaggtcccggtcccggttcccggtcccggattttgaaaagctcaggtcccggtcccggtcccggtagggcaaccgggaaccgggaaaaacaagcactggtaagaatggggtctgagtgaaaaattagtgagaaaattggagttaaaggaaaaaatttagaaataataattaaatatattcataaagtagcaagaccaactgtgcaaatggcctagtggctagtagtctccttcactttcccttcttctttcccctggttcgatccctctacagaaatgaaaatattttgaaatttctttttatatatactcatggctttcctatcgacaaaatatgattcttaatttttttttaattgtattttatcatttttaaagaaaatccgtacaaattgagcctagtaatcccaaaaccagccttttttgttgaaaatctgttaacaaatctcactcaaattttcaaaatttccaccggcggagcctatcgg

SEQ ID NO: 17815 - DNA, 1473 bp, Heterodera glycines
  unsure (1)..(1473): unsure at all n locations
tgcaggtcctaaaataatatgcactcaattaaaataacttaatttaagccaaaaataaattaatgtaagccaaatattactataaaattctaactctaattaagaatttggcgcagaaaatttttattaattaaccacaaaattattgattttaaattatattttctcaagactaatttggcttaattttcttacttttaaattttgacattttacacccctaaattttaaagtttttagtgaagatattataattgtaggtatagttcgatttaatgtaaattaatttttggtaaatataattttatcatttaaaatctctcttcagaaaaataaacttttacaaaacatttatggttttttcacttttttttactataatcaccggtaaaaagtatatcagtgcctaatttatattcttattaagaatatattatttaaataaattacttgtataatatcaattttaaaatttaataaaaccgaaacaaatataaatatgtttataaaatatatattttcgttcatcacttataccaaaattgactatattaattagattcattaaatgtatatttaattttttttatttatcgaacaaaccacaaggtgctgtgcactctaacagtggcgtaaacacaaaataaaatcaaaaattcaaaataaaatattaacagtagtcaaaaatcacataaataagtgtcaaatcacaattctgatttttttaaaccatttattattgtataggaattaattttgtgttatttttttcaaaatcttacttttgttcctaaattgattaaaacaactaaatttagtcacaagtcactgaaacaccaaaacgtgatcagttgtacagaaagggtaataaaaataaattttgaagattttaaattttcagtttttatactccggtccggggtttgaaattgttagaaaattgctctttgttctttcctatattcatttattactgaaatttcatcccttttcagaggatcttaaattgagatttaatcattattttaattattcaagtttgattagtatattgttaaaaattattattatttttatacacattattaaaatatttactgaaatggtaatagttttttaaatataatttatagggtaacttttattaattaattatataaaatttatagtgaatatattaatggcttccttcttttaaaatacttatgggttagataagttttacaccaaaattttttccattaaaatttatttttaaaaattcaagaagaattataaatgatttaaaaattttacattattatcgaggtaagagatcaatagaaattgaaaaatcattaatgagtcagagatgagaatttgggtctaattccaattgttttaatttttattattttcattcaaaaaaatagaagcactatttaataaacacaagagggttttaccganataattagccaaaattcttttatt

SEQ ID NO: 17816 - DNA, 2554 bp, Heterodera glycines
  unsure (1)..(2554): unsure at all n locations
tgcactagtgtcgggcattttgacattaaaatgccattaaggcatcgttgtagcaatgatgcacgtgatcctgggaaattcctcagggaataatccctgaatttcttctattttcttatcactcacaaatcactaagcgaaaattaagaagatcctgatcattagcgttcttgttctatttttgcgctattgtgatatttattctcgtggtcctggaaaccacttaggaagaattattccgatttttcgaaaccataaagttatcgaaagaaaagcattattgacgggccttttccaattataatgccatttcggcatcggtctaacaaagatgtgcatggctttgggaaattcctcaggaattaaatttcgttttctaaagaaatgcactagtgtcgggcattttgacattaaaatgccattaaggcatcgttgtagcaatgatgcacgtgatcctgggaaattcctcatgaattaatccctgaatttcttctattttcttatcactcacaaatcactacgggaaaattgagaagatcctgatcattagcgttctcgttctatttttgcgctattatgatatttattcccgtagtcctggaaaccacttaggaagaattattccgatttttcgaaaccataaagttatcgaaagaaaagcattattgacgggcttttccaattataatgccatttcggcatcggtctaacaaagatgtgcatggctttgggaaattcctcaggaattaattttcgttttctaaagaaatgcactaggtcgggcattttgacattaaaatgccattaaggcatcgttgtagcaatgatgcacgtgatcctgggaaattcctcatgaattaatccctgaatttcttctattttcttatcactcacaaataactgggagaaaattaagaagattcctgatcattagcgttcttgttctatttttgcgctattatgatatttattcccgttcatggacggtaaaaaagaaaaaaaagcgacaataaatctttttatggataattatgggaaaaaattggcgttctgtcacatttactttttatctttatttctctcacttttatgtactatctcttcattgttaataatgtaaagaacaacatttacttcgctctatagaacttttttttcgccttacagaatttcttcatattttgcatatcgatagagaaaaaaatataggatttttcaatcgcttttttaaagaaaacaatcgcttttatttaactttaatttttattttaaggcaaatttattcttttcctctccttttggcgtactattttcatgtctctaacacattaaaaatcatgaaattcgcaaattctaataattttggttataagggtacaaaatcactttgaacatttagaatcaatagaaaaaagaataaatttagcattttggttaaaaagagctggctaggacttgagttataacatgataaaagtttgaaattccgacaacttttttctgagatgtcaaattgcttagcattcacttagaaaaagattctccttttcaaaatctttttttagataccaaatttgttcatttttgttgggaatgaagcgtattatggctgatcaaaataaaaaatacaaaaaaggcatttaccagtgtaagtgcatatactttgtttttgcgtgtgttggcgttttgttttacgccaattattttttggcaatttttttcgttttttaccgtccatgtttaaaactatttcacccactcttgaagaaaattttttttttattgttgtggcctaattgtaagccaaattttaatgcgatttcattataaacaacacacaatcatggtaccccttttgttggttcaaacaaaaattacaaaaatgaattattttcgttggtgtccaaaatttatttgtcgttgtcaaagaccaaacacaaaagcgcatggggaagaaaccacgcgttttacaaatgtataaaagggcgaacaaacagcggagagagagggagagaatgcattatatgtataatatatatttttttgtatgacatatcacaacaactcattcagtgtctttttgttttgtctgtccaaatgtgtgcaaatcgttcgcctccagcctccatgaatccgtccgttccgtcgatgacattatttggggtgtgttggtgtcgtgttttgctggcagttcgtttaacgtctcagaattgtcgcggccttttccggggcggttggttcagaatgatgggcggcgtctgctgggtggccaacgccttgaacacctgctcgagcaacggcgggtgctccttgaccagaatcttccacccgtccgactccatcacctgngagaggtggaaattgaattatgatgaaaagcgaggaaatgttccaataaaattcttctaacggcacttatcttcatcgccggaatattctctnaaaatgttcccccgacgataaatgcgccgaattttgcccaattccccaaaaccctcgtggcgtgcagttgatgaactcacagcctgcgttttcaggtgttccgccgagtgca

SEQ ID NO: 17817 - DNA, 2302 bp, Heterodera glycines
  unsure (1)..(2302): unsure at all n locations
aaaagggatgagaaattgagatatttttatttcttgactcgcaacaaccttggtttttttgttgtaaatttatgtcttttttttaaattttatcatggtaaatgaaaaattgaacataattgtagaatggaacacagagaaatatgtagatagagtgaatgatcacagatagaaagaaagagagacagacagacagtaaagaaaaaaaagggacaattccggcacaaatgccaaatgggtgccgtcgccgcccccctttccatcgcccagtttttcgcgcactcaaaaccaatccaaatccaatccatggctttacggattcatgcaaaagccgatgttcactgcggtggccccattgcattgcacggtggcccgtttgtcatcaaatgcgaaggcgtacgaattgccggaaatggcggtgaacgcgtcgtatgcgtgtgtctgattcagtgtccatccgctttttcctgggccacaaacgcttggccccgcaaactcattctggcaacacacattcggcgcattataaaactcgcacacacttttcacttttgtttgctgtgaagaaaaaaatacagtagtggtgataaccaaaaaagtgatgaaaataatgacgaaaaaaacaaattattttttaaaataaaattaccgtattatctctaattagcccaccgttctccatttattcgcctttatctaattataccccccccctttcagaggtgattgaaaaataatctcctcgggaggataaatagaaataatacggtaaaaccagggctcccagatctgaggctttagcctcattttgtggttttttgataggtcaatgaggctaaattttaaaaatgaggctttgagactttttgtggttttttgagaaattttgaggatttttgaggcttttggggaaaaaacgaaaatctcacccaaattttccaaaaaaaaattgttaaatttttcataaaaaccagaaaataaccaattttttccaaagttcacaaaattaagaatttttttcaatgaaaatctgctaaaaatatggtcaaaattcttaatttttcccccggcggcgcctatcggcaccgccggcccccccccccttgttccccaaaagttttttggaataagcgtgttttgaataaagttgtaaaaatgaggttttttgactcaaaatgaggcttttttgcataccaaatgaggcttttgaaacttttaatctgggagccctgtttttttgcattttaattttgattcataatttttcagttgaataaatgcaattatttcaaacgtaatagtaatttttcataatttttaagaaataagaaaatttaaaaaaaaagtaatttccctccaagtagttgtttttcttctaatttttcaaaattattcatttttcggtgggaattcaatcataattttaacaattaaattcgtaaaatattttcattttttggactaaatcagttaacaaattgcacttaaatttaatgaatttttgttttgtgcgtttttgaaatgataaatattgtaccaaattgaataaaaattaaaaaaaaaccaaaaattagttaagaatagagtcaaaaaatgtttttaacaatttttaagcgaataggaaaattttttgaaaaaagtctcgagtctcgggttttttgggtctcggtctcggggttttcggtctcctcgggtctcggggtcgagtctcggtctcgagtctcgggaaatttttggtctcgaacagcactactaattagctttcgatcattattcagtatttttttgtcttttttctgcagatttattttgctaaaaactacaaaaaaatgtactgttttaattcacaatatatcaatgaataaatttagtttgatgcttttaggatgcgttttattttcatgtttttccatatttcaggtttttatccatatttcaattttttacatccatattttggcatttttaatgaaaatttcaaaaacacatacctaaaaagatgggaaattttttgaaatttatgggaaatacacccactaaatcgaaaactcttgaaaaaaacaaaaattgtgaaaaaaatttcattgacaacattcgcttaaaattactttttacagaaaatttctaatttttgcaattttttttncaacttttaatatttttccttaagtaataanagaaggagttctcattatggaatttcacatataattccaatattnaaatgattttttcttcttgacaaaaattttatggttttaagaatttttttttcaaaaatcaaatcaatttcaaaaatttt

SEQ ID NO: 17818 - DNA, 802 bp, Heterodera glycines
cttttaaattgtttacatttataggcatatgaaaatgtattttatttcaaagttggcggcgccgaaactgcagatgacccccgactcgatgcagaatactttaataaatgagcctagaaggattttaatattttttctcgatcattcaaatataatttttaagacagcatttttcatgattaattattaaaataaaattttttaatttacgagtatttaataagtcttcgagaaatgaaaaagcactttatttatgaaaatccattaaaacgtttataaatggataagatgtcaacatcaaatcaccttttacaattcaccctcctcactggcacttccattcgtaataatccgccacatcgttcgctgcatttcacgcactcattgtgagtgggcccagaacctccgacaagaaaaaccacaagaatgataagcactatatatgtgtataaagaaattaagtgagaaaacacttaccaatattgagcgcaacgagaacccccaaaattatgcgatgaattaacaattgtctttggtaacttcggttcgaggcagtcagctcgcggttcgtggcggtgaggtcggaaaccatctgaccagccatttgtggcacaacaccgttctaaaagcgaaatgaaatgaaaagtgaatttgaaaatttgattatatttatcactcagaccttttttatatcgtctaaaaacaatattctacacattttcaatgtaagaaatagtaaataaaaagaaaaagttcctaaaaagttgttattttaattttaaaagtggaaatagttagagat

SEQ ID NO: 17819 - DNA, 1692 bp, Heterodera glycines
acaaaaaaaaaacaatttcaactaaactcatctttatggtattaaacacacaaaatcggtaatttttcaaattgacttacgggctggttctggttttccgcgtccatatctaaaattaaaatcacgtagaatatgaaaaagacgaatagagtcataagctacatattttctcttaagtattttcaaagtttgttaaaaagttagaatttgcggtttttgttgactagaaaaaatcaacttgtgcccgaatgtgtttattggcactaccgggggaattcttattatgaagctaaaatgaaaattaccaaatttctttttctcccatggccattcctcgccgggagcgctacccccaccccgccggttacattcccgaaatttaaaaaaatatataaattttcacgattttcggagccgctgatcatgaatctgccaataattttgactaacattaatccaaactagaataaacgtccaaaattcaaatttttatgaatttggtttttcaattgggaaaaggtttggacatgatgaaataactgtcagaatcgtaatcaacgacctcaaaaccacctgtgaaatttttcgggtaaagtgaaagcatcggggtatttactgtaaaaaactgccaaaatcataacttttttctttgttgaccaaattttaggcttactattagtcgaaagctctacatgtttagaagctaagcaattgaacaacttataaaaaagttgcaacactaaaaccacaaaaaatccgaatttttgcatatttttttttgttactttttatacattttggttaatctttgtgaagccaatagagattattaagagctttcgaatgataccaagtttgttgaatttgttcaacaaagaaaaaagttttgccattttaaacttggctcatatcagacgcaactgcgcgttccgttcgccagcaccataggaaagagtttgtttttatagttaaatgcttttagtagtaaatgctctattttcaattaattaactatccctattttaatatccgccttaaaaactgagactaaccaattcaacgtgtgtgtgtgtgtgtttgaagtcttcagttcacaaacgacgcctcaggagccgattggtccgcgtacaatggaagtccgtgggagacagtgaacggcaacaaacaacaaacagtgccgagttgaggccgagttcgtctgcaatgacaaaaatacattttataaaaaaagcatgtcagcattttttgtatggcggcgattttttcaacccttcggctgatttttcgcgcgatttttgcttgaaaatcccagtggtctcggtagacgcagcaggaaaattcaatgcttgaaagagatttttcgtaaaaacttattatttgttatagaaattatttcgaaagattttcttttaatgagtaaattcgaaaaattttggatgaaatgattgcctgcggtgctgataatctttgtttccatgtgtttagcgttaccttagtgagtgtgtgcagcaaacgcacaacgggatgtggaagcaaatggagcggtgttgaaaagggactggaaaaatttgtttgaatattatacgctaaaagataaaattagcaaaaaatggctttcccttgtttattatacatctttaattatgttaataccatacacgtgcgaaagaccgactcaaacagacccacaca

SEQ ID NO: 17820 - DNA, 2343 bp, Heterodera glycines
aaaaaccatgacaaaatgttttcgggatactctccgattaaatagtgaagcccgagattttgctgctgcttctcatagggcaattacggaggccgaaaaaattaagactcgtcatcctgaggcaccgggtatgaaaacgtggttcggtaggctattagaaggggtgagaaaggtacaaggaatttccgaaaaaattaacgaagaaagacagaaaatagggcacattagaaaagaaatggacaagtgtttggaccgaaaagatgttctaatgtgtcgtgaattggcagacgaagcgaagggggcttttgaaattgttaagcagtataggttggatgccggtactgcgtaccgtaacgcctacactcagtcagacctcggaatcggggaattggccgataaagttaaggaaacaatgaaggaatatttatcccgccccggaccttccccaagaccaacatttaaagaccaatttatatctgattaatgtataaaagagaacaaaaaaaagataaataattaatttaaaaaatggttcaaaaaacagaaatagggacggcaattttgcttgaagctgtgaaaaaagaggcagaaagggcatggaaggaagtctcggtattggcagatgaagttgatgattattccaaatccgcccgtggagcccttaatcgggcaattaaatcccgagaaaaggccccctatgccccgggggttcgagaatggtttgtaaaattatcagattgtatctgggaaatttacagtgttctagataaaattaattccgagtctgatagaacggagtctatttggcacgaggtcgaacgatgcaaagacctcgatcaagctacgaaattagaggataaggtatttaagggtttgagtgaatcgagaaagctacacttagaatctcgcaaaattcacacaaaaattttggagttggaaaacagaattcaatctgttgtttggcgttttattgagtttcacgagtaaaaaagaataaaaaatgacaactgttgaccaagaaattaattttataaaggatcaaattgtcagatggtggaaaagagaaagaaaaatggttaaagaggcagataggttagttagttactgtaataaaatttctaaatatgtaaaaatatttacaattattgccttcagtgcaccaggaatacatttattatatgaaaattttttagattcagttgccaaaattcgggtgctatatcaaaaaatttctgacgaatataaatacatttccaattcattaagcgaggttgcaaaatgtagtctacccaactgtcaagagaatgaaaatgattcaaaaaagagtattacaaaatgtttcaaatttagaaagcagatgacaaatctcctaaaacatgtggacgagttatttaaaaaaaatacaagcatgtgctataaaccatttaaccgcccaataaaaaacgagttattttatgcgccatatgttaaatatccaaatatagaaatattctatagtccatttctagagaataattagtaaataaattatattttaattgttaacaatttcaacggtttttatttattgttaaaaatttcacctcattttattttattattaattttttcattggtggtcctccctccccctccatagtcttttaaactgatcagaaaatagttcattggcagacgggtgatgcataggggaggcgggcgtgcgtcgcttcgcgcccgtcggttgtgttggggttgatggggctgggggtttgagtgctagtttcgacgtttcgctggcgggcaggtgcccgtggggcagggggttggtggggctggggtctgaatgctcatttcaaagttcgctggcgggcaggtgcccatggggcagggggttgggggggggatggggcggcgtgcgcatcgacctttgggtgcacttcttacacacgtgccgcttgaccacacgcaagcacgttgaccaacgatttttggtgtcacacgcccctcgggatttgctggggtcattttgagggtggccgccaattacccgccaagaatccccccctaatactactgaggggcggggagagaaacggcaaaattgccaaatgaaatttggttgtggccgcttaaataacaataaatttaaataaaaagtggcaaatgtgagcagaacaaaatgggccgaaaatttgggcacgaaatgaaaaacgggggacaaaatgaacagatgaacaaaatgggcggaaaacgggaaatttgggggttcatcgttctttggagtctcattcgccgaattggggacggcggcagaaaagtagcggttttgacaaattggtcattaattgtgcgcggggcatg

SEQ ID NO: 17821 - DNA, 2252 bp, Heterodera glycines
  unsure (1)..(2252): unsure at all n locations
aaaaaaaaaattnttatcatttcagtaaatctcattgacctattaagctgaatttttttaccatncatatcttccaatatttaagaagtatacaaaaataaaagtatagaagaaatatttttttatgaaatttttaacgtcatttgatcctaatttgctgtttcaaaatatagaatcaaaatttaatgcaactgttttctgcacttgataaaaatgtagaaaaattcatgcctataattttcgatgctgatcaaaaaagtcaattgcattaaggtggtgcaattgacttttttgatgagcccaattagtgatactagtatgaatttttatatatatatttttttgctttttaaaaaagtttgatttttttaaaattttgattctataatttggaacagcaaacttggactattttcgtgaaaacacgttaataaaatttttcttctacaatttcattttgtctgcttcttaaatttatggggaagatataattggtaaaattttcagcttgataggtcaatatggactaggtgtaatgacaagaacagactgtatttaatttattagtgttaaatacatcaaaatttaaaattattgtaaattaagctccgtaacacaatgtggagtgatgatcggtacagtagcccggagcagatgaaattgtgcagcaagaagaaaaagaaagttgaagaaggagaggaagaagaacatatttacccggttaaatacaaataaaaaaattattaaaaataataatattgttttattattaaaggtttcatctaaatcggacatttgggcaattggcatgatgctgattgagttcttgttgatgacaccattgttcgacattgacccagtggtgattaagcgttccaatgatcaaaagaacatttacaatgccgtcatcaacctgaataggttttgagtgaaaaattgcaaattaaattttaaataataccattttcttagatcttattatgatgcagaattggtgcaagaacccaaaagaacatataaaggctatctgagagagattaaacgcaatttccccaatttttataaaatcattaaggtcattttaattatttataataataaaatattttttcactttgaggcctgtcttcaaatagatccatatcgaagaccaactgcacggggaattgagaactttatgaaaggcgaatgcgattttaaatggctaacgctcaagccatgcgacgagggagccgcagtgaactagcaaaaaatgggcaaattttgagagaaaatgtacaaggaaagaaagttatgattagggcatagaattatatttgtgcatatttcgctatttatgtgcatatttggatatttgtgcaaattttggcatttcaaaagaaattttttagcaaaattttgtcgaaaatattgactaaattaaattttcttaaaaattgattaatttatgtctaaaaatagcaataaaacgaaattttgcttttcaggttgatttttcgtaaaatttaagctgtatcgtgttttttcttctaaatgattttaataccatattttagtcatttttgaaagttttactttgcgtttagcgaatttaaagaaattttgaaaaattatacactcaatttggaaaaatttatgtgcatatttttcacttttatgtgaatatttgccatttttggtgcatattttatatgcatataattctatgccctagttatgatccaccgaaagtgtagctgtttgatttaattgtttgtgatttttagagtaaaattttgcatttttattttttggacatattaaaaccgatagttttttgaaattttatcatgcgaaattgtacattgtttaagtgacgatatcggaatggaatttaattttagaaagtttaaaagcaagaacgtcggagttaggggtcatcaaaaacttcataaaattagcttggtaaaaaaaaattagatgtgccaaaaacacttaaaaccagggtcgcaacttttagttacgaaaaagctcgaaatagttaactaaaataatgaggaaaaatgccaaaatagtgacaaaatagttaaccaaaattgtcactatcctttctgttatgccgtagagtggcaaacaaataatcaatatttatggagcgaataaaagaaataacaaaattgggggaaatgatgcgaatgagacatatgacgagggaagttcaaaaagcggggtatttatggacggagggagagaagagagataagggggacgag

SEQ ID NO: 17822 - DNA, 1487 bp, Heterodera glycines
ttgcgcctatgtcaaaatcgggttcaaatgtgagttttttgaatccttgatagcctaagtagcatcaactaattgataggaagtaattatgtccgataatttaatcattagttagtttttgaaaaaatcatcaattattcaaacaacagaattaatgctctttataaactagaaaacattgttttcttaattttaatgctatttaagttatcagggattgaaaaaatgtaagtttgaaccagattttggacataggcgcaaaggtttgggcgcaaatgtccgaggcgcaaatgtagggtaaccgaatgaatgcatatatttcgttatagggattttaaaaatacatcggaaaattttctaagtgccataaatttttttaaatagacttgaaatgggataagtatgaaattaaatagacttttccaaggacgtacctaaaatggcacaatttattttttgacatttttgcggtgtttgccacgcgtgtcatatttggttctttctctttacctgtgtcgtgccgagtcactccattgatggtcagttcagtaccgtcagcacttacctaaataatgccaaaaaattaatttagtttttttttgtatgtataaacttgaaaatgccctttcaaatcggcaatttcgacaccgttaaagaaccaagtgatggtgggcttcggttcaccgcgtgctttacaactaaatttctttaaatttcagcgatttttttagttgcaattataaattttattgacggatacggtaccgaattttgagcaaactctccgggtactgtttgtcatgatagacttgaatctcgaataccttagggttaggcgctggcccggacgagcggtttgccttcggggcccttcaattattgtcggcggcacactttggatcaaaaatattcaaaaattgttaaataaataagattaattaaattttattgaaaacaataaaaaacattaaaaatatataataaagcatccaattaatccgccgattaaactacattataaaaggttaccccgagattgaggctttgcagaattccaaaaaaaaaataggtcaatagggcaaaatttacaaaatcagcaatttggtttaaaattttaaataaagtagaatattcataaattacttttaattacagtaccaatattaagcatattatttttattattatttaaataaaaaaagaaaaaaagttaattattattagtaatatttatttaaattacaactaattagtttcagtaattgccaaccagtccaatttgtgccgcctcacttttcactcgaccgttcaaatttgtggcttcgcacgcatagctgcccacatcgtgctccaaaaatggataaatcaccaactctgtgtgctcttttttgaattcaaatttccgcgacggctcaatgggacggccattgaaaaacctgaaaaaaatgaagaataaaaataataaatataatttatttgtttttatt

SEQ ID NO: 17823 - DNA, 1800 bp, Heterodera glycines
agtctaaaaaagcaccatttttaaaaatttattgctttgagcactccaacattgattttccgacctcatcggaacaaaaaaatagaaagattaaaaatgaaggagaaatgaatgaacattgtgctgtcgctaataggtcactaatatgtattaatgagagggggggggggagggggtcataaataatttacggcaaaacgatgacccaacaaagtggaaaagaacagagacatttttgaattgaatttgcatcttttccaattcggggacattcactttaatataaacggattatttcctaaaaatatattcgagtcaaaacatttagctgaaactagttaacaaatttaagaatgtgttagtatttgatttttggcgtttaaatttattttaattatatgtcccttcataattttgtctctttgtctgtgattgaattttacaaaatttattcaaaacatgcttaaatgttcaaatattatatttttgattttccatcagggacggtcccaggatttattcgtgggatctgggagccctgatgataatccaatgaagagagttttcgcagatcatattgggtatttatgatttgtcctccatttttgcttctttcacggtgacatcaatggccaatgtcactttgtcctcgcctttgtcgtagaagcctttgctcggttccatcaattccttaattaggccaaattgtccaattaatgaaattagttatcaattaatactcaccgcaaaggcaataaaatataagccacaacctgctgtttattgttaaaaactaggtcatagaattttccaatggaattctccgccactttcttttgcaagacaattcgaaaggttcattgtcatttcttttcgtcttcgcttttagttgtgccaatattttccaaaaaagtccctttatgtatacggtatcgtcactgaatctgtaactctccattggatgtcttgcaaattcggacactttttcaattttcatcgaaattgtcccaaatgtccaaattcgccaatgactcggaaatttcagtgggtgaaatagttgagaatacattccacgaaaattctgttgacaatagaactgataaatgccaatcttttcttcggctgttaaaacctttgaaggaactgaaaaattatagaaaaatgaaaattattcaaatttaatattttttttacctattttatcaaaaaattccttttttgagaagagagggaagcgaatttttaaaagtgctggaccgagaatggcacgacgattttctgaagaactttcaatgccattttgacggcattttgcgtctgcacaacaaagtgcctttattaatgagaataacgaattattgaatttctttcttatttatagtaaaattacagcgttccaaattgaaatttctccacggatttgcaattcgtctcgttccaaaaggcaggcctgggcatatgccaagaaaacattgcgtagttttaaaattggaatttgcaaagatggatcgactagaccagggatgttgtactttttggctaattaaaaataattatttaatttaatttaattactataaataaaattcaccggcgtaaagcactgccattgcattgtctccgtttaattcactcaactcttccgtatagatgaagctcaacatcactttgaacgctgctgcttcaacatcggggacctccacgggacaattagcagaggctaattgaaaattaattagtgtaattagtggaggctgattgaaaaatgaaaaaaagggaaagagtaaagtaacccaaaaa

SEQ ID NO: 17824 - DNA, 1346 bp, Heterodera glycines
tttgcttctttcaccaccaaatcaatggccaatttcactttgtctccgcttttgtcgtacaattctttgcccgggtccatcaattgcttaattacatttaattagggatattattataagaaaatcgtttcgatattggaaaatatttaaaaaatctatatttagtataaaaataatcaatgaatcaattttacaaatatttttttttaaccaaaaaatcaatttttttttggtttttctgctttttatttattgggactcaccgcaaaagaaatgaaattggagaatccccagcagttgcttgctttcattgttacgtcattgaatttgtgctggaaatcgcgcacttcgttcttttgtgagacaattcgaagggttgccgaacaaacgcagcccaaattggagtcttaaaaccaattaatcagttaattagcacttttaattgcccaattaattttcatttaccgtcttttggagcgtcgtacaataggaaaaagcccagccatttctcagcgccagcaatttccttccactttttgagttcttcccatttttcttggcgttttttattcgtttcaatgctttctttcagtttttcacttctttctttactgattttttcattgttttccttcaattttttaccgttttcttccaatttttcacgaatttccaacaatttcttattgttttctatcaatctttcagcggtttctttgaatttttctttttttttaatttcaatcaatcttttgccgtcttcctctattttgttggcattttccaccaatctttcaccgttttcctctattttgttggcattttccattaatctttcaccgtcttcctccaatttcttggcattttcctccaatctttcacccttttcctccaatttcaattttttggcgttttccttcatttctcgtgtattttccttcattttctcaatgttttccaataattttttagtgatttcttccaatttttctgtgttctcctccattttctcagtgttctctttgattttttcagtgttctcctccatttgctttgtcttctccttcagtttttcaatgatttgctcccatttttcattgttttccttaaattttcctttattttcttccatcttctcagtgttttccttcaatttttcgccattccgacactttttcaatgtccatcacaattgtgccaaatgtagaaattcgccaatgtcttggaaattgcagtgggtacagtaagccaccggatgtgccacagaaaattcggatggcaaagaaattgataaatgccgctcgggggggccatttttaacacaccggaagaaactggaaaaacaa

SEQ ID NO: 17825 - DNA, 2586 bp, Heterodera glycines
tcattcccccgctttttttttctcccccctttttttcgcctccgtttgactttaaaagtgctgcttttctcttcgtcggtagtcagttcagtcccccactttcgtcgtccaaaatttttgtttttgccccattaaaatttggggggattttaattgatgtcggatcaaacacaaaaacgtgttaatttataattcggacagaaaatggtagtctactattttggcacaatcggctgctgttttatttttgaattttccaaattttaaaatttgaattttttcattaatattttatttaacattttcctcaaaaaacatatgtttatggagataatcagtgaaaatcgagtttttatgagttttttttgttgttgttttttgtttacacttttataattgccatttttccgatcagtctaggcccaatctgaatatatctgatatcagatttaacgtttaaatgtgtttagaatccatttgtttatgacaattcattttccgatcatactttgaacctataatcagttttttctttgcagttccgagtgtcaattttgcattttcccgatcactctatgctaaatttgaatgaatctctctgatcagctttaggcgttttcagtgtgtccatttttcatttttccaatcaatgcccaattaggcatttttccgattaattatcagttttccgatcagttaacatccacattttaatatctgatccgttttaggtgttggaaatatcaattttacattttcccgatcatctctttgcattttccgatcactctatgcaatgaatctctgatcagttttaggtgtttggagtgccaattttacattttaccgatcagtctatgcccaatttgtcacttttggacaaacttatttttacttcatcctgtttttccaacctcatttgtgcaccaaattgacaacatttgagcaatgaatgttcagcaacagcagccggtcacctcggcataccctcagcagggcaattttgcggaggagaagcagctgcatcccaatcacaatgtgtataggaaaatggaacgactgatcaggtgaagttcaaactgatcatcgatcaaattatttggcatggttgatcggattaatcggtgtgtatagatctgtagtggattaatcggtgtgtatagatctgatcaatgatcagtctgtgtttaattaatatgtgatcagaccctggttagggctaattcgtcaatcaatcatatgggattaatgattgatcggattgaattttgcgtatcaaatttttcgttaatctggttcattaataaatatgtgatcagatcctggttagggctaattcgtcaatcaatcatatgggattaatgattgatcggattgaattttgcgtatcaaatttttgcgttaatctggttcattaataaatatgtgatcagaccctggttagggctaattcgtcaatcaatcatatgggattaatgattgatcggattgaattttgcgtatcaaatttttgcgttaatctggttcattaataaatatgtgatcagaccctggttagggctaattcgtcaatcaatcatatgggattaatgattgatcggattgaattttgcgtatcaaatttttcgttaatctggttcattaataaatatgtgatcagatcctggttagggctaattcgtcaatcaatcatatgggattaatgattgatcggattgaattttgcgtatcaaatttttgcgttaatctggttcattaataaatatgtgatcagaccctggttagggctaattcgtcaatcaatcatatgggattaatgattgatcggattgaattttgcgtatcaaatttttcgttaatctggttcattaataaatatgtgatcagatcctggttagggctaattcgtcaatcaatcatatgggattaatgattgatcggattgaattttgcgtatcaattttttagttaatccgattaaattttcaagaaaaaatttttgaaggttttttataaggaaattctaagaaaaaaaattcaaacagtgattttttggaaaatttttacaaaatcttaataattcaccacaaattttttttaaacttttttccttgaaattttcttataaaaaaactttcttagatttttttcttaaaaatttctacgttggtaatatttttttaaaaaaacttctcgagggggggggggggtgaacgagctgctcccgctggatcagtttacaataaaatttgttcagtctgatgctgaatgttgatgatggcgtgccgatcaagacggtcaaatcgtttctttcaaagtgaatgatgcttttggcaccgattttttggcacatttaaatcaaaattttggattgccaaggattccgtcggtgttcacgggccaagacttggtcggttggctgctccaaaatgtggacattgctgaccttggcgacgcgttgcatttggcccatttgctcgcctcccatggctatgtgtttcaggtgggtgagccaaaaaatgaatttttgaaataatttttaataaaatattttaaaaatttttaatttttatcgataataatggg

SEQ ID NO: 17826 - DNA, 3171 bp, Heterodera glycines
  unsure (1)..(3171): unsure at all n locations
atggactgtcgacggcaatgatgcgcttttgtacacccattaagaaatgcaagcagccgaggacggactcggcgtggccctagcgagaaatagnaaccatgggggngcaattcaaataaatccaacttcttcaaaaaaataattttggtaaatcattttgtgattttcttaagaaaaattagaaattttaaaatttatcttgacatgctgatttcttatttcttcccttcagctgatgaccccggaggagttgaccaaccccaacgtggacgagaagagcgtgatgacttatctgtcgcagtttccgcgtgctcgtccgctctactcggcctcgacccgcgcccccttggaacaacaagactccgaaggcacaaccttggacgactccaatcaatcggatataccggtgagtttggaatgggatggaccatttcgagtaattattcttgggcaaaaacttgttgggaaatcctatcatagcttgtcaggcattaattcttttttgctaggtcccggctatccaaccgttctcttttgacgaagaaccgcttgacaatgttggggaagagtgccagcaattgactctgtcgcaaatggacgacgacgacaacaacggagtgaccacggcactcacctgtgtgaccaaaacgaccacatcttacacaattgggcagcagaatgaggctgatgacgaggcaggcatactttaacccaatacaaacaatgaatgaatggtctaatgccacacggacagaccattctgaaaatgggaccaaattgcacccggttaagtttttcaaagtaatttcaatttttctgatttccctcacgaatgggagggggagcgttcgtgacatatgagggacggtcggagatcgtctgggtcgacttattatagcttttttcagtttccaaatgagccgtctttgcccactgacatggaaaacattccgcaacagaatcatcagctgtacaacctcatggtttgtgagtcggacttaaacgacggaattgccgagacggcggcagagccaacgactgactttgacgctgtacggatgacttatcggcacgaggagctgcaatatgagccgttggtggtggtgtcagacgaagagacggttgccctcgggacgaccgccgtacgtcctcagcccggctttcggtcgttgtgccgggaacgatccaccgaccacattgaggcggctgcaatggtggcggtggagggccacggactgcaaagctttgtgcctggtcatgcggcaaagtttgcggtagacgcttcgaacaccggtgggtcagagacgcgaggattctcagaattggaccatttgcaattcaaaagcagagttggcctgcccaaaggcgttgttcgtcggcgttgtcacttcgcatggaccggcggacaaagtgacggttgagcatgtgggcggtggctgttacgaggtgggtaataattaatcgttctattcgaaaaaaatggaattaggtatcctacacggtgcaagacgacacggaagcgttggtgtttgtcaaatacggcaaaaacaatgtggacggcagcccgtttaggtcaaattcagattggttggaccttggaatacttttttgatttttccgctttttaattccattaattttgctttttgtttttcagcgttcgtccgatgcgtttccgcaacaatcacaatgacgacgctttcttggcggaaatgcgaacagacgatgttaattattatcggatgtgaatttgacaaaaatgattttctgtgtcctccccccatttccttatgtttcactttatgctatggcttttaattaattttaaattgactatcccattttccaggtgttttttgaaaattattaaataagtattgtgtgaaaaatcaaataattcatcaactgtcgagcggatctgaacccatgccaatggtcattaaaataggcaaaattgcttaataactattttcagtattttcctttgaccgaatttttcttttggatatttatttgccaacaaatgatgtcttttgatcacaaatgcttttttttgtgattgaccacatttttagtgctcttttccgtatggaattgctttgaaataaatataaatttaaaaaaaagaacggaaattgaaaaaataattatttcttttcgcttttctcattttcatcatcgaaaatgcgctccataaaggctttgagctccaacattgtctttttgaaatcattggccattttgttcattttgcttttgattgtttcgactttgcttctaatttctgcgacttggcggcccattctttccaattcctgaaaaatgcaaaaacatttttcactttccttttttcctcacctttctttcttcactttccgaattttcattttgaggagcgaaaagtgttggcgaactttgcttaaatttatttattgaaataaaagcgaaaataacagcaaaatataataatttaaaggcttatttttgaatttctataatattattgttttccacagttactttttgtttgttgtcagttgcttctttcccatttccttgtgacttttccttttgtaaaagattaattccattttcagaatttatttatgagaatttaagaaaacaaaaaagagaagaaaaatgcatttttgtaattattttttagagcgaataattaattactgataaaattcgttttacaattgcttaaaagggctcccgaaaatgcgtcagtaataaatacagtatttctaaggtattgtaatacaaaagacaaaattgtataagaacttcgttctgaattgtcagttcagttttactttaataaaattttgaaaatgtatccaagataatactaccgagtctcatttccaagaaattctgattcactgacgcattttccactaacccttttttacgctaacgcttaaaatccgactcacttttctccattcacttcccttggctttgttttgaacattttgcggaaaaaaagaatttccataaaaatttgacgaaatttgctttaatttcaattattattatttttaatttgttctttttttactttctgcttctcttcgctgttttcactttctcgcggcgttttcttttgaagagaaatccctccggcatttgaacattgcctcattttctgttttatatataaaa

SEQ ID NO: 17827 - DNA, 3639 bp, Heterodera glycines
tcaaaattggggggggggagggcggcggctcaaatgtcggcggcgcaagtgtcattttggctgggcggcgcaagtgtctgcggcgcaactgtcgcggcgcaagtgtcggcggcgcaaatggcagcggcgcaaatgtcggcggcgcaagtgtctgcggcgccaaatgtcggccaatcggttctgatatacaataattgtccaagggttctttctgtatatgcccaaattgtgtcgctgaacaaaatgtggtgtaaaaggcaaaaaaaataggtggcggttaattacgacaagggtaaatttgacactgaatattttcgacacggagaaatttcgacaaattcttagaatgaatttattttttaaaatttttggacaaaaataaatataaatactcatgcagcacaacggactcgaacctccgccctttgtcactttactatcttacaaaaaaccactgagccacacatgcaaatctttttttggtactgtggctcagtttccgccggacgctgtgtgtaaattcttttttcattccggcccattctcatgcggacttgcatttgcttttcattccgcttttgttgtgcgtttaattccatttgtcaataattcttataattattcatcatagcccaatttggcaactgatgtttaagcgtttcattattcgggctttgcaaatacaatttttgcccttggctttttgccattctttgttttatactttctttcttctgttctcactcttggcgtactcttttattcacttttttttaaatctaattaattaattaatttactaaatattttataaaaccattccccaacagtcctgtgacgggacctccaagatttcggtgtgatgtcagttctaatgttgagcactaatttcccagtacaataataataattagggctgccaaaagtatgcaaatgcatacttttttcctggcttctccatgctctaaatagtacgaaaaacactttcttttttgtgtttgcgtataaaaatcgggacttttatttgcatattttgggcctttatgcatattttggcttgttttacattttcatgcatattttgccattttttgtgcatattttccgattttttgcatattttgccatttttcgtaaaatattttccgttttgaatatcccttaagtaaattttggcagacaataggatgagctttagtgccgaaaatcttgagaaattattgattttcaattgcaaaaaaaaccgataaaatttatgaggaataaaaattttttattggatttgcacccctaattttcaagtttttttgtgcatatttcacgactttatttgcatatttatgcgcatattttggccacttttcgtgcatatttttggcagccctagatattaccaatgtgaattatgaaatgccaaatttaattcaccgtcttttgcagtattgccaaattgacccccccccccctaaattaattgattaattatatttaatcaaattgtaaattcacttttggccataattgagacagtttactttataaataacataaagcagaagcttgaaaaatcatccccattaaacactgtgtcatttcgctttcgctatttgtgccattgcaaatgcaaaattcggaagtacaaatcggcatgttcgtccgctgctggctccattttttgactgtttttgtttttgcgtctcaagaaatagtgatagaccaccaaagtgatgatggcatgggcgaagagaagccaaaatggaaaatgtaataattactattttaattaattaattcagaaaatcgcaccaaagtgattgtttcgtacgtgcgaatgtacaccaaaatgccaaattgttcacgtttgattcgaatataacccgaaaggatgttgaaaatggagaagaaaatggtgtaggagaagtccaacgggaaaatgatacgcatggtcaaaatgttttcatttgtttgatagtttctgctcagtgaatagtcctgcactttgttggagctttggagggaataaattagtttttaaagacttaaaatattcaaaagttgggaaatgatcaaagcacttggggattggctcagattttcgggatgaactctttttagaactaattaaataatttgtgctttggtgttccccactaattcctccttttctttccccccttttttacaatgcccgctttagtcgtcgattcattctgatcaaaaaataatcggcgattgaaatgcaaatgacgagaaggagaaaaaaataatgtgcatataataattcggtggcattgtaacgaccagtgagcgtaaaataaacctaattaataaagcaattaaaatggcaaataaatgatgtattaattaatgagttaattaacaaacaaaccatgggtttctcaaaggtcgggtcaatgattgtgctgaagtaaacgtaaacgcagaaagcaaccaacagagttgccttaacgaattggcatatgtcgtcaaatattttccctttttaccactaaagccaaaatgccaacggcgaattttgtgctggccctttcgtaattgtgaacaaaaagtgtggcacggaccctttcgatcataatggcaaaatggagcattggtgagccggcgatgtacaaataaaagggcattcggacggcgtaaaccaaccaaacgggggacaaacagtcgcaagggtcggagtaagtcaaggcgaggtactgtaatggggaatagcagaaatgatccgggtaagatacggtaattgagtgtcgagcaaatttaataaaacaaattccgaataaaaaaggcttttcgtgttattcaattaactgacaaaattccaagcagccgcaacaacaattgaccaaacgaaaagagcatagagcaaaaaaacactgatcagaattatctaaaaaggcaggaatttacattttattggtctgacatagtaattcgttcattcgttcatttaccaccaaattcgcatggagtttcaccgggtgattcttacagtaccaaaaaatcctcaacaacagtacggtaatgaggagtccggttacagtctgcacggctctcacaatgttgtactgtacgttgatgactgatgcttcagcagccgcacagtcttccaattcggtgccattttcttgggacaaatcatcgccgggggcgaaatgcatttgaatgaaaagagaaaattaaatattaatttatttaattatgtaaaaagaaaaaaaatggtccaactcataatgaaaaacatcattagaataacatttaaaataattgactattgctaaataacttttatcatttaaaaaattataactctcaatagtaaaaaaacatttgaattaaaattaagatttttaagtgctgtaatcattaaaaattgtctttatatggccaatgttttcatttgttaattcttcgaaattactcgccggcacaattgaaaattaattgtgaagagaaaatgccgattcatgcgcattgggtacgatttgacagcttacggatgacgaatttttgcaaaaaacccaaaaatttctttttgttatttaaataaatcaaaaaaaatttcaattcgcaataaaaaaatttattttgaaattcaatggcaaatagagaaaatgtgcaaag

SEQ ID NO: 17828 - DNA, 1194 bp, Heterodera glycines
tttttctgtttttatgaaggggcttggggaggtggaggactaagtgtgctcaattatccttaaatttaaatttactacataatggctttgatttatttttttaatttggacctaattaccattaattaggtaactaattaatttttaaggttcttccaattattcactttcaatttatttgtactaattaattttttgcttacatgtgatttttttaatttgacctaagtgtcaataaatcaccaattaatgagattttttggattttttttttcatttttaaattgccaaaatgtgttcatcccctttcaataaaacccgtccccatttatttgttcagatttccattcgaaaatactatgacgacattggaggctcgaccactatgtcaacaaccgcttcttcgtccatgggctcgcctttcagggtgagtgggagggcataaatatatatgcctcgggggcaatatgcctttttcgtcacagttaatttgttgattaaatttgaaaagcaatttccgtcattacacacacatttacagtaccacacttgtttgttgtttttgttcacgcatattctgaatacacaataatttacatgaattttttaccgtatcgagggcagggatggtcccaagatctctcggcgggggtgccgctaccgcaccccgcgcgacgatttttttgtttgttactttttacgccaatttttgttggcacgctttttttttaatttttggggacccaggaggggtcctgcgcggtgccgacaggcgccgccggaaaaaaaatgaaattcaatcattttttttaacagattttcacgaagaaatttgttgtattttgaaaaaattcagtgaaactttttggaaaatttgggttccggaggtctggatgggtaccaaataaggaaaaattgaaagttcagtacaaaatattaatttccattaaaaatttcgagtgggaggcgtcttggccccctccagctgggctatccatgctcggtggttttttcacttctatcaaaataagttttttgcagatttttatatgtattttaattaaattaatgaataattgaaattgagaaatttgataattttaaatttttgatggcaccgaaaatgagtataaaataaatgttcaaaattattgtcattagtgctgattgtgttctatatatatatatatgcct

SEQ ID NO: 17829 - DNA, 1771 bp, Heterodera glycines
  unsure (1)..(1771): unsure at all n locations
ccccccccccccgctgccgcctttgaaaagcaattttggcgcttttttggcaaaatgttttttttttgaattaatgaatggtattgtgtgtggtttaaaaacagggtttaataaaaagcatttggatgatgttcttcttccccttatttttaatattcaagaggaaatggaaaaagatgggcatatctgttcctgttttattgtatataaggccccaaaattcttaaaaattatttctgaattttccggtacagtaccaagcccgtaatccgcctaacaatagccgaactaaaagattcggtaccagggccgaccgcgaaccaaaattttctgagacttgaaaaccaaaaccaagacagggaaaccccggtactcgagactaagactgagcattggtcctcgagaccgagaccccccaaaaaaatgagaaatttctcgactctagagtcgagaccgagaatctcgagaagccctaataattagggttgtaaattatatggactaaaaaacccaaaatatggacataaaatatggactaaaaaagcacgaaatatggactaaaaagctcaaaaatagccaaatatggaccaaaatatggactaaaaactgccaaaatatgtgttttaaaccctcaaaaattccaaaaaaggtgtatgaattcaatatttgcttaaagaaattaaaaaaaaacaataaacaatcaaaaaatggatttaaaacataaaaatgcaaaaaaaatttattgtcgtccattgtataaaaatattttcaagtttgccaaaattttaaaaaaattattatttaaaaaaagaaaagttcgcaaaaaatgatgaaaagatttattaaaaatgccaaaatgacgacgaaaattcaaatttttcatattttttgggctgtaaattttaaaatttccaaaaaatcaatctttagggggtgtatttttcccttttcttgcattttcttgtgaaaatttgccaaaaatggccgaaatatggactaaaaacacaaaaatggctaaatatggatttattcccgaaaacccccaaaatatggatttatatggactaaaaaccttcagcaaaccaaaaaattttaacgcagaaatgctatttttgagcccctttctttatagcatatgcgcagaaaaaatatgttaatccatataatttacaaccctactaataattaaacgcattttttaaagtttcacaatttttcaaatttctctaagcataaatccattaatttaatgccatgcctttcttaaaactggaatccattcctattttataccattatttcttgattccttgggcattacatcaaaatcacatgcattactgtatgtaaactcttaatccctgataaactattttaaagctgttttcggtatgctttggtcctttttgcgtcaaatccctccttaatcggtgatggcaattagcctaaatgccgttcaacaaattttttccaaaaatatcgagagcatcagaccctttaaatccaaatcccattgagaaatgctaagtgcattttatcgcattaatttagctgaaagaaagagcttttaaaggaccacaaaccatcttttgaattatgttatcaaatgcatttaaaatctgacatagcaaattttttaattaggcagtttattattttttaattaattatttataatttgtaaattttattacaaaattctctatattttttactttattttaattaaatggtgttttttcatgtngtaagcttttctgccgtttatcta

SEQ ID NO: 17830 - DNA, 1890 bp, Heterodera glycines
  unsure (1)..(1890): unsure at all n locations
ccgttgtaacccccgggggagaaaccgtcgacggacgccaccgacagaacaaacgcaaacgccgccaaagacacgggaggcggaagaagaacaagcgacgccgacaacaacggcaatttcagcggaacatggcgtcgaaacggtggcggaagaaacttcggataatgcgcaaaaggaggcggaagaggagcaaacgcaacgaggcaattagaaacaatgaaaagcaattgaaattgaaatgggacaattgggtaaaaaggggggggggtaattaaattaagcgaagggtcattcattccgacaaaataaagacacataattaaactaataatggtaattaattaaggggatttgcccatcgacgagacgacaaaaacgaaaacagaagcagaggaggtgaatttgttaaatttaaataaataattattaatataaaatataatgattttgccaatttaaaaattcgttttccattttcgaacgaaacgacgccaattccaacggcagccgaagaaggcgaaaagggagggaatgaagtgaccgaaaaaagcattgagcaaacgacgggacaaagggaggacgaaacggcggagaaaaacggcaaaaacagcggaaaatggcaaatgaaacgaccattcgcctcccaattcagaattggaactcgcccgagccttccgcactcccttccttttgcgcctctccaaaatcgaatggcgtgccgaatttggcgatctgtcgagcggagcggcacggaagttgcaagagcaaatccgagcagatgtaaggcgattaaaccttcattttaactcccgccggaataaatccttcccatttctcagctccattccgcactctccgccgccattggtcccggctttttggactatcaaatcgaagcattgcaccaaggctcagtgattgtggaggggcaattgttgagccgagaagagataagcgatgcccaaagtgtggccatggccttggaacaggtgccattgagaagaatttgaaaataaatccgagtttatttggttacttcgcttaggcaattgtctcccgaggcggcgaattgggcggaaatgcggtggacacggaagggatcagtgtggcgggtaaccaactagcgatcatctgctgatcagcttatgattttcaaaattcacattttcaggccttcccgcccacgggccaaatggtaacggagtggcagcgaaccaaaggcagcaggaggaggaggcaagccaattcggaagcaaatgctcatttctcggctttgaaattcaggccgagagtaccggctacatcatcggtggtgccgtcgtcgtcggcgttctcatcgtcgtttttgccatttttgccattgtcgtttttggggtaagccatgggaagaacggaaatactactgatggtaatctctgcaattccttcaaaggatgagaaaaaacaatacaaattcataagtttatccccataaaattatgccatattttatttaggtttacgatgtgaccaaatttctggacgaacaccccggcggaatggaagttttaatggaaaaagcgggcgaagatcgaaccgaggcattcgaagacatcggtaaatgacaatgttttaataaaatataatggaattattcaaaatttaggccattctacggacgccaggcaaatgaaagaagattttctagtgggagaaattgtcgaggttaggaaaaagtttaattaaaaataggaaatattgttaattcagtccgaacattggaagtacagttacgacaaaagagagacgggcgcagacaaaacgatggaccaatcggaaaaaaggtaatgaccagaatataanatttggtgtaaatgaaaagcactcattgtgtngtccacaaactccatt

SEQ ID NO: 17831 - DNA, 1569 bp, Heterodera glycines
  unsure (1)..(1569): unsure at all n locations
gaggacagctggggggtcggtgcctattgtcttgttccttacaggagggggaggggtggggggtgcgtcgcccatagtgctttcttacatgcaagatggggcgagaaagcgtgtgtggttctgaaacgtccatatgccatagaccacaacgtaaaatgggacaacattcataaaaaaaggttggcctcaaaagggcccattcccaagctaatttcggaatttgctgataaaatcaaatagcctaaattatatacgcattataaaaaggaaatgacagaagcctcgaatgttagttatattgcgtgtcacaaaatctcttccggaaaaaattttcaaaaaagtgttccgaaaaaaagagatagtcgtttttacatacgaatattgaaaagaaggcgtaaatggctctgaagcgtccataggccgcagaccacaaagtaaaatgggacaacattcataaaaaaggttggcctcaaaagggcccattcccaagctaatttcggaatttgctgataaaatcaaatagcctaaattatatacgcattataaaaaggaaatgacagaagcctcgaatgttagttatattgcgtgtcacaaaatctcttccggaaaaaattttcaaaaaagtgttccgaaaaaaagagatagtcgtttttacatacgaatattgaaaagaaggcgtaaatggctctgaagcatccataggccgcagaccacaacgtaaaatgggacaacattcataaaaaaaggttggcctcaaaagggcccattcccaagctaatttcggaatttgctgataaaatcaaatagcctaaattatatacgcattataaaaaggaaatgacagaagcctcgaatgttagttatattgcgtgtcacaaaatctcttccggaaaaaattttcaaaaaagtgttccgaaaaaaagagatagtcgtttttacatacgaatattgaaaagaaggcgtaaatggctctgaagcatccataggccgcagaccacaacgtaaaatgggacaacattcataaaaaaaggttggcctcaaaagggcccattcccaagctaatttcggaatttgctgataaaatcaaatagcctaaattatatacgcattataaaaaggaaatgacagaagcctcgaatgttagttatattgcgtgtcacaaaatctcttccggaaaaaattttcaaaaaagtgttccgaaaaaaagagatagtcgtttttacatacgaatattgaaaagaaggcgtaaatggctctgaagcatccataggccgcagaccacaacgtaaaatgggacaacattcataaaaaaaggttggcctcaaaagggcccattcccaagctaatttcggaatttgctgataaaatcaaatagcctaaattatatacgcattataaaaaggaaatgacagaagcctcgaatgttagttatattgcgtgtcacaaaatctctttcggaaaaaattttcaaaaaagggttccgaaaaaaagagatagtcgtttttacatacgattatgaaaagaaggcgtanatggctctgaagcgtccataggccgcagaccacaaag

SEQ ID NO: 17832 - DNA, 2081 bp, Heterodera glycines
ctctagagtcctgtagactaccgtattcctcattctgtaaataacatttaaaatccatttttatttgaaattattatggagccaccatttttaagtctttaatcaaaggtttaattctgctgaacaagcgaaaccaaggccagcttctcagtgagcaccatctccgcacattccgttgcacaattttcacgccaattttctcagtaagtcgacgcttcagctctttttgcgcgagatggaaacggcacacgcgttggaattggacgatgactgcactcaatgcttcatctcgcagttcttcaagcgaagcaagcactcccgaacagaagaaaaccttcggaagagaaggaggaatgatgaacggtgggggaaggagggagggatttatcccattgatccctcggcggaggaagggggaggggctcaaggaaggcacactttgttcgtcccgcattggaagccgtctctgctcagcgtcccgtccctttccatacgtaggcacatcgcttcgcccgccctcttcgggtccgtttccatcgcttcttttgttgccaaaatggcatagcgttgtttgaagtcggcataagcaactctgttgggaaatcccttgcggcaaattcggattccctccagcacgccgttgcaagtcagctgattgagtaccaagttggcttcaattctcgtcgacttcttctgttcgttcggaatgatgcagcggataaagtgcggatgcgtttggcttagcaccttcggcggatttttcgctttggtcggtctttggtcggccaactcaccttgaccaatttgttcagcgagtctctgtacatcatcgacaccgtttggaatgtgctcgcctttccctttttcttccccttcggcactttgcctcgcatttgttgttcttgcacatcctccttttattttgtagtttatcatttagcaaacttatcaattaattaattgattcacttgtgtttgatagtctgcccaaatggcattcaaaagtgccattttttgttttgtcttcaaaacggcgaccacagagtcattcaatgggtctttgttctgacaattttaaaattcaaagtaagcttattttttgccaatttggcaccttttccagccacgacttagcattgtatcggacagtcccggcgtaatgttgcaccgaaaaatcggcctccgcctgttgaggaaggactccgtctcattatgcctcccccccctaattgcctgtttgcccttaggcggctttgcttttttgaagtttggatgttttcccaggtgttggtcgtacagtttctgcacgaaagtgccgtccgtcgcctttggcacaatgcattcttcgtccaacattgagatgatgcccaatggctgcacaaaaagagccgaatggttctgtgctcactcagttatcggctaccttttctatcagttcaatgcacgactgcaggtccaagccgaagtcaatgaattcccagcggatggcctcccgacggtactcttcttgttcaagaacgaaccttaaggggagggggcaattggggggacagaaagacaggagcagaacatgtgctggttgaagaattgttgcagcttttcgttgacaaaattgatccacactaaaagaaaacgtgcaaagtgttttcgaaacaataattgaatttcgacagtataatgaccacagatttccgcccgtccgattacggtatttttaaaattcaacggcacccccagataaggaactcatacttctgtcaataaagataagattatgtaattctaatatagcttcgaaaatttttatgtattggatactgtcgaaatcaattaccgtcgaattttaaactaaaaatacatttttttgggtgaggatactgtaaattaaatatactataacagagactaaatttccatttagtgaatgcggtgaatgatttacactgttcgaagctgttgaggtcgaaaatttcgaacccggcgatgtccacacgcccacaaacatttcgcgctgcaatccttcgcttcaaactcgcgttgcatcgtctgataagccaagcgaacattcgcgcgtaaagtgc

SEQ ID NO: 17833 - DNA, 915 bp, Heterodera glycines
tcttttttcccccccccccccatccgaaatgtcctttttcttcctcctcctgcttcttctcccccctcctctttcttcccccccccacccgaaatgtcctcctcttccgcttgctcttccctcggcctttgcttaaagcgcatttcgcccatatgcattatcgcagctatcaatgcgtaaaggtccatcttctccaattcgctgaacatcataatgtcgaaggattcgtccgtggtcagcatttcctccccatcgtccatcccttcaatggccacttccgcctgggcaataaaattgtacgaatgcacgggacgatccaagaatagttttgctatagggggggggggggggggagaattgggtggcatggtcggcattggctcacttttaaggccgggaatggcaccggacattaattggtaaaatatgtggtaagagcgttcggtgggctgttgctttatcacgcgcgacttctccaaaaggtctaaacccttgtgaaaataaacgggtgttgtctcccctcacaatgttcaatgtcccctccggcgagctttccgccgttgttgaaataaatgcgaatgaacttgccaaaccgagatgaattgttgttgcgaacagttttggcatttcctgaaaagcgatggattgacataaattgtagatgatcgactcattaattattcatcatcgaacttaccgaatgcctcgaggactggattagttcgaacgatttggtcctccaaggacgacgattccttctccgtcgaaggcatttcgaactttgtcctctttttggtgttcgttccgcccacaacagcgaaaaaggagatcacctgacaatggagaaaaagtggagggggggaggaaaaaaggaaaagagagagaaaaggaaaaagaaaagaaaaagagaaaaga

SEQ ID NO: 17834 - DNA, 1343 bp, Heterodera glycines
  unsure (1)..(1343): unsure at all n locations
ccccaagttgaggccaatttgtttaaagtacgcatctttgtcctgattttcttgctgaattcgttcgccaaatggccttccgtcagtgtccaatggttgtgccgtttcttcgagtggagaaacggcggacgaatttctcaacaattttttaatgatcgctaatgacgccttggcttttctgttcagcaatggatgataactgaataatttttgatagattttgtaaatcaatacattagcaaaccttgcgaaagacaaaaaaaatgaaaaaaattgaaattttttattaggaaataacccggaatttttcctgacaatcgaaactgaccaaagcattacaacgggaagagcaaggtcattgaaagcatgtgcaagaaataaaaatccgtaaaataacaacatatattcgtcctttgttataattccgaattggaaattcattgtcataacaaatgtaataaaaacggtgataaaatggcacgaaaaatttggtgccaattgtcgacccgtccgaatattttcatttaactaaaattaattaatttgtagggaaaaaagcgatatgcaataaaaatttgcttttaaaatgagctttattgaaaaaaatattttaagttgaatgttttaataatattaaaattatgacttttcaatcaaaaattaaaaaaaaaatatatttacattttaattaatttaataattttttacaaataattatcagccttttagggcttcaaaaaatttaataaaaaataatttttaaaattttattttacctggtaccgaacagatagttgtagattcttcccattgccatgatgtaaatcaaataatttttggttaaattttgtgatcattgaaaaaaccttaaaaaaatctaaagaaaaattctttaaattttatcttacaaaaatttctattaaactggcaatcattgctccgatgtaaagacccacagaaatatttgttaatgaaaacattgaatccaaaacaagcgtttgataaattgttaatgccaaacaaaggatgatctttaaaaacgataattaattagtctattaaaaattaattaaattaataaatagttcttaattaattcatccgcgttatttactcatcgatanaaaaaacaatttcattttactttatagacaattttattcatcaaaaagtattatatgtatgtagtaatgaacaaataatactacaaaattaaataattaaaatgaagaacatattttaccgtaatggacagccaaaccaccgtaaatgcccaactactgtagctctcgtaagtgtccacataaacagttgcacatattcgctcacaatcagcacatggc

SEQ ID NO: 17835 - DNA, 2157 bp, Heterodera glycines
aaattaaagccaaaacgtcaaattaaagaataataaatttaatttaaggccaaaaatgtcaattaagaataattatatttaatttttgaggaatttatgaatttaattttaaagccaaactgtcaattaagaataaaataattatatttgatttttggataattatgaatttagccaaactgtcatttataacaatatttgtgcttttttgataattatgaaataatttttagagccaaactgtcaattaaaataatttatttggtctttccttcacaaatgtaaatgaaattataataaaatttcttttgtgtaggccaacacaaatagaagaaattttttgaaaaaaagtctttgttatgaataaattttaattgaaaattcattattttaattaagcacaatttaagtccaaatttagaaattttataggaattttcaaaatacgatcataaaaatgactttccattaaaaaagtttcatctataaaatttaaaattattaaaaatttttgcaaataatttccttttctggaccaaaattttaaaaataaacaataataatttttaaaaattttgattattataagattatttgttttttatatgaaataaaattgataatggaatgaaaactaataattaaaaacaccagaaaaaaaattatattatcaatttatattttaaatttggaattttatgtaatattacaggcctattttcaaggtttttattttttgagcctaaaaacataaaaaaattttgaaaaaacctattttgacttattttcgcgttttggctaaaatttctcaacaagcaataaaacgaaaatacacccataaaaatcgtgcctaaaattttcaaaaatctacctttatcaaatgaaaaattttatcaaaaaccaatctctaaaatttattatttattttagatttgtacgggaccgggaatttttgccaaaactgggaccgggacttgctgggaccggttaagcctggaccgggaccttgtgaaaacgggaatttttttccaagaaaaattttcactcataagacccctattcatatcagtgcttgtttttacaagaatttttgattttaaatattatttatctaaataccgatggcttaatttttattactttttgaatagatttttgtcattttacgtccctaaattttaggttttttagtgcatactattttggggtttttagagcctaaaaattacatcccgtaataaccagagctgtcaaaaaatatgcaaatgcatatttttttcccggattatacatagtctaactagtaggaaaaacatcttctttttgtatttttgcgtataaaagtggtgacctttatggtttttatgcatattttgggtttttctgcatattttgtgtgttagtatttgatttttggcgtttaaatttattttaatatattgtcccttcataattttgtcttattgtctgtctattactctctatgtaatcgatattttgccatccctttccagcagaaaatgttcccccgtcttcgcttcaattcattctgttggcagtgcacttttttgtatttgttattttgtcttattatcctcggactttccccccattttattgttgctgattttaaataaaagtgatttgcccccgactttggaaatattgtggatgaaaagcagtgaataggccccgacccaaacagaatatttagcacgtggcgctcctggcgaagagttagctgtgcctgcattttgggatttttactgctgaggagaagccgattcgagaagcgtccagaacaaacgcattgttgcggttctgcaattttcttcgttgcggacagaacatacgcattgctgcggttctgctgtttaacgcattgctgcgaatttcaacgattttcgtcccactgcaaacgcattgctgcgataagtgaggacgtggtaccgacttattagcgcattgttgctaacttttggacttcgaaacgccaaattttattgccgccgcttagagggatgaccgaacacaactttgagcagaatcgccggaccaattcatcaattgttcatgaaggaaatgtccaattcgacaacgaaaacaacggaactgaaagagatgaaaatgaaattagacgccttctgcttcaagtca

SEQ ID NO: 17836 - DNA, 1483 bp, Heterodera glycines
aaatccaatacccggtacccgacccaccggtaggtccttgtccaaaagtacaatgggaagaatggggatctgggtcaaattatttggccaaggaaagctatgggaagaaaaatttaaaaaaaaaactaatttaaaatttagtgtaaaaatagatcatttatcgcttctgcagggacttagttggttctttttttggattaatttccttctttgttggggttcaattcgttctcatagcgttatgtatttgaatatatttttaaaaattttgcttaaaactatcatcattataagtaaataaagctcaaaatttttttaaataaataattttcctcttttaatacataaaagttacaaaaaattgttatttttttacaatttaactaatattcctaaaaattgaactttttgtataaattctgtaaacaacttggctcaaaatcacaatcgttttttgaacaataatttttagaaaacaattcgattaaaattaaatttttatcttaggccatctcagaatatatacaaaaatggaatttgcgaaaacaagttagaaaaattttaaggcctaacttcggttaagcctgccaaaaattgtgaaaagggtcttcagaacaaggcctcacattcagttaacacgctttaaacaagcatttcttaatttatatgaaatttttgctgtatttataatatgggatagaagcaatgcaagtgtaacgaacaaatcatgaacactctcttctttactctcgtttctatggccctttttgtctctctgcttcgtttttgtttctttcttcctttattaacggactctcacttattctctgttctctgccacctgtggtctctcgctctctctctttctctctctctttctgtctctctctcgccctctctctctctgcattcaaaataaaacactatttccttctgtagaaaaccaaagcatgagcccattttttgcacgacggccattgcaaaccacgccaattcgtcttaaaatttccgtcttttgatcccttaaaaattaaattttcattttcctttccccattttgtaatgattaccaaattttgacggttttccattaattaattaataaataaaaatgttaatgctcagcagcaaatttgttcgaagaatgtcatcactttttgttcaacagccgtcgttcagcggctcaacaccgaatttgagaagtttaagcgcagctgaagaagcaggtcaacagagtgccaaaaaggggcataaaagagaaaaagtgatgggaaaaagggacttttgctgttgggtacccctaaaaattccataggtagaacccttctgtatacatattttattgcttggataatctgatgagccccattttcgtcccaatgccaacggacaatttgtgccaacggaatcactggcacatttggcttggaagaagcattgccaatgagtcgggggcgtttgggccccagtttttggggccccg

SEQ ID NO: 17837 - DNA, 1867 bp, Heterodera glycines
  unsure (1)..(1867): unsure at all n locations
gaggggagtccttctttaccatttaaaaaaataatttatgtatttttttcgctgacaggccacgtgcagcgggctcgancattttgtgcaaaacgaagtgatcccttcttcgtcccatttcgactcgactggcgaggttataccacataattttcgtgccctcaaaaaaaaattggaaaatatttaaaaaagggtgttttttggattttcttaaaaaccaaaaaaaaagggggaggggactctttgattagcagttttttttttgtcataataagtcgttataattaattccattgggttttctgagccgctacgaatctgacgcccatggaccgattcctaacccgaattcgaacaaagggccgaacaaataaactattcataatttagtgttttggttcgaattcggttaaggaattctgaatggcggtaatggaggctctactgcagaattaagcatccaatcaggatggtcattgattggacgcgtaaacggcaatagagccgaaatggggttcagatcttcaggttcttgaccagccccgcaaagcccccgggaaacggtttattatgacgaaaaaatttgcaattccatagtatttgccccctttggtttttaatagcattcaaaaaatgccttaccaaaattttgactcccaacttggcacttttgccctgttcatacagttcggcactttttccaatttgatgcttttctttagttcccctggccgtgggtgcgccgtgcccatgcgcttgggttgatgaacaccggcatcccccctgaacacggcggcattgggctaccactgacggtcaaagttggcattttcgagaccatcgcttacggcgacattggccttgggtgtgttttatatgtgtggctttgacatttcgttgtgtttaattgtgttattttagtacaactttgatggtcagtgaactgtctcaacagcctctgctggtaaacattaagaaaatgaattttctgttttaatgtaatcggaattttccccgtttttcagtacgccggcactttggagcaaaaacaaaaatttctactcccaatgttgggaaatccgtttttggcagtgcgttttaacataagggataattaaatatttgtaaaattgttttttatcttaattttgttcaaatttttagtaatttcccggggggcggacacctttttcaactttggccccaaattccgtttttattattattattttttaatttccagtcttttgcggtcactgagcccgaggcgggctccgacgtgtccaatgtgtcgacgagcgccgagccgagtgaggacggcacattttatgtgctgaacggtgccaagaaatggatcaccaattgtggcgttgcgcaatggttacatttttaaatgaaatttaattgtaaaaacaaagtcaaaaaattatgaccgatttttgtcccccccccccacccttaaattttgattttttttttttgccattttttatcctaaaatctgaccaaaattttctcgtttttttatcggggatttaattccgttagtttattgataaatatttaaattgccaagtgcaaattcgtcctccctttttcggttcttcgtgttggcgcgtacggcggccgacccggcgacgccggccaaagacgcgttcaccggtttcatcgtggaaagggacacgccggggctaaccgtgggagaaaaggtgaacagcaaaaccatttttagagatatccattaggtattttggctggaaattcggttaagggggcttcaggtccgtccgtgttcagaaaaatatttttggaggggcattcctaagatttttttcagtttaatgttatatccactntttattttttg

SEQ ID NO: 17838 - DNA, 2951 bp, Heterodera glycines
aaagaataagcatggaaatgtgggaccctttttgagctttgctccatttatacccatagaaaattgaatctttttcgaaccaatggccgaatgggttcaggccatttgaatatttaaatccaacagttatcccatttcttgccttgtacactgttcgaatttgtgccattgggtaattggcatgctccttctcattctgctccccttgttggtcatccttggcaccgtgccaaaatcggtttctgctttgaatagccgtgcaggacatatccaagtcattttcagtaggatcttcctcacgacaaatgcgtcgtcttaccatctggctaatgtattttgcgtcattggcaaacagacgagcacagtccaacggcgcacttcccttcggcaaagcccaccaatcgaaacgtatttcgggcgcctaaattaaatgttttttttaattattccattagggatggatataatattagatctacctcttcttgagtgaattttattttatcatcattttcgttcacttgaggatctccaagaagcaacatttgtccttgcacctaaagaggaaagatatcaaatatattagaaattcttaatgttttcaaagtttaacctaaaaaatgtcaatttttgtgaaaatttgtaaacataccaaaactaaattttcaaaaattttcccggcggcgcctctggcaccgccgaacaatcatataaatattctccatagaaaaagctaacaaaaaaatagagaaacaattttacttattcgttaaataattttaacacaatgatcaaacccaatccctggccccgacctatttgaccacgataactcccactctcgtccacccgtttcacctttatcccactgatttcctccaatggcaaattgccttccaatggacaaattggtctgcccaactgagtgccgttcattctgagcagatagcaacgcttggtcagcacaatgtccaagtttagcacgtaaataccagttgccaatcttacgcctttacttcgaattgattttgacaactaaatgaaataatatttattgcattaaatttaattaattaattaattaagtacccttggtaaagtgacttctaaatcgctgtccgtcccaattataaatctcgcttccgttttcgtctcactacctaaattaatttctattttttattctttaattattttttgattgtttaccttttttggcacttaaaagttccaccaaaatgcttctgatgttggcatcagttaagcctttgattttgattatctgcttctgttcaccgttatttgttaaattgattggaaatattttatcagttaatttgggtggagaagatgccgaaccggcggatggcattttcggaaagaatggcccaacggaatcagacgattgaacaaactgaaatataaatgtgatcaaatgaaacaaatataaaaaatttatttatgtgtagaattttaacttttaattttttgagaattttcaaaaattttttttttatcttaatttatatatataaaacgaaaaaatgtaaaaaaaaactacgaaaatatatatcaaaaagttggaaatatgtaaaatttaaataaaattacttggaatttaggaaaaagtatgtatacataaaaatcagaacaatgttaattttcaatattaattcattaaatatcggtaattaattaatcaattaattaattacccatgcttccatggtgcagctgcaactttggcttatgaacagcttcatttcctgctgttgttgtttgttatacattggcagcatgtccaaccccagcagccaaagtgcggcataatctgccaaaaaggcaatgccattttgatgaagattggccacaaaatcattttgcatggcacactcatctgaattattaaatgaataattttctgcaaatgcaaattaatttttttgaattaaatattttttcaccaattttttgctcaccaattcgattttcaccgaagataattaaaaattgatgcaatttttctcccaaattaaagcttaatttgaggtagaaatttattatttaatgctcgataattaattaatttatttctaacggttgtgaagcaattgtcgcctccagtctaatgatggaatgtgaaattgtgccattgtccgttcgcattggcactgtgcgcagtttaatgccatgccaacgaaatttgcaatttttattgccatccttggccatcctttccccgcattccttggcaatgtcgtccttttgattcataatttattaaaattagtaaattaataattttttattacttttttgtcatcaattgtgaacgctcttttcgctttaaaattggtcacagtgtccgaatgattgccaagttgaagcaatgccggataacagatgagcagcctaaaagggcatttaaaaataaaaaccaataatagttttttaatttatttattttcttaaaatgtttttatttcttatccctttttaagccccggttccgatcaatttaaaattccggtctctataaaattaaataatttgaatgtaattgaattccttctcccacccttcatcacaatttcccccttcatttggaagccaaaattcaatgccatagtgctcttccgtggcttcatccgtataattttttgcactacatttctcaaaagctcgaaattgaattagcttcattccgtctgtgccatttgtcagatagaaacttaaatcactttttaaaaaagcaattcttcaaaaacaatttactgttcggcgttgacagaatggtcatagaacgacgacgttagaacaaaaatgaaaacattagcaatcataaagcccattgtgcataaaacaatcaataatctcaaataaaaaaagttattttatgtgtttaggctatattaatgcattttaatagaatccattttcaacattaggag

SEQ ID NO: 17839 - DNA, 1536 bp, Heterodera glycines
agtgaattttgtatcccaaaattgcaataaaaataaaattttttgtttatttctttcttaactaaaaaattttacttttattttacatatgaattctcgtcgaaggttaaatgccaaaaattaattcaaataaattcgagttgttattatttaaattaacattataaatatttatttttgctttcgttaatgattgaaattacaataaataattacaccaaagctttcctcataaaatgaaaagaagttggagagaccgtgcacgagaagattaaaaaataaaaacaaaataactacacaacattgccattgaattaaatcattttaaattaaaattaaaatgttttgcaaaaagagaaacaataaccttattttacatttatataaatcaaccaatttagcctcatattaattttgaatcagataaattaattaaacacgcaaataaaaatacgaaaaatgagatcacaattttattttttgaatgtaaatcacgagagaaacgagcaaaatcgggagtattctaaaaactttgaaaaatgataaaaaatcaaaggttttattaggttaaatttcaaaaacattaaaagaaataaaaggaattaaaaatacagtgtaaaatgattttcccggcagcaggatgggtcagttcagtttgtaaatttagaattattatatttattttacttaaagtgagtatttctggggttttcgtgaataaatgcatattatgccatttttggaaattttcacaagaaaaacgcaaaaaaagcgaaagaaacacctctaaggatagactttttgggaatttaggtcacggcccggacccggtcaattgtctaagccctgtcacgggcccggtactttcaaaactccgggctcaactaacctaatgatgagagtttttttctttctctaaaaatatgcctaataaaataaatcgaaaatacaatttaagttgggaaatattaatgaaaaaagtatttaaatttaatgaatttttattcctttggatatttttctaaaaattctgggttgtttagcagtttaatttttgtttttatttcatcgtgaataaatttaaaaaccaattaattgtattcaaataatatacaaaataaaatcgtaaaaatataattatttaactaaatttaaagataatataataaatttctacgaaaataaattaactttataatatataaatttattaataaatgagtcaattaaattaatacaacaacaacaaaaaaataacaacaaaaaagtttatggtaggaaaaaaataaaaatttttaacttttttaatttaaaataatttttatagaaaaaaacattttcaatcatttcaatgagattttgactttgaaatttcaaaatttagagattttttttgcgtatattaacaacacatttagaacatgcattttttgaattattcttgtttttatttttttatccttccgcacggctcccggacaatcggacagtaaatcacactaaaagataagaaaagccatcgctgaagggaaccga

SEQ ID NO: 17840 - DNA, 1821 bp, Heterodera glycines
  unsure (1)..(1821): unsure at all n locations
aaatagcaaaataaaaaagtgcgaatgtagtctaaacattatttcatttgctaattagtttaagtttggcatttcataaatgatggttgctcattgnaagaatataaaagctttttcttgccattactcgcacacaatgccgtcttctggattatggcacaatcggtcccatgcggcgatggcatttaaatatcgtttttgtgtgttttactgtcggattgcccagtcacgctctgcgccaccacctcacaaatcagagttattcccttaaaaaccattctcgaggaaaaccttcaaaaaataataaatatcgactgaaaaatttaataaaaaagaaaatctcaaagcacaaatcagaaaaatcaaataattatcaatcgtttcgattcgaagagatggagacataatgaaaaattttaaaaaataaaaaattaccaaatcgaaatatgaaaaaattaaatttaattaattatgcaacaaaaaaaggatatattatttctttaaaattattgaatctattatctcatataatttttgtcttatttaaaaaatggcttaagtaaaataaaattaagattaatcatagaaaattaatatctgtgaaaatgctgaaataaatcaaatgaaacagcaaaaattgaatataaaaaatatttatccaagaaatttaaaaggacaaagaccaaaaaaagttagattatatttaatttaacaaaaggcaataattaaaaaaaatataagtaaaataaataaattttattttataaattaaaaaaactaataaataaaaattaatgtttttactactataaatgtaacattttgtccgtaactcagttaagaataaaaataaacatttctcgaataaaagaaataaatgtatcaatttaaagttgattttttactaaaaatgctggtggtcagcgaatgagaacgttcgttatcttcgtcacgattactattaaagaacatgagattaaaaatcaaaacacaaaaacccataaataaaaaataattttttaatttaaattaaaaaaatagatatcaaaatataagggaaattaattaaaaggaattaataaatccctaattttattcatttattgaatgtaaaaaattctcaataaatgatcaaacaaacctaacaaaaataagttttaaattagtcaaaatcaagaccaaacgatcctcgggattttaagtattaaagcgaaataaaaaatattgtaatttttaaagattaacagagaaattcgttatagctttgaaaatcagagttattcccttaaaaaagcattctcgaggaagaccttcgaaagataattaaatatcgaagcaaaacaataaattaaaacatttaacactaatattctcatcagtcgcaatttaaaactcttttctccataaatccattaaatttattatcatttttcttattaatttaatagattaaaatgcgttaacaaaagataaattttttgtatatgaattgttagaaaagaagtgtattaaagtttgggcgcctgaaaaagtacaaaattgtgcatttttcacaatcaattttaaaccaacagacaaaaatccattaaaaaaataataattaaataatttatataaaattattgccgaaaattaaatgcggacgtaatgagaaaggtgttcacgaacgagaacctgaaaaatacacgacaaaataaatattaatttaatattattgaaaaatttaaaacagaaataatcaaaataatcgaaatgatttaaattctaaataaaacaaatactaaaaattaaattttacattcttggtatcgtttgatagcc

SEQ ID NO: 17841 - DNA, 2344 bp, Heterodera glycines
agtaatttcaaaatgagaatttattgtgagattttaaggaaaatagataaatcggtataagttaagctgtaaaaaatgaaataaaaagattttgaacagtattgaataattttttcaagaaatatcaaaagcattttacaatcaccttttcttttgttaagaattttgaatttagcagattagaatatttagaaaattttattatattttatattttttggaaaattgtcaatgtttttgaggtcggaatgaattatttccgctttccgacttccgtatcggcctcggaattccgatttccgaaatctttttaagccatagaactccgatttccaaaaattcgttaagacttaattaaattttaaaacatttttgtaaaaaagatttaaaaaattaacattcagaaagagaacacttatagctgaatgatccatgaaatattaatttggttgaaactgagttaatatgaatttatatatgtgacaattcttttttcgatagatcaagaggatgaggatgaggaagagcaacattatggagaagaggaacaaaattatgaagaaaacaattaagaatgtcttgaaactttattacgatggattttgtcgaaaatataattcatttttaaattttttaaattaagaaaaattaagaaaaatatatttaaatagtttatttggttcaaagcatttaaatttgaatattttgacgattatcctttgtcttggtgattaatacttgttggattcagctgaacaaaaactttcacttttcaggtcccgccggtggcggcagcggttattacggtgctggtggcaataatgtaatatgaaattttaattttattattaattttcaatgtaaatatttaaatttgacaaaataaattggtttattattttaataattttaatttgttttcaactttatccatatccttaggtatctcacacaataacaaaaatttagaaaaaagaaaaacaattaagaatgtcttgaaactttattacgatggattttgtcgaaaatataattcatttttaaattttttgaaaattttatttaataaattatatatgtagatgacttgaagttttaaaaagaaaatttaatctaataattgcttctgaataaaagttataaagcattgatcaggctagttttttgccatggtcatataaatataattttaaacatttaaaattttaagtcattaaaatgcaaataagccgaaatgaatttatatattcgatagtcctaagaattctctactattgttaattattcaaaaagctcatcgagttttaaaaaagttctggttaaataattccgacttaagattttgtggaatttaataaccataacttttttttactatttttaaaaaatttgaaaattaaatattatgatagataataacatataaagctattgaatagagaccggacaagagggtcggtcgaacggtttcggttaaaaagcgaaaaactcaaaaaattctcggtcgaacggttgcggttaaaaaaccgaaaaaaaccgaaaccgaaaaactcaaaaatttctcggtcagtttttttcggttaaaaaccgaaaccgaaaatcgaaaaataccgaaaaaaaccgaccggtccgatctactattgaatggcaccatgaaatattaatttagttgaaattgggtcaagatacaatttatatgtcttttaatttttttgagaaaaaaatttgcccgaagagcaaaaaaaaggtctttgctttggaaaatgttttgctaattttacaaataattattgacgaaaatgttgcatttttgaatgttgaatttttgctgcctttttccaatttttcgtgccttttttgacgtttttgttcattttttatgccttttttcacatttcgtgcctatttttggtgcctatttgagaaattttcgttccctccaccgaaaattattgtttataaaatatttttttgaaatttctaaaaattcccaaccgagtcaagatgagctacatttggtcgagaccaaaggaatcagcttagattccgttagattggcacaaatagcagttgaagaagaatcggatgcaaacggaatggaagggatgaagcggaatgatgagagggcaccattgacatgaaagaatttagagagataactcagcgggtttaagtcgtaaagacttgcgatctttttcatattgtagcaaattttgtcccttttccaatgcgctggttttcaaattttccaaaaaaattttcacaaccccctaggaatttttcaaaaatttttccgattttcaaagaattttgtggtgtaccgatcactatgaaggagtgatct

SEQ ID NO: 17842 - DNA, 2924 bp, Heterodera glycines
  unsure (1)..(2924): unsure at all n locations
gcgccgaaacgggagcgccgaaacgcgagcgccgaaacgggagcgccgaaacgcgagcgccgaaacgcgagcgccgaaacgcgagcgccgaaacgcgagcgccgaaacgcgtgggtccccaaaataagggcatgcaaaattgcttcaaatcagttatttttacaatttatttgatcacacggcgagtcaattttgggctccaagtacaattaagttggttttttcgtcttagtggtctgtgagttagtcaaaaaatgggcggtcaccggttcgaatccagtgcatgttatagctgtattttgaggtttttaaagcaaataaatatatgtgaaatggtaacacagtttttaaagaagctcaaaattttataattttatttcctggaaaaacaaagaaaaaaccttttatccaactgttattcaaaatcgaattgttcttctccatcgctttcttcgtcgctctcccggcctccgatttcttcctgttgttcttcacggtccttaagcatgggaatttgatttggaacccaatttgcaccaaactgacccgcttcatttcgtcaatttttcctgtgtcgagaagccaatttgagacaaagtggtgctccaacaattgacgcatttgttcttcgtcgggcattgtcttccaaagctgttccaaccgcctccacactgaatgcaatgcttcatcacctaaaaaaaatttagggcttaaatttcaaaggctttgtgaccctgaccctgctcgtccaaaagtgccaaaaatttgtgctgtctggcgaacggcacaaaatggttcaacaccaagtggacctttggttttaaggcgagcaaagtgcgcatccgtggctgatcgtcgagaaatgtccgaaattgatcaatcgacgtttccaattcgtccaaatcccgtggcgacaatggctgggccttaaatttattttttgattttaaaaaaacccaaataaaaatgcacttttgtaaaccaattttccaagggtttgacaaatagagtttgcagcgaacatcggctcactgatcgagagcgatctcgatcgatcacatcagcgattttctctgccaaatttcgccgcgaggtccgctccaatgtagccgcattctttttgcgccgtgtagatgctaagaatattttggatgataatggttctaaaagtctgcaaatttacttgtcggctggtccttcggcgcctgttgttccaattgacggcgcagctcagcgatcattgcgtctctgttgcggacctgcagtcgaagaaagctgatcgcttgttcctgttccttcagctgtttgtccaattggtagtttttggacggacacgcactttcggcggcttgggtcgatgtaccctctccatctgctgttggcgcggcatcggtctgctttagccctgaaaaattcagtgtttctaaaataaaattaatttgtttaattttcgtcactttttggcgtcgagccgcctttttgagcaagcccagcgccattccttccgctttcgtcttgcttcaacaccctgagttgctcatattctttaaattttcgctttttttgcgtgtcaagaccatttttagctgaaaaatgattgaaatttattgaaatttttcactagggtcaaaaaaatttttcatcgggtcagattttcttcaattttgncataggcncatagtttgacccnatctatcgaatcatagtttattttttagctgtctagtttttaactctagatcggctcttctatttttacaggggaaaattcccaaaaaattttaagttttgcaaagtttgggcgttctgattacaaaataaataattgtaaggtagatccgggttttcttgtttgccggccgaagccctatgaatttcacattctacatttatttcatttcgcatttaatttcccttttgcttattgtcgcccctttcccgacgataattgatcgatcacatttcagaattaatgttttatgccagctgaaacagcatcctattattctgggtcttttaagcatttttgaattatttttactatggactctttatataaatgtcctgtaacgattgctatttctcttaagccgtaccccctcatgtggaaatcctagacaacatcatatatctgaggagcaattggactattttattttttgagttttaaaaataattaaatattttctgcatgattctctaataaaatcctgtcgattaaaatgaatcaattaatgttttatgccagctgaaacagcatcctattattctgggtcttttaagcatttttgaattatttttactattgactctttatataaatgtcctgtaacgattgctatttctcttaagccgtaccccctcatgtggaaatcctagacaacatcatatatctgaggagcaattggactattttattttttgagttttaaaaataattaaatattttctgcgtgattctctaataaaatcctgtcgattaaatgaatgaattaatgttttatgcctgctgaaacagcatcctattattctgggtcttttaagcatttttgaattatttttactattgactctttatataaatgtccggtaacgattgctatttctcttaagccgtaccccctcatgtggaaatcctagacaacatcatatatctgaggagcaattggactattttattttttgagttttaaaaataattaaatattttctgcgtgattctctaataaaatcctgtcgattaaaatgaatcaattaatgttttatgcctgctgaaacggcatcctattattctgggtcttttaagcgtttttgaattatttttcctatagactctttatataaatgtcctgtaacgattgctatttctcttaagccgtaccccctccatgtggaaatctctagacaaccatccatatatctga

SEQ ID NO: 17843 - DNA, 2677 bp, Heterodera glycines
cccctattttttggctccccaccagggctctgatgccgactctgaagtgagggactcctcttttgctgcgttgggtgccattatgaaatgcattggggaaaaggccttgggctgtttcatctcgcctgaattggccaaagatgcgaacaaaatggccaaggtcttttcataaacttttttcaattaatttttgttttattttacttttagattgccgaaaaccgtgacaaggctttgacagactctccaaatggaccaaatgtattacctatttccctcaatttttaattattattattttaaaattcggtttaggatcgtgttgaactctttgccaatgcgaatctctcttcacgtcctgttgctgactcggcaaaaaagagagatgcgtccacgtcgcggctcaaccaaacaatcaactcaactgtggacgatccaaatgcgacaaaaagggctcggtctgctagcgggtaaatgaaaaatcgtacaattttcatttttgctctttattttttagccgtcgtcgttcggttgctgtcctccccaacaattcaatgctcaatgacaacaccgatgagggcaatccgcgtgccccgcgccggtcacattttgttggcagtggtggactttcctcagccgtttcgtactcatccaacttgaacaccacgatgacacttcaatcgcaaaatgttgctggcaaattccaattggacccaaaatttttccaaaacgactttgatgacaatacattgttagccggaaacaacagaggagaaagggaattgacaaacaccacgcaaacgctgctgttggacaaaacattcaaagtgtccactccaaaagtgggcgacaaacacaacaacaacacaaacgcggcacaatcaatggatcaggcatcttctgttgatctacaaccaattgtaatttcgttaaaaatactctgtttttatttagccctctgagaatattgggttgtctcataggtattgagtgtcaaacaaatgaaaattttccaaaatattaaaaaaaaatcaaatttttggatgtatgatctgattcagaataatgagatgaagccatctaataaaaaagaaatgagaaaaccatagcccactctttacgcattaaaatgctattactaaaattgtcaacaaatgcaataactaaccaatttttataataccaagaatttgtgacccgttccccatgagaattggttgaatgttttccgattttttcagaaaccagttgtgcgcccaaccagcactttttcgcgtcgtagtgagtcagtgtcttcaatttcttcgctggaaagtgcggaacacattgaccgaactgtgcacaacatttcctgtcttcagcttaacattgccgaggaggcgttagcccaggtaaaatttaaaaaaaaaaaatttttttttttgggattttgcaaatttgactgcgccctttcagttacttcatctgatgaacgaccagacaacacggcagtatattattgacagaaccgaactcattcttaagacggtctttcattttttcaaaaagtgggaattttattttatttttttagatggtcacgcaaatctttcacattcgaagccaacatcttgaacaattggacggagtgaaggaaggggaccaaaaagagcaggagcttagtgaatttatgcgttccatttgcaactttcttagcactgttagtgaaatgccatcaaacggatttcataacaatgccactaattcaatcccttttagctgactaacgaaatgaccattatgcaacggataagtacggacactttgcgttcattcattgattcacttctttcgttggtcagcgatcagcgtcttaaaatacttaacaaacaggtgattttttaaaattgatttggcttttttttaatgtttcaatcattttttataggtattccgttctctcaacattattgtgattcgactgtgcgaattcacaaatccgaatgtgtgttttgtggcgctgatgaaattggtcatgaaataccaggcctctgatcctggcggtcaattgtcatcgttggtccgcaaatgtctcaccaaattcactgacgcaattgttgagccgaccaggattgaaaaagtttattaaatagtttttttttgtaaacaaaagttttctttttaggttgacattctgactgtgctgcacccaatccacgagtattattcgcgtttttatgttgccgatggacaaaccaaccaaatttctgacacagtgaaggacacgtccaaattgttgtgcatttttttacagcgtttggtcatcaaccaaaaatatgcggtacgtttgtcacttttagtgaaaaacactgtaaattttattaagaattttattaacttttggtttaaaaagggatttttaatttattttttcctattattttcgactaaaaatttttaatttttttgtaggggtgtgcatatacttattgcagcctttctaaatggatttttgctttttgttagatgctcaactatctgtatccgtttcccgaaagttcccaattggtgagttatgtgcggcgatgtatccgaacggtgggccgaaaagcgatggaagagaaacgccaggacggtggcgcaggcggagctgccccaaatcagaataatccaccaaaaatgggcgggtgatgatgaa

SEQ ID NO: 17844 - DNA, 2313 bp, Heterodera glycines
  unsure (1)..(2313): unsure at all n locations
agagaaacggcaggggggtggcgcaggcggagctcccaaaatcaagaataatcaaccaaaaatgggcggtgatgatgaactgtcgtcaatattcagccgaatttctgggcgccattttcaatggggtgaatgaaaaagaaattttatgtggaaaaatttaaataaaaatagcaaacaaaaaacgggaaaatttgatttcaggctgtcgaggacttgtacaacttcatggacatccatcctgaccaaaatttaaaatttgaacaactgatggctcggtgcgaatacgcttccattgttcggcgcgcatttgtcgaaattcgtcaaactcgtcttaatcgggagccattgaaaccggggtaaagataccattttaaaatttaattttcggctggattttgtcaaaaaaatacagcccatgtttattttccaatgtcgaacttcatagttattttcttgttttttaaagcatttgtgtgcgtcgtgtgctgccggaggaaacgcgtcaatttttggaggaacaaaacgcgttgagcaaccgtatgaatgaactgatgcgattgttcacacccggcgcctcccccagcaccgctaacactccctcctccgcaacggccgcctccattattatgggcactcttaagaataacttgacgaggaattagataaatatataattggcgctctgaaaatgacatgggaaagagccattatcaaaacaatttttattccgcttttttaatttattactcatttgattagaaaatatgcccatgttttgtcaaaattccaaaaagtattatatttatcgacattttattcggcttcggattgactgctgtaccataaattacaattgcttcttgtttcacttattcagaccgatcttttgctatgtatagtataaagtgatgcaaaaaatctagcgcctttgatttctgaagtttaatgcataatcagagctcagattatttttaaccccaaatttattggtaaactttttaaataatttaaaaaatcaaaaaatatatgtagttgatgataaatcatagacaaaaatcaatgatttccaaaatctgagctcaggtccgtgatcagcgcatttttaagcctagaaaaaatacgtaccaatttcgtcgggactccaattctagatgtaaactcgattttaagattcattgatggaatcgagtccaatttaaaaattaccatttgaggtggattcacactttttgaatataatttaatttattctctaaatgacaaacacgacaatatatatttaatattaagcatcttatttatgaattaaatgatttcaagcgaacagtgtgctcggttggctgttcattacaagataagcacattcaaaacgggtcatctgctgctgtttcccattatttccctcctctttgatcgacggcgaagagccgccgcccgcgggcgaaagtgacgtcgtcagctcggatttgatcgttgacgtattcaccgccggcggcgccacacaatccgtgccaaaaggcgaaaagtgacgtacccccaaatgcttggcgatgtgcacaacgtccgacacggcgccgcctttgctcaacacgccgggacgaatgcatttgtcaaagtcgcgctccaacacccaattggacagcgtaccgctgaaaaaaatacggaattaaatgggggaaaaacaaaattttatttgaatatgacagtattaagtgcaacacaacatcatttgcttacttcaatttctcaaaacggatgtcctccatgttggttttgtacacaaattccttctcaaacacattgctcccgtccagaacagtgaaatgggacaagagtttcctgcaaaaaattggaattaaaacataataaagtaaaatttgcatcactttgccgtgttcgtcttctcatgcggcggcaacttcacatagagttcaatcattatcttaacgaggcgagggagcgctcatttacaataaaaaaggtgccaacatttcttttaattccccacccaccattgattggagtgccaaatgcagtgggatcagtcgctcaatgcgatcctcaagcgacgccgatgaatggcgaaagaacggctccaagtcgatggtgttcggcagaaagccatcagttaaaaatcgatgggtgagctcaccgctgaaacggtcaacgccaatctgtgtatggtgaataatttttttgggaaactacaaaaatttttatccgaaaaaaaantattaaaatttcgactgtttgtaggaatattgaccccgacaagagatgtcgagacccattttcgccatgtcgtatagacct

SEQ ID NO: 17845 - DNA, 987 bp, Heterodera glycines
  unsure (1)..(987): unsure at all n locations
tacccctgacttttcgccactaaattaattatgctattattttggcatttcgtaattgaatttcatttcttccaattaattattttttaaaatgaacttcattcatcataaacttttaaaacaaagagaaatttaatgctgcgaaactgttcaaatattagtagataatgaaatattggaaattgaacagctgacttatgcggtaattacgttaattagcgtcacttttaattgccaattgggagcatataaaaaggcattaattaatccctgtcaagcatcaaattaattagcaaacatttaaaataatttcctccaaatgctgctaaaccctgttcaaagtgcacttttgcttgtgctaccgttcctttttgtgtcctccgatgctttttggatgtttccgttcggcggcggtggccaaaagccaccagcgcaatggcaaatgccaaaatggccatggtatttgccgaccgatgccaacaattcgtcaacttcttcctcctcttcttttttaatataaatgaaagcaggaaaatggcgcttgttgggttgttcagtgccaacactccttccccgcccctactcgtcctcccattcacctcacacgcaggcatttagtttagagtttgttgtatatgattcttttttaatgaaaatataagtgtatataattaggctgaatacacttaagtgcatatgaatttgtgcaaatgccaacaccccttcccttcagccttccgcatccccccattcacctcacaggttggcatttagtttcgagtttgtgctgtgttcagtggcaacactccttctcctcccctcctaccccactcacctcacacgtactccctcccttcatcccagtcattaaaatgaaaaattcatccatcccctcctcctctcnccccattgttctcccttcccccttatcctgcgcccgccccatcatgcccacattaatgcccatatataccatttcactatgcc

SEQ ID NO: 17846 - DNA, 1728 bp, Heterodera glycines
atgatcagtagggatgggaatttaagtcaaatgactttttttttttgctgactctaaatgaccttaaaattacttcaaaaatgttctaaactttgttcgaagcttctaacatgcattttttggtgactttttttgctttttacactttttgggatttttatgacttttttgcgtttttgtgacttttttcatgactttttacactttttaaagcaaaatttgactttttgtgatgaaaatgccgaaaaatacaaagaaaattcagaaaaataagtcaatattcgaggcggaactgaaatttcttataccataaggactcaaatgacgggaactgaaaaaataaaaaataaaataaaaatttggcggtgtaacacttttgaatattttttccgctaaaattagtcgttttaaattactttcttcgaagaatgtttaaaacgcttttgggtttaattacatttgtcttattttcacgacttttttggatttatttagtgcttttttggcatttttctgtgactttttggttatttttcatgactttacattttttatgactttttcgtgactttttggcgatttttaatgactttttaagtcgccttttttgagaattttcgtgacttaaattcccatccctaatgatcagcaacaattaagaaaaaatgaaaaacttcctgaaaaatggccagaagattttatggagttcgcgtgcaattcgctttggaacgtcgttcccgtggtgactactctcatttcgcgccccaacgaacggcccaacacttacgcgagtcctgaacacaaaaacgcatgcgtagaaacagaatctagtttggtcacaataaaggaccttcgcgtgaaaaagatggtgagtgattaaaaacaaacatttatataaaatatttatattaagtaaaataagcactttatttgtttttgatttccacaaaaaatttcactgctatatatttatgctccgcttgagaaaatttccctagtcccagggttgccattcgtccttagattccagagaagtctttgactctgggcgtcgtgtcttggaaaaacttatttttaaattttctaaaatcaaataaactaaaaattctttaacttcgaataataaaaacaagttgtttgtagtcgaataaatggctttgcttttgtataaaaatgttgaaataattgtttttttacaaattttatttattttttcttttcaaaatttttcggtcaaaattagttaaaatctcatttaaaaacaaaaattactccggcggtgcctgccggcaacctcggactttttcggtaaacatcctaattatctcaaaaattctttaaaatttaaaacttttaagttatacctgtttacaagtccacattaagattccaaaaatttaacgcagcgcttgtcggcactgctggttcatttttggggcatgctttgaaatgacaatttttttcaaaatgccttttgaaaacaaactcgggagatggcacattagcctagtccatttatttgactataataaatagacaattagcagtcaggctgatgtcggcaattgacacattctaaattgataatttatttatcacagaaagagcaactgatacgaattggtcccaaatgcgatgtgtggtcttttggcgttctaacgttggaaattttggcacacactccgcaaataaatccaatcgagaaaagagaagacccaatcgtcttat

SEQ ID NO: 17847 - DNA, 1415 bp, Heterodera glycines
  unsure (1)..(1415): unsure at all n locations
agattaggggggtgggaggggaccgacccttggtattcttacatagggcngnggngggggggggaagagataggatccccctttgacggacaatagagnaattcgacaaaaaaggagttggataattaggaggaaaagtgaaaacaacggagtgattctgacacggaaaaacaccggaaaataccgtaggcgagaagataccgtagaaaaatgcgaataatccttttttataatttttgttttttggactaaaaatgttgaatattttttatcggttagcggaaaaagtaaagaaagattggattatgttatgggaggagagagaaaggggaaatttggtcggaggaccaaagaaaagccaaaagaaaaaggagggggggggggggagcaaatagcggcgtggaaagggggaaaagcattgacaggccgagaagccgaggaggagcattgtcggttgcgctttattattattattttcccctttcccgatccaatccaacatttattcattcattgggtccgctttctcctaatgatggcaataattgcacctttccattgcccaatatttctttttatgcttttccttttttgcccctccccaaaattggccctttcttcagactgtccgtccttccattccctcgcaaacaattaattaataattaattagctcattaattagcccatccattttttcaatctctcctcccccctttcctttccaatcgttgttcaatctctttcattattattttttgtatgataaaggagcattcattcacacattcatttcccgtccgtcttatcaccatccaaatttggctaaaatgggcaaatttttgggggaaataaaagacgagaggcaacgagccaattaaagtcaagcaaatcgacacaattcagcacacttttcctccttttgccaactttcaattccttccgtttctgtcagtgccgtgccgaaatgggcaaaaagtgaccatttgccgattgccgtcggccattgttatcaaatggacccatttggacgtgccatctccccacaaaggctcttatttccgctgtgcttcacatttgcctatttttggcacactttttctatgcgctccgtcaaatataacgggtaaaaagcgaaaaaggacaacaaaaatgggaaaaactaagagaaatgctgaaattgggaattgttttttgttgttgtttcgattatgagggttttccccgtctcaaaaaagtgaaaatttatccattctttgccatggttaggtacaatttataccgtattcatctgccaccgtactccgacacggcgaattttgtccaatggttggaagagatggaggcaaaactgaacgaactgtcggttggttgaaggagtttcaacggaattgaacatttcttgtccattatca

SEQ ID NO: 17848 - DNA, 1839 bp, Heterodera glycines
  unsure (1)..(1839): unsure at all n locations
cccccgtcccatgcaaatgcctcgccttcggtcaatgcgtccgttctgcgtcagttcgattttgtggtgattccctgcgcaaacccggacgggtacgccttctccatgagcagggaccgcctgtggcgcaagacgcgctcccgcaacgactcgctgcacaaatggtgcgtcggtgcggacgccaatcgcaactggggctaccgctgggcaggtggggtcgccacgccatcgaacacaattttcggccccatatttctgactttggcatttgccacttttgcagagaccggcgcctcccgaagcccatgctccaacatttacccgggccgggcgccgttcagcgaacccgaagtgcgtgcggtgagggacctgctgagcccggaactgagtcggctggtggcgtacatttcgctgcacagttacggccaattggtgctgtccccgtggggcttttccaacgtgaagccgtcaaatcactgggaacaggtggaaaactcgagaatttgttgttttggcattccaaaaacgaactgatcaaaccatcagcaaaagttggcctcgttggtcatcgactcaattcgcgaggccaccggcacagaatacactttcggcaccatcgcagatttgctttatcctgcctcgggtacaagcattgactattggcaggtgcttttatcaattgtaaacccaacaattaactcattcaaccaaagtatcgcggcgtcccttacatttacggcgtggaactgaggccggaagacgtagaaaggtttgatttacatacatataccatttcggaagaatggcactcatatgcaaataaattttaattcccacaaaatttcagtgaaattcacgggtttgccatcccacccggacagattgagccaagtggtaagcgaactgaacggaataaacagacgaaaacagtatagggaaagaagtgttcacaatggtcaaaaagatgatggaatatgtcagcgaaaatgacaacaaaaggacggagaagggaagaacataaaaggagacaaagccaagaaaaagcccaatttgagaaggaattggaaatgtaaatactcaacacaatcattttattgtttacattaggcataaatattgaagaaaaggcgaaatgttaaaatattcaaaataaaatgtaatgtgagatacacacgacttcgagcagtacaccagcaacagcacaacagaagagtcagttccataccttcaacagactgtcccatgagccagtgcacagcgcagttccatcgttgggcacccccaaacacgaaattcggttgtcgtggccggaaattattcctaaaatggggggtggtaaattatatttaattgtaaaatgaatcactcacccgtcctttcaacgcgcattgagtcccacaaattgcaattaaagtcgtcgcacccgacgaacagcaaacggcccgacttggaaaaggcaacacttgtaacgcctaaggaacggtcactgattaattggaaaagaatgaccaaaaaaggcccaccgcagatgatgttgtcgtgcgagtacatggccaactcctggtcagcgcggatgtcgaacagtcggcacgtggcgtcgtcggagccggtggcgaaggcgtgcccattggggaagaactgaacgaacgggaggaaaagtgccatcagaggaaacaagtcgagaaacgggattaaaaagatggcaaaagggtcgggaatgggatctcgccggaattgaacctcccattttcatgnttcccatcgactgcattttcattgctaattgtccgtacccgaacggcgtttatgtccgactcgtgcccggggaatgtctgcttg

SEQ ID NO: 17849 - DNA, 3407 bp, Heterodera glycines
  unsure (1)..(3407): unsure at all n locations
cctaaataggacttagaatcatcttttagtatttaaaaattcctttttgatatcccatttcaaaaaaaaaattatttttttgtagcacattttcacaaaaaattctcaaaatttttgaaaaaattgcgaaattttggatatttttggggacatttaataaaaaaaattccttaaaaattctcaaaaaatgcaaaatatgtacgcaaatatgcaaaaagtcctaaatatgtataaaaatatgtacatatgtaatatgtagaaaaatctcaaaatatgtaaataaaagtcgcaatttttgttcgcaaacacaaaaaagaaagtgtttttcctactaattaggctatggagaatccaggaaaaaaacatgtatttacataaaaaaagaagaagccctggttattattgtatttattatttatctctattattattattattgttatttttagtgttattattataattataattattttcatcttaccattttgcgttgaacagaactgcgcgaaacatttctcttcattgttgcaatccctgtctcgcggttttcttatcattaattccgattcaacgagatatttgcacctagttgcttaatgtggaatttgaaaaaaaagtgctttgtcgttataaaaaaaaaatccatcaaagagagcgttataaaataaataccaaatgaaaattttcaacaaaaaacttcacataattttgctcaaaaacaactaaatttttaattcttggtatcattcgatagctctaagagttctttattagcctgaaaaattcaaaaatttcgttttaagtttgaacaaagttatgggcagaagcacacacatgaaaccttttcaaaaatttttggccatgacttttttgaaactaaacgaaattttttgaaattttgatggattagaaaacacaagatcacgtagttttgttggttctaagaaagctttaattaaaatttattgtttattctaagtaaaaaatgttagtcaaaaattcattttattttttattttcttgctattattcgatagccataaatgttctattagcctgcaaatttcaaaaaatttcgtcaagtttcaaattcgaaaacctggttgtgcttgtgtacttttggccataactttgttcaaacttaataaaacttttcgaattttttcaggctacagagacctcctagagctaccgaataatatcgagtctaaaatcacttgaaaatttctgttactgtattcacttaccatgcccgggtttcggcaaaacgctgagcaggcacaccagcagcagcaaggcaaaaatcgatggacgaagcattgagcggaccattttgtgaagttcttttttgctttttttaaattaattttttaaaaattacattttatactaattctttaatttaccgtttttgattggatgaagggcagagtgatgggatggatgaagggtgcaaggaaggttcaactgattgatgattgaatgaaaggatggattagctgtgatttgaatggaaaatgtgtgatttgggtggcttttcggtgcctatttatggacagacaaaaaaggagtagaaaaaatgggaaagcagctgaagggggcgccaaatcaccacaaatttacactccccaagcacaatttttgtccaatcgctgggaaaagcgttggcaaattgagcaaaagcgatgaaaaaagggaaaaagcgaaaaataggaagccgaatcatcgttaaaacaactgatggaatgccatttccgatggatgggaatggaccaattggacaattntcgtttaatattccgtacaataattattcattttttttgtggccgacgaccaatcgtttggaaaaagtgttagcaaataaatggaatggataaattgagatcattaaataataaaaataatttagcatagtaaataaaatatttatgaattaattatgtacataatgtataagaaaaagctatttaaaattgaaaaaaaaatttctggaggcacttaagaatttataattgactcatttatcagctaacaacagacagaatgtcaataaggtgggcgcccgagcaagcgagcggcgtgagtgtgcggtttagttttggccaaaatgctaatcaccggctttatttgaaaagtggtccgccccaccccagcataaaatttgttgggctagaaccctgaaactagtaccaatctattccactcgtcgacaggaatagattactctctcaaatgcttttagttcccttaattatacgatttaaaaaatcatcgacaaaatcatatgatgataacatatataaaagcacagatttatgcagttttgacgccagattcttgattagcgcctaaaacaaccctagaaaagtgctttctcttgtcggaattatgacatttttatggtgagcggcattacggaaaagtaccctattacattatcgtttttaaacaaattctgttaataactgccatattttccaatgacccatttttaacggtaatttacagaaaggagggcggtcgatttatacaaatttatagtttaaaaaaagatgattagcctacggggacaataagccctaattacggttggtctaatcaatgaaatatgacgattggtattataatcaaaatgttccggtcaaaaaaggaagattcctttaggggtttaatcaacgtacatactgtaatttgaaattttacccattaacttagaatgaatcaatcacaataaaagacagaacggtggtcgtggaatataggttaaaagtcgtacaacaattaataatgcgctactcattcataatccatggaaatttcttcgatttttcgtcggcacttcacaacaaatttatttgtctccccatgcccagtcaaccttaaagcgaatgaatgaatataaattattttacaaatggacccgacttttattaccaagtaagtttgaaaatttttaacccaccaagttgtcgaatatcgtttttttcggttccgatgcggccgcctcttcgtattgatcaaagcgcttctcctgcttctgctcaatctcagtctgctcctcgcgctctttctggtcacttcgttggtcttctccgccttcttgctcattacaaccccacgaatcgtctagttcttcgtttccgaaatgatcagtctgctcctcgtgtcttttccgatcagtttgcttctcgcgcaccttctgatcacttcgttggtcttctccgcctccttgctcatcccaaccccatgaatcgtcgagttcttcgtttccacaatgatcagtctgcttctcatatcctttccgatcaatatgctcctcgcgctccttctggtcacttcgttggtcttctccgcctccttgctcatcccaaccccacgaatcgtcgagttcttcgtttccg

SEQ ID NO: 17850 - DNA, 4331 bp, Heterodera glycines
agaatcatgtaccaggtccaatgttgcaccatatctggcttacaagaaccaatccaaaccacaggagatcgaagaaccaccttaaataattattcctaggaaaagacttaaagagcaaactcctgatcctgaatcagataatgatacacttgaggagttaactccggagccccaaacaacatccacactcaaaacacccattccgatcaaaactattatacacccgacccttttaaacggtctttttaggtacgtgaaggaaaacaaagatttatttaaaattacggcggccggaaagttacagtcgaacatgaatttgccgattgaaaacagtaattataaagatgttttgttgtatctcgcagggaagaaagatgaaacgccgcgcggtgcaaaatttctcaaagatcggttactgaaggatccaacagtaaaagacatggttgataaatcaaaggtcatgtggggacgtggaaggaaaaaggcaataaaatctataaaaacacccggcatagtgcgagagaagaaacccttcaaaccactaatatgggcaagactgtagagaaaattttatcgaaaatttattataatttaaaatctccggcaagtttcgctgggattcaaaaaattttaattgaggcgaaaaagattgacccgaaaattacgaccgatgacgtaaataaattcctagaaaaacagagaacatacacgattcacaagcccataaggaaaagattcccgagactgaagacaataccgagtggcttccacaccgattggcagtgtgatttatgcatttttgatcagttgaaaaagcataacgacggttacaagtatttattggtctgcatcgacgtgctgagtcgaatgatctttagtgcaccagccaagtcaaagaagagtgaggacatgatcgaagcttttgatcgggttttcgaaaagtcgaaaattatcccgatgaagatatatagtgacagcggactcgaatttcaggcgggaaaaatgaaaaattattttgagggaaaattcatcatcaaaaatgtaatgtatagccccgacctccacgccggcgttgttgaaagggcaaatcgaacaataaaagagcgcttgtacagatactttacaaaaatggacactctacgatgggtcgatgtaatagataaaataattacaaacattaacaacagtgtaaataggacactgggggtcaagccgtcttcaattacttttgaaaatgccggaaatatttgggataagttatttggaaatttggaaacagaaaaaaagaataaatttaaaattggtgatttagtccgaattacaaaagaaaagggtatatttgcaaagggttatcttccgaattttacggaagaaatttttaaaatttataaaataattaaatcagacccaatcgcttatagaattgaagatttaaatggagataacattaagggaatattttatgatgccgagttggtaagagtttcgaaaaatcaaataaataaaatataaaagaactttgacaaaagcaaaaaataaataatgaataaaataattttcttcgtagtttttggtttggcaatcggccaaataaatagcgattgttgttgcctatctaatgaagagaaacaacaattaaattctgctagaaaaaccattgaaaaatgttttcgggatacattccgattaaataacgaagcccgagattttgctgctgcttctcatagggcaattacggaggcagaaaaaattaaagttcgtcatcctgaggcaccgggtatgaaaacgtggttcggtaggttattagaaggggtgagaaaggtacagagtatttcagttaaaattaatgaagaaaaacagaaaattggtcataagatggacaagtgtttggacagaaaagatgtgttaatgtgtcgtgaattggctgacgaagcaaaggggacctttgaaattgttaaacagtatagaaaggacgtcggtactgcgtaccgtaacgcctatactcaatctgacctcgggattggggaattggccgataaagttaaggaaacaatgaaggaatatttatcccgccccggaccttccccaagaccaacatttaaagaccaatttatatctgattaatgtataaaagagaatggaaagacaataataaatttttaaaaatgattcaaagaacagaaaaaggaacagcaattttgttggaagcctcaaaaaaagaggctgaaagggcatggaaggaagtttcagtattggtagaagctgatgattattccaaatctgctcgtggagcccttaaccgggcaattaaatcccgagaaaaggccccctatgccccaggggttcgagaatggttcgtaaaaatgtcagattgtatctgggaaatttacaccgttttggataaaattaatgcagagtctgaaagggttgagacgatgtggcgtgagattgaacattctaaagatttcgatcagaccacaaaacttgaggagaaagtatttaagagttcaaacgaaaccaagaagttgcatttcgagtcccgtcggattcatactaaaatattggagcaagaaagcagagttcagtctatagtgttgggatttattgagcttcacgagtaaaatggaggcaattcagtataattgtcacgtaattaacaaatttgggatcaaaaaacatattacaaagtttattttttccggtacatctgattatgaatttaaacaatctctagaaaaaatattagaaaatgcatatataaaagaatcaggaatttttaaaacaattctaaaactacaatattctaattttctagtagtcttgccattacgattatcacaggaaaatacaattgacgttctgttagaacagcctgtattttcacactttttaccgttggatgataccgtaatttttgaaataacaattgttaattttaataatgacaactatagaccaagaaattaattttataaggacacaagtcgaaaaggcttggaaaaggggtagaaaattagttaaagaagcagataacttggtagcctatgcctatgagatttcgaaaattgctgaatattatattacagaaaatgacccacgaaataatctattattcgaagattttttgaaacagatgagaaagacttggattctttttcagaaaatctcacaagaatataaaaatactgcctttgcaatgagcggaattgagaattgcctaaatacaaaaaatttgattatttgccaacgagcagagaatatttcgaaagaaagccaagaattatttgaaaattatcaaaaacaactcgaaaatattaaaattgaattagaaaaagtaattaaaaaaatacgtgagccgaaaaaaatagagaaagaaatattctttacgccttaccgtagagggcagtccaaaattaataaagtttatgaaatattatacacaccttatcataggaaatgaaaattgaaaattcgagttctaaaatttaccaaatgtcaaaattgaaaattaaaagattatttatatacctttccataactattttaaatagtatgaaatctttatttttatcctttttaactttctcgttttaataaatttggttcatttttaaaatttttttaacttgctttcaactgatttaatcgatataaaaaaagacagtttcctttgggtgggaggacaaaaggaagcgcaaaattttaatagtttccccaatttttcatccaaatcccactgacaatatcctatgcgatgatcatttttgatttaatatgcaacctaaatttttgttcatatcaactaattttaaaataatccttcgcttcgacttttaattagtgtataatatagttagcacatctatcatgttaaagcattttctttataaaaatttatttccaaaaaatatttttcaactattcgttttgcatttattcgcgcactctcttcgattttaaaggacacttttcattaccgaaaataaataagagttttcccaaaataaaaatcatctcgaaattttcgtaatataaaatcgtgaacaaaggataaaatattaaaaccaaaaaattttcgcacactttcatagtcctttatttcccgcactaaaaaaaatcaaaaatagaacatagagggaggagaattcaaaaaaaaaattttactaaattatttattttttcaattcataatttcgtgtgcattaaagttgttgcaattcacaaatcgataatgcaattcacaaatcgataatttccgttgatatcgattaattggggggggggcacaaaaaaaacggctgaacactcgcgcagtggtgctaagcgtaccc

SEQ ID NO: 17851 - DNA, 3098 bp, Heterodera glycines
ttatttctaacagattttatccgctaatttcccaaaagcctacccccgacatttgcggaccgaaattgcggctgaactgtctataaacaaaaaaaataaatcattttttcaaaattcggtgacctaaattagttttatatgtgatttttccgagttgaacatcacccttaaagacaaatctgatcttcttaggcaatcaacaccgaaagtatttaaaaatttatgatattttaaaaatttttatattctttgataagtatagtatgtagttgctgctcgtttttaattttggatccacactttatgtacacggcgattcaattttgggctccaagtacaattaagttggttttttcgtcttagtggtctgtgagttagtcaaaaaatggggggtcacaggttcgaactttctattttctgtaaaaatcaagaaaaacattttatccaaatgttattcaaaatcgaattgttcttcttccccatcgctttcttcgtccgtctcccgtcggtcaccaatttcttctcgttgttcttcacgatcctgaggcaaggaaatatatttggaacccaatttcaccaaactgacccgcttcatttcgtcgagttttcccgtgtcgagaagccaatttgagacaaaatggtgctccaacaattgacgcatttgttcttcgtcaggcattgttttccacagctgttccaagcgcctccacacggaatgcaatgcttcatcgcctaaaaaaattcgggctaaaatttcaaaatgctttttgaccctgctcgtccaaaagtgccaaaaattggtgttgtcgggcgaagggcacaaaatggttcaacagcaagtggaccttaggttttaaggcgagcaatgtgcgcatccgtggctgatcgttgagaaatgtccgaaattggtcaatcgacgtttccaattcgtccaaatcccgtggcgacagtggctgggccttaaattttatttttattttcaagaaagacaaaataaaagcacttttgtaaaagtttatctttgccaagtgtcccatggttttgcaaatgatttgaggccattcagctgagtaaagcctctccaattgatcagcatgaatgccacgtcgtcttttcgttcctttcgctcaaattttttgtaaataaaatttacacacatcgttttgtttcaactttcggtgggggtcgaatgggcgccagcccccttttctttccctatgtacaattatatttttgaacattatttttgcaaataatttaataaattttggggaaggaaccggagtctggttgggagccaacccggagtgactcaaacacggaaaacttccaaacatttttgcacaatttatcatttcatattcgtctttgaattaaccgacggagaaatgtcttttaatgtttttgtcgcggaatatgtatggaatagttgatagatggagcccctagaccagcgggaccgagacttctacgagattttacgggattcccgctcctgctggaaatttcaaattttctactttgttcgaattcgggtccggggctcgaaataagttgaaatggatgtcaaatttgttatcaacgaccctgaaaactcccgtatttgccccgcgggattccaggtcacgctcccggaaaattttaaattcgcccgtaaattattttttaccggtctctagtgtgcttaaatgtacatatattgtgggaaccggccactttggcgcaggccattttggcgcaagactctatatcattttgatttcacagcaaaattaaataatcttggtatgattttaagtggcttgatagtgcctattagagtcgggggcgtttgggccccagtttttgggcccccgcgtttgggcccccgtttttgggccctcgtttttgggccccagggtcgtttgggccccagggtcgtttgggccccaagtacagaaaaatgaaaaatcacagtaaaaacaactttttaaatttcagcataaaaatgtaaaataaacattttaaaaataaattcaacaataattttaacaataaaaaatgtaaaaattaacagaaattcacgggttgttcataaggtaatttggacaataaaacaaaaaatcacgggttcattcgatagttgcgagaaattccccggagaaactccaaaataatgtgaaattgattgggattttggtggtaattgtgatcatggtcgatgttgcctgcattcatcgggacgtaaagacgcaccaaattaagaattcgttcatctgtcgccaaaaactttcgcttttttggtggtggctcctctccggcaatgaatgacgcgtatttgtctgctcacgacgtagcacgtcaatgaagtgaaaaatcgacgggtgtcggcaattgaaggcgccctgtagacgatgatgctccgcctcggagtggttgttggtccgtgcatcggcattaagcgtgcgtgtgtagacgttccattgttcagggcgaaaagttggttgtgaccatgtgccattgggcctgggctgtccaacgtaattgattaatagcctgtaatttcagtggggtttaaatttttaaaaaaagttcacacaccagtcaatcagcggttggaaaaccgccaaatttccgaactccgtatcaagtgccgctaccgccattctaatgtcacacaagggcacgaacgcaacagacgtgatcattcgagcgttctcggcaaacacagaatcggtgcagtagcgctgaaacagctaattaaaaaaaaaattattaaaacctgccacaaattttgttccttcaatttcttttgcaaatttcgcacaaaatggaagaaacaaaaattgatttgacaccctccaaatacagttgtgaccgcattgctcacggccaattcgaaatcaattgtgaacgatgtaggagcaaatgttggccatgcctgatgtaggagctcaaacatacgaatgtatgacgcctgcgacttcgatgtgagcagaaaatggcacactggtatgatccatttgcctcgtctaaacattgcaaaaaaaaactaaaaaatttctaaaaactaactaacctagccaaaattgtataaatttgataaaaaagtggcggcg

SEQ ID NO: 17852 - DNA, 3192 bp, Heterodera glycines
aaaatgcatccaaaagggcggaagccatcggcccagcaattgttggcaccatccgctgttgggatggacgtcggaacgcattgacgaacggtgacaacattcgaccaaattcggacaattcgcaaattgacgtccgttccagtgaccaagtgtgtttcgcccgtcttcgtgctcaactgtcccgtttgtggagctgtgacatggtccgctgtctgtccgaccattttctttctcggggtccggcaaatgaaatgccatattatgtaaatgctctttgccattttcagtgcccatttcgacttcctcgctggaaactcggcaaaaaatggtccaaaagcattcgctttttttcacccgtcgtcacagttcagcagcgcaggaaaacgagcacaatgagagcggcactgggccaagcaacaatttgccactctttcaaagtgcgtttctgatcactgatcggattcggacaaacttgagagctactgtaacataattacggtacatcgatcaatttttaaagtgtttttgcgcaaattgcccacgcggccgagctgttcaaccctttccgctaccacttcatccgccgctgtggccgaaggcggcgacatcgttggccaacaacagcaacggcacaaacccacgcgtcactccaccaaaaacagccgcaccgccaatgtctgtgccgtcactgtcccactcgtgccgttccctcccatcacacccaccgttgtgctgtgccaactctaccgaagtgcactgctcgcctttccgtgttctgagagtgaaatactcgcaagtaaatgagcattgaaattgcatttggccaaaagtgcacggtttatggagtctccctaatgatttgtattgaatttatatagaataattcagcatgtgctttttccaggcctaggtcgtgatgacacgctcgtgctgaagcatttgtggcaatttctcaacgaacagccaacaccaccaccgctgccgcagcaaaagcggagagaggacggcaccgccatcgaagatgttcgtctgcgcacttacctcggctatttggtgtccgacccggaagtgttggcggcacaatttgcaccgctgcagctgttcatcgacatcactttcacgcttatctcgtaggaggggggcggggggcgaacggaggacgatcattcatcggcatattgcccgacatttttattgttttaattttagaattctcgacgagcgtgagatgtacgagtgcgaacgtccatttgggcgggaccagcttcgtcagatcgccaaatttgtcaaccttttctgtttccatgcgctttggaatgagctgatcggtgggtgccaaggcattcattccccgatttattaaaaaatgctgccatttttcacagattttgaaaaggatttgccttccaaactcttcaacagtgtgtaccgactgctccaaattctgttcaaccgcgactgtcgtcggccgttcaccggcgtgcccaacttttggacggttgacgagctgagccccaaggcgctcattgccgagtttgtcggcggcaccggcttcctcctccccccgctgtccgccgctgtgtcttcttctccagccacaaaacgtgcacacattttgatggacaaaatgccacacgttattccggtactgtatattcaaaaaaacaacattttcaaaacgaacagagaggacgaggcaaggaaaaggaaaagcccgacctttcatattatgccaatccatacaatatttacacaaaaacagctgcgcgaccgaattgtgcttttccgcaaattgatcagacaggacaaagaaagtgtggacacgtccaccaccattatcacggtcgaacggtctcgcctgatcgaagacggtgaacttatcggatatttttaaataaaaacacgaattctgatatggccattttggattttattttctcgtcaattacttactaattaaacatttaatttgatgcttttctcccccattaggctattcgcaattgggcaacctttctctggcagctatcaaagggactgtccgagtgaagttcatcaaccagcaagggctcgacgaagcgggcattgaccaggacggggtgttcaaggagtttttggagctgacgctgaaacgggtgttcgacccggacctgaacctgttcaaggtaacagataccagaattcgttgtcattccattcttgtgcacaatttggcctctagagcaccagtgacaagttgctttatccgtcctccacttcgaccatccacgacaaccatttggaattgttccaatttgttggccgaatgcttgccaaaggtattcggagagtttcgccttttcactaatttgcttttccaatgcaaatttagcggtttatgagggaatttgcgtggatgttcagctagcacctgttttgttggccgccgttctcggcaaacaattgcatccgttcgatgagttggccacgttcgaccccgtgctgtacaagaacctcacctttctgaagcactactccgactcggacgatgttgccgatttggagctgaccttttgtgcacaggacgaattccttgggcgggtgagagacaaatggaggagcgggggcgggccatttggccattaattagcactaattggacttggggttggacaagcgaatggtggttgcagaatgccttaaaaacgaattaaacagtgattttcttccaattaggtaacaaccgtggaactgatcagtggtgggcgtgacatcaaagttgacaacgagaacaagtgagtggagaaattgacggacgaaaaaaatgtcattttatgaaacaaaattggtatcactgatatttgtgtcttgaaaatttgatcccatgaccaatttcccttgctccagggtttcctacatccatctgatggcccaccatcgtgtcgtcaaacagatcagggaccagactaaacactttgtgctcggctttcgtgccatcatccaacccaaatggttggcactgttcaacacgcacgagttgcagcatttgatctccggcaaaatgaggtcaacaccagaagcaaatttgtgggaatgtgaaggaaaggaaattgttttatgatttttgctgttttttgtcggagaaaatcccaccgggttgtgaagggtatctcattgtcaacttgagaccatgtgacccctcactactgactt

SEQ ID NO: 17853 - DNA, 1418 bp, Heterodera glycines
agcactttcattgatgcacggcacaagggcaacatttcacgcttcatcaaccatagctgtgagccaaatttgtcactgcaaattgttcgtttgggtcgccaatgtccgtcgttggcgatgttcgcctccagagatatccaatcaggtggcataacccccccccccccccctcatccatttcttcttcattctcttagttatgtttgttcgagagagtggacatttttcgaacacagagagcgaaaatctcgagcaataatccactaattaatttggaataaaatcaatttgaactttctgctgattttgcagcaaaagcaaaacatcttaggccagatttgaccgggatttaattctcgacacctgctggattcaatccaaattttgcctgggttttgatcccgacattaatctcgggaccaacttgtcgggaaaccccgacatgatatggggctctagctacaaaaaatgcaaatttttaaagcattttcaattctttttcttcatcaaaaaggtgaggagctctcgtacagttacggcttcttggctggcactgacggttctttttccggaaaagcctgtttgtgcggtgcctcctcctgcatgggccgtcttccatcggccacatcaatttgaatgttcagcagcagcagctgccgcaggcagaatgaacaaacaacaattatcacatattgtctaatgtgtctctgtttctcatcaacgactggtttattggcaccggcattctcaaattttcgtaccattattattccgccgatttaatgaacccttcacccctcccctcaatcatattccaattgccatcttctgctctgttcaccaccgatcatcatccatcgcatcatcattttggcgtcagcccatctcatcagggaacaacagagaaagccacggagaaatggatcattccaattattgtatacatcattaaagccaatatgacgttttttgcctttgacggcgccaattatgcgtaaattggcttataaaatgtttgtcactattgtcaatttctctccttgaaacaaacgcacactccactccattcatagtttttctccatttggaattgctttcgatggaatttcggagggcaaaatatcctttttttttgctctttagccccctaacagaaagaaatggcaatttcagaatgtggcgaatttcttcgttgcctttggcatttatgtttcaaccagttctgctgttgttgtcttttcgtttagtggacagtgcctcgggtgccaatgccataacgccaataccgatggaattgttgaacccaagactgactgaattcagacggatcgattcatcgggcgatgatcagatcactttctccgaatttcttctcagtgatccgtgtgtttgtttatcttatctcactgtaaattcaa

SEQ ID NO: 17854 - DNA, 1951 bp, Heterodera glycines
tcagtaaataatacctatcatatgtcgaatttttcagctcgggtataactgaaatctccgaaaatttgggtgcctcaggctacggttatggttcagtacagaacaaaatgtatttcggaaattttgggtgcttctggtaacggtcctggtacggtacaaaacaaaatgattccatggatttttcggtctggaatttataattttgtttgactctggttacggttctggtacggtacaaagggcaaacatcggaaacagtgattttttattgttgacacagaacaaaaagtaaattattgcttaattagcgtgatttatcttctctgtttccaatactcctcctcgttgttccattccgacaattggtccgatcaaaatttacaaaaaaaaaagaaaaaccgatcattttcactcccatttccatatagacagtgactgtcggaccgattgtggaacgagaacaggagggggacgcacaaaacgggtcccatcgaatgcactatttcacggcaggagcgcgcaagtttgccgccataacccatgtaataaatatgcatggcccttttttcgaccgtttgtcctttttgatgccttgtccctttgactatatatacatttagatcttttgtcccattttttgcccctttttacccctcaatttgtctattttttgccattttcgaaatatgcctctcacagggcaccggtatgtttcctccgtcttcgccttcctcgtcgtcctctgccgaattggcatcgccacttgcccatgactttgatcatcatcatttccacaataattttccattccatgcacaatttttgttgcctgcttctgccaccattctgggctcacctcaactatctccggtagacaattaattaataattattatttaattttagaattaattaagtaaatattgacgacgcccaactcgttctgcctcgactcgtactgtttcttttaagaaaaaaaatcaattttttaaatctaggtgctttaacatggtatcatccgatttgtatgcatactaattcgaattgatttcaaaaaagctatgtccaaaaattatattttttaaaaaaatccgcgccaatatttttttgaaacatgatcaattttttgaaaattttctgtggtaatagagaaccttaagtgctaaagaatgataccatgaatgttagagtttggtcgatattgataaaagttagacaaatttatttttgtcggaaaaagagaacagtactagtcgaggcaatggagttgggccaagtgcgagttgggtttcttaacctaaattataatttgcaaagcaaaaatttcgatgaaatttaattgtaaaatgttaaaatattaattaaatgtaaaattagcgcggcagagcgccgattgaacaacaacaagtgacttcaattcctcaacaaggcaatattcaacgagaacaaatattgaaaaatgatatggcagcacaaaattgaagaaaacccaacattttattcaattttaaaaaattttggacacatttataaaagttttctcgtttaggatgtccactaatattcaaaatcacatctttgtgaacccaaaatggaataaggaatttgtgtttacactgtaaaaaaataaataataaaaaatttgagtgctcatcgcctccactcactattaaccattattatcacatcccttttgtcaattacaataattattgataaaatgatggaggcattggtcgacaaaatgatggatggatgggtgtcttaaaacgtacaaaaaaattgaaacattgaccaaactgtaccacttgctgggcggagtggagaaaccccactccccctcccttgcccctcccccccccgtaatcgcccctgtgccttttcctcatttaattttgccgagccgcgaaattatttatttgttgtcgtcgatttgatcaagcgacttgcc

SEQ ID NO: 17855 - DNA, 2140 bp, Heterodera glycines
aagtgaaaaaacagtgattctaagaaatttctaatgctttaacttggttattagtaaaccaaataaaaccattttggtctcattttgaagggaaaattctgaagaacatgtctatcgttttttacatgttaatatcatttttaacctttaaaatgacggtaatttagtagaatgtttgcccttgttaaaaattttttcctactgtcagatttttttgaaattttgcataggccaatattttgagccctctagcgattctttgtttattttatggaacaagtttttaactcgagatcggctcttccgtttttacaacggaaattctccaaaattttttaaattagcgtggtttatggcgttttgtctgtgcgcactttatgtcaaattgataatatgtatatgaataagaaaatttttataataatttcttctaattgagggctgatgagtatgtctgggaaattaaaaattgaaaaaccccgaccccgactcttccaaccccgacaaccccgaattttccaaccccgacgtcggggttgcaaccctattaaataggtacaaaaatcccgaaataggtagaaaaataggtaataaaaattttattaacgattttttaatgggaaaaaagcaaacaaagagggaaaattttgttctacttcttagtaaacgaataatgcaaatatttttaatattttcttagaaaatatttaaattacaaattttgtcaagaaaaaaatatataaattttggggataaattctttaaaaaatttccaattcttaggggtgtcttttttgatattattgctttttgctaatggattttctaaaaactcttaaataggtagcaaaatgccaaataggtataaataggtacctaggtaatatgtagaaaaactcccaaattaggtgagaataggcattataaaggtcatcgtagacaccccaaacaaagtggaaaatgcttttttcttgcttatctgtgcgtataagtgcgcaaaagttttaggtatttacctaaatttcccagccctgctgatgagagtagcagatttatttgcatttaaatgaataatttatttatcacttagcattgtttttcatgatcaaaaaaatttcaattaataaaaattttatgagaatttaattattgggttgatgaaaaagttctgaccctctgaaaaaacaaattatgcaaaaaatgatatttaattctaaagagattgaaaaagggaggcaggcaattgggatgaatcagcggacggttggccatcttcatgaccaaattcgtcgtcctccattttctgcaaaattccgcggcggcgtgctccttctccatgacaatgcacgcccacatgttgcgttctcaacgcaacaaaaaattgagaaacttcgatgggcggttcttcctcatccaccatacagcccagacatcagcccgtgtgactactatctgtttcgatctatggagcacttcttgagagggaaagaatttgctgatcaaaacgaggtcgaaaatgcattggatgacttttttggatcgaaaaatgatcagttttataaaaaggggattgaaatgttgcccgaacgatgggggaggatcattgatcaaaaaggtgagtacatcattgattgaacatttgtttttttgtgaaataaaaaattgtttaatgttgaagtgcttaaagggtcagaactttttcatcaacccaataaatatcattttaaaattgtgggcggacggaatttgaagataacgacgtaaaacaaatgtatgtatttacttctgatagcacataaaaacatatgtttaataggtatgcatattgggaattcatttaattacatacgataaaaaattctcaaaggaaggatctaaatttttatatgtttattcatttttaaatattaaataaatttttgaaaatttcttcaaaacgtcccaaaactgttggccattccgatattggcacagttccctctgatgcagcgttggcatccctcgatactgtacacacacttttgctcacaactgtatttgacacagtctttgcagcgggcaacaagcgaatggcctccataaggcatgaaaaggtcgaaaaaggcctgtaattatagactattttcacataaaattagca

SEQ ID NO: 17856 - DNA, 3021 bp, Heterodera glycines
  unsure (1)..(3021): unsure at all n locations
gatgggtgcttctttagatttgtgtgtctgcggtagggtcgaaacacgctttattttcttagttttttgttttctttatggaagagcaccgaacatgaggaggaccactcttccattaaaaatgtgtataacaaaaaaaattgttttcatttaattatttctcaggaattgaccgcaaaagaggcgaccgcaaatgtccgtccgcaaatgtccgtccgacaatgtcccgtccgcaaatgtccgtccgcaaatgtccgtccgcaaatgtccgtaaggcgtttgaatatgctttccatagaatgctttcacaactatttcacaatccgatggatgatttagacgatcacggagctcattaattcgacaattcaaaatttgtgcaattttttcagcaagaaggaccatttttctaattaatctagatttatattaattaattttatagaggaaatttgcaaaattattttgtaaaagatgattaatgaaaaaaaaagaaattcaactgctatttataatagttaagaatataggttaagtaaacattaacaagtataaaaacagattttcattcatttttagtcactttaatattaatataaataaaattgcattttttcatttctgattttcaaacaatttattaataatgtccgtcccatcaaaaaacaaacaatttccaaaaaatatcgatgacggtattttatttttatttattactcataacacaaaattttgcataacttaagatgacgatgacgtggataccgatccgtcacccgaggaagttgagaaatggactcccgagcaagtgatagagtgggagaagcgaatctttgggaaaatgcctccggaagaggagctttggcagcaaattattgacagcggagacaaaaatgtaagattttaatttaaccataattattatttaatcaaaaaaaactcaaggtcctaattgaattcttcggtgagaaggatgcgccggttattcgaaagagcttaaatgtttatgccgaaaggaaagagcgcagagatgagatattgaagcgaaaactcatcgaatacgaagaagcactcacgaataagacaaaaaattaatttaacagtttcacttgtcgatttggcacacaaatttttgttaaaataaccattaataaaggtttgaaaataaactccgttcgaattaggttaagcaaacattaaatggtataaaaaactcaaaattagatataaaaatcattttctttcatttaatcaaaaaataaaataattttatctttgaaatgtttgacaacgaaaatggaggatccggcgaacctcaacaaataaacgaaaatattcctgctaaaacttcttataatgtccaaccctggaaacttttccgtccgaaatacatgctcacttaccgcatgtgtgaatgtaaacaatataatagaaattattatttattaattattattattattcagtatgtctttcatcattgtggaacaacacaaacaaatatattgctaacgaacgtcgatcattaatcagttttgaactttgtgaaaaatgtacaattgacaattgtcgtgctaccgaaatacttgccccattcaagccaaagaaataagcccaagatgaatttttattatttcatcaccgataattatttaaacattcgtttgaatccaaacccatctccccatctattccttcctcataaaattgttctatttactcgacgatggcaaataaaaaatgcacaaatctaagaagcaatttgaccttttttgaccttcttatttgaattcacgagttccatgagcaaaataatatttgcattagacacagggttggggttaattgcgggatgataaaagagattgcggatcaacagttcaggcactgtgttcctctattggtcgcctttgaaatttgagaaactttttagataatgtgccagctgatcaaaatgcgcagggaggaaatgcttcgggtgatggaaatggtaaataattttaaaataactcaatttcagtcttcaaaatttcagtcccctcgtttggggcaacgattgaaacgcacatggagagatctcgtcgacgtttgctgcatgatgagatggttcagcgcagtgtccagcagcattttcagcatcaacaacaacaaatcatgttccaagcacaacaacaggaacaacgccgagttgagatgcagcggcagtttgatgaagccgaacacttgcaagaagaaattcaggctgcggatgagagacaaaacgcccaacagaatgaccaagagcaggaacaagaggaggaaaatgtacagcatgctgtgcagcagcagcaatttgagagaactgtacgactccagttgcgcgagtcgcagcgcttttacggcggttcgccttcgtcagtgttagtgccaccggttcaattattttgggagactgaatgtgtaatatgcaccacttcaaggccccatttctatagcaaggagtgcgggcatatttatttgtgcagtgagtgtgctgtcactgcggtgatcaacaaggttcgacgctgcatgttatgccgcgctagtgttagtggcatttatccttttgtccgttgagtacctttatggaagtaagaaaatgttaacatttcacattttcagcttaaatttgtcttacttccataaaaaggtgttatttgaaagttggaaaataataaaaaaatgaattttaggatatacaaaatttcaaattttgtcctctattttttttacaattatttctcaaatgattctaattttggtaatattcgagctttcaaataatagaagtgtttgattgtatgcgcggcattgagtattggaactaaaatcatgatgaattcgttttcttgaataaccgcattaatccttttctgtttgttcgtcacttttttttcaatgatttaactgatgtatgtctttaataattcattatactctcaactcatctcatatgataatcaacganacagttcgacaatttttccgtgctttttgttaatg

SEQ ID NO: 17857 - DNA, 1272 bp, Heterodera glycines
  unsure (1)..(1272): unsure at all n locations
agtcctttatgcaaccattcatgcattgcgagatctccttcgtgaaaattttttgtttatggatgagttgttgggtatggatgggttgagttttgagttttacccatttttcatttccagataaaacgcactcatttttttaattgaaacaatatgaaaaacaacaatcattacggcacagtttctccaccgtcggcatgtgttcctcccaccgcaccaccgatggaaccgccggtcagacaacacaaccaaccaattgtttaagacttttattttcgctgatttcgaaacttaaacatgcttttgcgtgctttttctgtccaatttcggggtgtttaaaaaaatgccagaaaaacaaagctttcctccttgcctcaatttaacattttgggcgatgggtggacgaaaatcgggcatatcccggcttgccggtaagccgcatttcgggcaccgagtggggtgggggtgaatgatctaaatcctcccaaattcgaaaatgtttggccctccctctgcctgcctcaattgctttttgcatttcatcacattgcattttcagcgtgagacggttgcccatgtgcagggcgccacggatgcccaaccacagcagcagagccaagcgcagcaacatcctccaccgccgccatacaatgtttatttttgcaattttggggtggatggctttcacaatttggggtaatttcggttttgattctacgcctctaagttttcaaaaattctacataagttgagtggaagtaacttcccgcgaggactgcaaaatatgaaatttgaactcatttgatgaaattttgatgcaaattgtggcatttgtgctccttaaaatggcggcggtgtgcgctaaattgcttcccacgcgactttagttgacttatttgaaatttagagttataggaccaaaaccgataagtacccaattcctgaacaccggactcgaattagaaaagaacgagtttgtaaatggtcaaaaaatnttgggttctagtcggttttacgcgtcccatgacactttacgcgtcccatggcattttatgcgtcccatgacatttgtgtccatggcagggatttcattccgaggctcaaatttttaactaaaacttcgttgttaaacataaagtataataacaactcatacacaggcaactcgaacaatggcttacactaagcctaagcttttggcttaaagctagacttacgctgttttttaaattcttttatattaggacctttcggttgaggtcattaataaaa

SEQ ID NO: 17858 - DNA, 2607 bp, Heterodera glycines
gcgcacatgccgtccttgggcaacaacggcgcccccatttatgtgatgcgtaagcgactttatttttgcaaatttgataatacccaccaaaaaaatgtggggaagcgtttgagggggggggggggagaagcaaatttccactgcatctaaaattacgacagggtcgaacctgggttcgatggtaccctaaacgtcgccgggaaaaaccttggcaagttacactcctatccctcctcccccacccccgaaaccaaccagaaaaaaatttctattagaccggaaaaggtttttggaggtaaccccttggattttttcccgctggctacgcgaccttttggcacaataccaaaaaatgccgaattgcttttcattctttgcgcaacgcatgcatgatgatgccccactttacagctgccgctccaatgccgacaattgtcagcaccaccaccgtcatgcccgctgaggtgcgccagcaggcgccggtgcgcaccaatccgtgcgcccattgtacggtgcgttcttttcttgtttactataatttggaacattgcacctcccccacatctgaggaatttactaaatgtgaattttttttaaataaaaatatgaatttgccctaacaaaattcgcaaaaactgcaaattttccgctggtaccaccggccaaagcacatctatctcttctcctcctttaacattgtgttcatttttcttttgctttcagcatggcgtcgtccgatccgagacggattattgctgtgagttttggaaagtatcgctaaagttttaccggtggcacaaatagaaaatgggtaccaccggtgaccggtcacgggagcaggcactcaaatacacccacgaaatttttttttaaaccaaaaaggttttcttaattttttgggaattttttcattgtgtttgtggcgagtcgccgccgaaaattaaaaaaagaatttttcaaacaaattaaaaaattgaaaattttaagcgcttttttgaaattttatgataaaatactgtttttttcgaataatttatgtgtttgaaaaattttctttttaaatttctgcggcgatattttggggcgcacccgtttgtggcatatttgttaaattttctagaattcattttcaattccatgctttttcagttttaaaaatgcaaaagtttgcgacagagcgtacaaattttatttaaaattttccggcatttgatcggtcggtcatctttgtccattgattttttccatttttcctcacaggcctctgctgtctgctcatcttctccgtcatttcgttcccgttcggccttgttctgctcctcttcatcccgctggcgttccgtcgtcgttgctccgcgtgccgtcacctgtacacctaagaaatgccgctgggccttcagaacaccgaccgactgcttactgatggattggatattttaatgttttgtttggtcatcatcacccaaaaagcgagttttttcccccaaaaaattccttgctggacgataaatattgccgagaattgatcatttttgttctgactgattgattgatcgtattttgtgtatgttttgcgtttgctctctctcctttctctctctctctctctctctctttgtttttgttgtgttcccttgctcattgtccaatcatcatcatcaaattatcagagttatatcatcataaatctgtttaaacataatcgcaattgtgtaatgcccttttctctgcctaaattttatttcacttaaacatgcgctgttttttaaatacggcaatgggttatggcttgggagtgccacggcgcgagaattttttgttttgttttaagttttcttttgaattgaggcaaaaacaaaattaaaagttgtactggtaaaaatgagcaattttttgatttttaatttgaatattgtaaaaacaaaatttgaggactgtgcctactctatttccgttatccaaattcctttttcgataaatccccaggctttaaatataaataagtaacataactactttttgcttttatttcaacgcaaataaatggtggaaatttttgaaatttaatttttttttttttggtttttccaattttttaccggagagagcctaacaaaagccaccaaatttccaccatttcctttcttttcacaatacagcaattataaatacctatttgcttctggtttttaaacaggttgcaaattctttataaatgtttgaaaattggctgcattgcgtcggctccgtcgcaacaacataaaatttacagaaaattttttatttttggcgaattctcttatttatctcatcattctttgactgtaaaactacagcttgacacagggtagagagaacagtgatcgaaatccaaaataaccgaaattttaaactttgaaaaccgaacccaaaattcgccccaatcccggttggatctattcacaatattttaatgtcccattcaaaaattgcttcggcagacttaaaaatttaaatctatacatatttcttgaataaaataaacatttgggcgctatatgctggggtttttggggtccccgatcacgaatctttcattattttgatcaattccgatttccctatcta

SEQ ID NO: 17859 - DNA, 1808 bp, Heterodera glycines
tcttcttccgtcgatggatatatcggcttcaccacagtgtggggctgcagcttaaccaaagaatcatttatgaacaatccaatttggtcaaaaacttccaaatgtaattattttattggggaaaaaaatgacgacatgtccaacaataaagaagaagcggtcattaacaatgcgagtaataataaattaattgtttatttaattagcactattaatttttcaaaagacctgacaaaccattggtgcaaaggtggctttttgtgggagagaagcaatggaggcaaaacagaagataccgtagccatttgcaagccaaatgagcactactgttatgtggcgaactgttcagtggcaatggctggtaagtaaaaatacttttttactttatagacttttggtgatttttggtgcatgtgctaataaaagtgccaaaataagggttcaaatcctgtaaaatcccgaaaataaatgcaatttaggtaagcatattccaaacatgctcttcttatattttttttttactcgtcgcccaataaactgctgtataacaaaataagtcgggaccggcagtgccaaaaaaggcgctgccggaaaaaattttgaaaatttcggtttttttaataagatttacaaatttttgggccaggcaatgccggaaggcagcgccaggtgaattttaaaattcagctctattttcgaacgggttttaacaacaaaaatttttgaatttccgataatttttgttattcttcgatatttggtcaaaaatattttgaaagatattaaattttcatgatttcgtcaaagaaaattgaattttttaatttcaacgaaaagaaaattttaaaaaaaaaatttgggttaatttgttaacatattatgccaaggatgatcgtttttatgggcatttttgtttaacattactttatttaataaaaatttggcaaaatgtttaaaaaattcaaattttttataaattttttttgccttttctccaacgaaaatgccattcttaggagtgtatatttaacccggccccaagtttgagttaaaatcggggtcggggtttgtcggggtcggaagcgtcggggtcgggattaacccgaaaaatggccaaaaaagttggagttcggggttggggaggggtcggggcccaacttatgactcgaaaattcttttttcacctaggttaaaacaaattgtcaaaaaaattataattttccagcaattattttctgtttctttgttggcaatgcgtcccggacattgacacaaaatcggaaatctgaacaccccagcgaaaatcagacaatttcgccctcaagaaaacaatcaactaaatttcaaaaaaaaaatttattgtaatacctatgaagtgagaactcactggagttcaaattttttacaaagtggggatgtacgacaaaaattctgatgaatttcatttttggtgcatgtactaataaaaagtgcaaaatgccaaaataggtttcttaatcctgtaaaatcccgaaaataaattttcaaaatgccaaaataggtttcttaatcctgtaaaatcccgaaaataaatttgcaaaatgccaaaataggtttcttaatcctataaaatcacgaaaataaatttgcaaaatgccaaaataggtttctacataatatttagggagtaagcaatcattggagttcaaatttttgacaaaatggggatgtacggacaaaaaactgaatgaatttcgcatggacaatccccgacaatttgtcgacgaaaggaaagcaaacaaatcatcaacaaacaatgttatcacaat

SEQ ID NO: 17860 - DNA, 1468 bp, Heterodera glycines
attcggaaatttgtcggctaagtcaaacaaaaagtgcttgaaaagactaacagagacttaaacatcacaataatgggctttaactggtcaaactccgttttccatttccaatttcagtggcagtgagtgttacgccacggccgcgagttttcccaatcccttcaccacgtgttttgttgcattattgttattattttgacattttataataaaaatgataagaaatgatgagaacacgaatttggggaacgaatgaaacaacgcaaataaacaaagaaagcagcgatcaaactcaagaatcatttaaaccagcaacattttaataaatttaataatttttgtttttaaattattctaattttctctttgggaatcgcgttttgtttgggagcatccttcaaaataaattggaaggaagctaatgataagcataacggtcaattcgctgcttagagttcgcttcggcaactttttgacgccgggaaaaggccaaccagcgaatactttgggaggagagcagcggacggattattcgccatggcaatgcgattagccgtgcctttcttctccacttcgccctttttcactcttttttattgcggcagataattatttgttttaagagaacaaaattgaaccaatttgcaataatgttaacatccattggaaagagaacaaaaggattttttttctgcatttaatgcgttttcggtttggcaatttgctaccgtatatcacaattattttccgctaccgtattaaaattcaaattgcgacagatcggccctttgttctgttagttgttcagctgctggtgtttttgtgccaaccaatggtgcgtactcttcagacagttcagcactccctgaacaatgaatgccgttcgtttgttgtgcttttgtccgtccctcccccctatttttaaatcaaaatcctaataaaaatttcgttgaatttcttcgcctcttatttatgcaaaattttcgaaaaagtaatcctcctatttaaaattaaaatattcagaagcaaattcaagatttttttttatttttaaatgcattttttaccacatgaattatgattaaatttttgcgtttcgaattcattttggaattaagaaaaataaaaattgataatcatttgatcatttttagcgcactttaagcaccgccgttaggcagcgcagttccaaaatttattccatgccacagatattatgggcaggacacgccaagtacctcaaacttgggtaattaaaccgaagaaagaagtgcagtggggaagaatgacgcccaaaatgaaagaaatattcgatgctgtgcgaactctttgtgacccctctctgactctgccaatgcagcagttgaccatttttaccactatttttctctcactcatcgtctgctcgtctctcctttattataagctatttttccaaagccaacaacgcccttttctcccctctttt

SEQ ID NO: 17861 - DNA, 2120 bp, Heterodera glycines
gtccttttcccgacttactctgtcccctcggatttcatcccccccccctcccttttcgtcgtccttttcccgacttactctgtcccctcggatttcatccccccccctcccttttcgtcgtccttttcccgacttactctgtcccctcggatttcatcccccccccctcccttttcgtcgtccttttcccgacttactctgtcccctcggatttcgtctccgtgtccccaatggcaaaccttcataatatttaacaagagtaaaactactcaaatggacatataaccatttcaatgcgcttctgttttttattgtggctgagagtcggagaaaaaagcgcacttcgacacgccaattggcatgagagactgactttgtccatctcgcaacagacgcggcctgcccgcgagttcagctcggtcaaattagtcctcgtcagaatgactgaaaaggtggtgaaatacggcaaaggaaaagcacgacaaaacccttactgaaatccaagcactttaacaggtcgaaatagtcagtggaattgcagcggggcacctgaattctctgaagaagtgccctctccactcgatgaacacaatctgtgggcacggcacattcagtcaacgctaaaagtgcaggaagacaaaatgaaaacaaaatgggcaaaatggaggcaaaaaaaaaagtgaaaatcgaaacgtaaaatagaaacaaagaaaagtgcaaagtttccgcctaattagagaaggcaattttcaaaaagaattcatcgaagcacgcacaattctcttcagtttctattcgaactgacctttgcgaacgatgaaataaaagtgatcacttcgaattttttgctgtctctgagggctttcgtcacaattggcgcaaagggaaaagaacaaaaacaaaaggcaacttctgatcagtacaaaagaaggacaatgagccgattgggaagggggggaggggaaggcattgccgaacagaaaaaggagaagcatcacttaatttgggatcagtgaacagcgaatggacgcaaaagccgacacgaaaatcaaagccaacggacgccatcccccgggggaaattggaaaaaaaacaaattgttcatccatttacgagcagcgaatgagcgaagacagcagaataatttggctataaatggaaaaataagggaagggagagagaatgcaaattgagaaatggaggaggaaaaagccattgcaaatttatgtttaagccaaaaagcattgacgaaggaagaagggtaaaaagagaagaatttggttactaaaatggaaaaaattttatcggaaatcaaaaacagaaatttttttttaaaagttgggaattggcaagcaaaaggcaaagtcagctcagtgtctgcagtccctttcctccaggggaaattgcagctccatgttcacgatgccaacttcgaaccaatcggacaaagtgccattgttgtaataggaagaaggaaggcgccacaaagtgcgcctctgacagggcttatgttcgtccatacagtcgtggtaaattttgaggactgccttaatgtcgcgaagagaaattacgcaggtgcttttgctttctctctccatccctttatatcctcttcccactcttccctcatctttccctcttcttcctttttcctctttctctcatcttttactctttccttttttcatttttctctcctcctctttcctctttccccatcttttactctttcctctttccactcttattcctttttcctcttcccactcttccctcatctttccctcttcttcctttttcctctttctctcatcttttgctctttcctcttccctcattttttcctcttcttcctttttcctctttctctcattttttcctctttccctcatcttttactctttcctcctcctcttttttcatctttctctcttctcctctttgcctcatcttctcctctttccactcttcttcctttttcctctttctctcatcttttactctttcctcctcctttctttttcctctttctctcttctttttccactttccttcccttcttttccctcttcttccttttcttttctttcttctcccacttaccctcatgtctcccgctt

SEQ ID NO: 17862 - DNA, 2495 bp, Heterodera glycines
cgaagcgggtcagttccgtctggccagttccgtcttattacaaaagggccggttccgtctcaaatatttttggacacaaattttttaaatttcagaatgtgaatagaagttgagaaataattaatagggctaatatttttaaatgctaaaaactgccaagatagttaggttttagggatacttgtgcagcagggatgggccaaattgaaaaataaaaagcgaaatccgaaaagcgaaatttgcgaaatgaaaaaaaaagcgaaatgcgaaaagccaaaatatgcgaaaatgcgaaaagcgaaattttttctacaactttttaatagttaaaatcataaagcaaaaatcattttttaaaattttattccaaatttaaaaatcaataaaacgcttttttgaggcgcgctttttccaaaaaaactttttgggaagagggggcaggcgccgccgggaaaatttttgaaaatttgattaaaatttgttgacagattttcaccaaaaaatcatcaaattttgtgatttttgtatcatttttctaatgagaaataagagttttggcgcgccgctgagaacagtttttcagcaaattaccaaattttgcgattttgggccattttctaagaaaaaataggagttttgggggcgcggcggtgccgataggcgccgccggggaaaaaaattggaaattttgatcacttataaacagtttttcactgaaaattagccaatttataggtaaaattttgaaaaattttatgggaatttaatccaattcttaggggtgtaaaagtcgcttttcgcgccaaaaagcgaaatgcgaaacgccaaaaaatgcgaataatgcgaaaggcgaaatgcgaaaagcgaaacctcggcccatccctggactgaaccgtccattgccgtaaaacgcataaaatgcaacaaaatagatatcaatcgcttcctctcggcatgtaaaggatgaatccgaaagaatttttaatccaaaaggaaattgacaaaagttatgggtcctcaaaactcagagatcgggccggtcggttttttttcgggttttttcggtatttttcggtttcggtttttaaccgaaaaaaccgaccgagaaatttttgagtttttcggtttttttcggtttcggtttttttcggtttttataccgaaaccgaccgaccgaaatatcaaaaaaccgaaaaaaccgaccgacttttttcaaaaaccgaaaaaaccgaatcaaattggagcgatataacctgttaataataataaatttattgcttttttgtgctctttttcattttgaagaattttttgtaaaatgttttctgctattttgaaaaaaattattaacaaaaatgcaataaaaacgaaaaatacaccccttagaaatggaaaatttttatcaaaaattcatattcaaaattgatttatttatttacttgactacatttttgatttttaaaatatttatctcatttccatttttagcacctattttgggggtttataatagggttgctccccgaccccgagcccctacctccgactttttatcccccgaccccccgacactaactcggggaattggggactcttgaaaatttttaaatttgtacaattttcttaataaagttaattaaaaattcctaaaattccgaaaaactttcggcggcgcctatcggaaccgccggcctcccaaaactccaaaatttttttgccccccccccaggggtcggggagaaaccctagtttttaagaatgttgaagatgtgaaataagttttgagctagtgaatttgtatcatatttggtttatgcattaattaatcggttagccgacttttgcgccgcgccatttgattttaatggttaaaaaattgaatgtcaatctttttgactagtaattttttcgaattttcaattagttatttttgtcgatggcttatagttttagtaaaagttattgataatagtggaatttttatgaatataatatttttgacagcgcggcgcaaaagtcaatttttgctgggcggcgcaaatgtcgcggcgcaaatggagcggcgcaaatatccgcggcgcaactgtctgcggcgcaaatggcgcggcgcaagtatcgactttgctgagcggcgcaagtgtccacttttgctgtgcggcgcaaatggcgcggcgcaaatgtctcatcacgctaaacattttttgacctcaccaataattcctttgctggctctggatagactcattttgttttctgaaagatatgaattaataaattaatttagtttcttcttttacagcttaagtccccatattttctttttcacctttccaaataacaccgccaaattactaagctttcgggatcatttatcaagatccggcaagcaacggttttcccaccccatttcgacatcggccccaaattccacccacatccacaacatttgggctgaacattcctccaaccccccagaaaaaatggcgccactgata

SEQ ID NO: 17863 - DNA, 1353 bp, Heterodera glycines
ttattattattacagtcatttttcgccaaatgttctgccagcaaaccatcatacacgaaaattccttcgttgcagtgatccaaatcccagttcgtcgtcaattggaaaacgtccacgcaccgggttcaatccgacacttgtgtggtgctcttcaatgtcaattgcatgtgcacgattggcagtttgcgaaacacggcgaaaacgctcatacgccgaggcagagtgcgaacgaacttaaataaggaatcatcatcattacagataataataataaaaaatttttttgtaccacgtgtgaccatcagagcagacaaaaaacaaaaacaaaagaacgcaatgacaatgagtccaatcaaaatcagcatattaaaaaacaaaataattataatccgaataaaacaatttaaattaacagcacaaataaaaaatgtattagaatatatatttttttttgcttttgattacgctcggaaaagcccgacggggattaaattaatggcgaaaaaatatatcataatatttttttgttttttgattacgatcggaaaagtccgaggcattaaattatttgcgatgggaaaaacagttagcgcttgaaagctttttcgatctttgtcctttggcggcggcggaagggggggggggtattttgtgggtaacggtaaaaacaagtcgaatttgactgcactattaaactttttgtcaaaaagcgaggggataaacaacatttaagggaatgccagacttaaagaaaaaaaaattttaattggtggctataaagtgccacttttcgctgtcttccatccattgctttaccattgttccgcctggtgacactcgcatgaccaatcggttccaacggcgtctaactgttaacgatcaattggaaactgagcggaaacggcgtcggctgagtgttgttggtgtgccggtggagaacgaagcgctagaattgacattcatctgaagcggaggccttttattatttaaatggtcaattaacagaatttggcatttttcgacaaaagtgccatttgcattaattaataacattttcattttgtttattatcagacatttcgctgttttcacctctaatgctatcatcagcaacaaatcatcaaattcaatgcacaaaagtgttttcttcgccttttcctttttccaaattcgacgaatgaaagtccaatgccaacacattcaatccatcggcaaattgaatattttcgtcctctccacgacagagggacaacggacggcgggggagagaatggaccaaattgccgggcaaagggaggaaggacaaacgattgaaagtgcgagaagagagcactaaacgtagaggacggaagc

SEQ ID NO: 17864 - DNA, 1632 bp, Heterodera glycines
tgaactaatcagttaacaagcagaaatatgcaaaggaactctcaccctgctcccaattggcgggctcaacttgctgactttcgcattggcaaatgaatgaatcgcttccttcaggcacacaaatgcctttttccacatgccttccgggcattttcttcatggcaaacattcgtccatttttcacgtacttccaatgaacgggcacttggattaagtggttgtgttgatctgatcagaagagagtaattcattgtaattaataccaagcacctccgtcatgaattgttctaatctctcctccaaaatggtcaagtcttggctaattatttccattccatcggtggcaatcctcgctgacagccaacgaatgaaaagtccgaccagcagaatgaagaaggtcaggaaaagcggagagatcaccgaaaatgacgaaggaaagaaatgaaaagagggcggactgaaacggggtacggtagagaaacagttagggaagagacagcaacatactgtaggagcaaacttgcttaaggtgactcgtttggcacattcgttcccatcttcgtcctcgatttgacactttgccaatgccaatggcacccgtcccttcgtccaaatcagttccaaatgccaccattctttggcattttgagagggtaaaggcatgaaatgcaaataacagaacacaccgagcacatccgaaacgccgaattgctccgggtccggcattctataacaaaattttaagcgaaaagtaaaaaaatagaaaacaggaaacaggaaacctaattcccaactgttccggcggtacgctgaaaaagtgggcgaagcaagcccgacttttttgatatattccatggtgaattctaaataacaaaatgtgtctaggcaagaaaatgccaaagcttgggtagaaacaaccaggctaaaaacttttgaggaattctccgagattttccaacccggccattttttggactaattttggggcagttgcattaaatcaaaccatttctgattgatcattacaaatcctattatttgagcatttttggaaaatccaccctgtcgatgggtttgtttctacctcgtaaaaacccaaaaaaaaaacaaacggtaccagtgacgggcaatgtcagcacagtgtccggctgctcatagaccaggtcgtcgagtatttcctcaattgggtaggccaattttcatagcctttccgctttgttgacaaatgcgtcgggttcgtcaagctgactcagatcagcaatcttaagggaatgcaaaagttggagaatggaaatcataatccgtttggaccttgttttttcgacttcttttcgggtagcgaattcaggctccaaaatattcggattcgcccctccatatttttacgggggtttattaattaattgctttaattaccattggacaccacttgttctccgcgttttgtggtgaattctgtccgttcccgcgcttccattcgcttcccaacggccctccaaaaatttgcgctttttttgttgttgttgcgctttccaaaaattatttggttaatatgtatttaccctgaaaaataaataaataaatgactatagaaggattaaaaaaacaaaaaacaaaattataatacataaa

SEQ ID NO: 17865 - DNA, 1745 bp, Heterodera glycines
atttgacaattttgaacaaaaatggtcttacatttatgatggaactcaaaaacaacaagctgaccgggtgcgcaaaggtgagatgagaatttgggagagggacaaaaatttagccaaatttttgaaatttgtgaaaatatggggacagaagggaaaatttaacaaaaatcttgaaatttaatgaaaatatgggcatgaaaattagccaaattttttgaaatttgtgaaaaatatgggcacacacccatatacggtaaccacttcaaacgtgcacaggcattacggtagtagtacagtagaaaaacggaaaatttagtaaattaatgctcagaagggggtttaagtttattaattagacaatttttattttttatttttaagatataaaacatcttttctgtttacatagaaatttctatacaaaaaaatatatggcagttctaaagagcaaaaaagcgggattttacaaaaagaaatttttttaaatttttgcataactttttttttgttgtcctataaaatgatttgaaaatatgcattgaaataaaaaaaagatgcccgaagaacaatttatatgtttataaaaaaaacagttccaccaaaaataacgtatgaccctacgtactgtaccttacagaatcgggtttaaaaattagggtgtggaaaaattgaaatttccatgaaaatccatggcatattttaaacacacaaattccacgtttagttggaggccatcctgctgcatttgagggtcgcccagcacaaaattggctgcttcagcataccgatttgagaggagctttgtttattacaaaaaaacagtacaaaaaagaataccgtatgccacccagctgataatacagtatggaatccaaaatacaaatagcactcttaacgtattgattcttctgtgatctttttaagcccccatcaattcgacatatgacgtcattgtacaaattcctcccccctctaattaattgttcaattattctaccatcttatgcagagcagtgctcgtaagtgtgctcattttttgagtgtgaaaaagccaaaagtgctgatttttgaggtttcgacataattttttgcaacaaatctcattacaaaaattttctttttttgcggcaatgccaatgggcgccaccgaatgccatagccaaaaatcccaaatttggctagagttgaagaaaatctattatttaatttcaattaattttttaaaaaaattcccaggcggcgcctataggcggcgacgcctccttttttccttaaattttttgttttactagcacgccaaaaaaggggcatgaaaagaaaaataaattagccaattattttttaagcaattttaaaattaaaaaaaaacacagaattttgtcttattaaattccaaatccgtttgttctgggttttgaaaaatttacttatgagctttgctctttttctcattgtatgccatcaaaatttacattttcatttttttctcatttgtgtgctgctcaatattcccgaaataaagagagaaagagttgatgtcaagaccaattgagagattcgaagcccacgtttggtcgagagaaagaaaaatggcgaagaataaaaaaaacatgctcataccttttaccgtattccctgaaataaagcccccggggcgctttatttttcatcccccccccctcaaaaggggagggggggggctttatttgagggggagggacactaattcaggggatcgtatgata

SEQ ID NO: 17866 - DNA, 1051 bp, Heterodera glycines
aaaaattggtccccactttttcgcggcatttttcttttgcattttggcacttttttccaattttttgctcaaattctccccgaaaatgtgtaatttccgcattttctccccgattattaattgcataatccattagttccgcctcattaagcaactcaataaaatagccttcgtcggcattttcgccttttttacccaggcgtttccaaatggcattcagctttttgatggccttaattaggcttataaataatccccctccatttacaaatgatggtttcaatgctggcactgtttgtttggacacttccgagcatttggcttaataaatttaaaattttaagcaattaaaaaataattaatggaaaatagccatgtttaatacaattttttttataagaatgaacgctcctaaatagctttttaaattttttaatttgcaaataaaatttttatatttaaaataaaaaccaaaaaataaaaaaataataattttagaaaacgttcattgcgaaaaaaattttaaatttataaaaaaaattattataattttcaaaacaaaaattttgcttaatgaacaagtactaaagaaaaaggtcaggttttgttacttaaagtcgtcaaaatatttttattttatgaattatggtcataattaaaaaatttttaatttttgattaatttactttgaaattgtatcgatgtcaaaaaactaagaatcaattttaagcttacggtatatttttgccaggaaaatttttaaaaatctgcacttttctgagattttttcaattaaatttttttcgattttaccgaaataaattcgaaatatttttgccattttttgtttataaaaaatgctattaatgagttttgcaaattggccccaaaacaaaatgaccaactttcaaaatagagccggaataaatattcgtacaaaatgtccaaatatttgcggtattttttgcaaatttcttcgtcaaattccttcccaattttggcacatttccatttccttctcagcctcatcaaacacacaatgccaagatgg

SEQ ID NO: 17867 - DNA, 3640 bp, Heterodera glycines
  unsure (1)..(3640): unsure at all n locations
tctagagtcaatantgggcatacctcantttcgttgtaataatgtaaccttaataattttttctttgtctttttaatagaatgttacaataaaataattattctttgtcttttttttaaatgattgccttaagccaaaccaatgggcgcaagtgagcacaatttttatggaaggatgtactgtctttttcccctttccaatctttgttcttcattttcccatcatggcctccagctatgctggaaaggggtcatacgaggcaaaatttattaattatatatttgaaaaaaacggggaatctatggtttgataatttggaagtcggggtaaatttttaataatagccttacacaaaatttatcattttatgttaaaaaaaattctttcattcattcggtttatatttttgctcaacacaaatttctggcaattttttcatttttcacttcgttagctcattcctctcgtctctcttttttaggtaatgaactcttgtgatttattaaatttaaaaaaaacaattaacacatccgctcatgtcacttctgctgaccttcatccgccctctcctccctctcccccccctcctctctctctctctctctctcccgcccactctatacccccggtaatcacttcataaattatttagaatcttttccccgcatccgtttatttgagctgcttcttcaaatggttcttcccatcctttgccgtcattttgttgtgccttcattgaagaagagctctcaacacgaatttctaaacagctgattgcgttttttaagttcccattaaattcatttaataaattaaatgaccaataaaaggcaaaaaaaaaacagtgccgagaaaagcaaagggtcgttaatcagagaaatttccttcaaaaaaaacattggaggagaaaaaggaattttttcctttcggatgactccgaattttcttttgctttttgaggatttttaaggaaccctctttttcaacgaatttgtttagaaaactcgaaaatgacaacactaatttaaaaaaatattgcatgattttgccgaaaatgataactaattaccttgaccatatgtcaaatattcgctaatagcaattatctttttttaaataaaagttgcctttatgtaaaaaagtttaaagtgacactccaataaaactttcttaatttcacagaatttatatttatgcaaatttaattttgaatattgtttatcggctacaaaagtgacagtgaaaaaatcggttcccataagtaagaaaatttacaattaaaaacctaatttaaaaaagagcaaatggttaattgaagggatggatacggtaatgaacaaaatggatactgtaatgagcataacggtaaattgacgagatggggtgattatataattgtgattattaaatggtgaagatgctcaacatatgaaatttgggacgtaacaaaaataaataacaagttaattagaattaaaacgtaatgcaagtgcatttgatacggtaaatgatactgtttcccattttatctatttaaataaaataaaatatttaaagttgagcaccatcacattgaattgcttgaatagcaattaaataatacattaaatcaaatcagtgcggaatgagttggtgtgaaacttattgtttatgtttactatgtgatcgtgagaatgagaaaagtgaatgaaagtcaacgtataatggcaatctgatcactcaaaatggtaagctaaatctaatcagtggaagaatttaatttgggagataaattttagctaatcattgatcagggataaattcaaatggttatttaaagttatcaagagtttgtgaaatttaaacggtaacttaaagtcattaagagataatggtatccaatttgtttctaatgatcaaatttgtaagcgaactatttaattgtttgaattgatgagcattgatcagtaaatctatcagagtgatcaattgagaaagatctaatcgaggcttttaaaccaaaagaaataatgaaagatcagtaaaaaatcactataaatcagcaaaagaatagatcattttgttggagcaacggcgttggtggtggcctaggctaaaagaatgtaggcaattttgtgtaaaaaaaaagtgacacagatcacaaataataataataattcattaattaaaaaatgaaaaaaaatcaatcaaaatttatggtgataaaccattggcatttttgtgaattggaaatgggcacaaacaaacaaacaaaaaaatttacgacacgggtttaaataagattttgaaaaaaaattaatgagagagattttggaattgagaatggaaaaaagcattcatcaacaaattgctaaagagaatttaattattggctgaatgtgtgagaaacgaaaaaaaaagtgatgaaaaatgccaccaaagccttaaaaatttttgggttttaaaagagaatttgtgtcctatagttgtaaaaagcgggaaattattttcttaatttaaatatttcagaaaatcggaatggaaaatcggctaattcaataatttagggtagcttttgagagttaaccggccttccctttcttgaaaaattaaaaaaattttcaattttttgaaatccattttttgaaagctttggcaaacagccagaaaaatatatgtcatggcatgacagagcaaaaatgagagagctgattaatgagatgatatcattttttaattaattacaggcggcgaagaacaaagacgtgccttttgagcactcactagcggttgtgtttttgcttttttgggatacattgtgtacgcgagaagcacaatcctacccgaaatacatgaatgattgaaaacacatacaaaacatatgtaaagcaaagaaaaaaaagtgatcagagaatttttttgggggggggcgatcagtagcaaaagacacagatcagtagagaaaagatcgcgatcaaacggcggatgtgatcggaaagccagcgcggagcaaacagatcaagaaaaatggtcacatcagcagagatggggagggaaaagaaacaaagacgaggttagagcatgcagagagcagcagattgatcacacactgaataatataatatgaatggatttgtgtttggggatgggatggtccagcgtagtacagatcacaagcattgtgagaatggataaaaatggatccaaaaacggtatcattgtgcccacaaaggcaatgaatggcatttgccaagccttggaataaggcaggaattttaaaaaaaatttgtcggtatggaaattttccagaacttagtttttaagtggagtctctctagcgattatatgtaattaagctcaatgccatccatgcctttgggctgtttttcgtgtgcacaaaattgagttaatcaccagggaagaaaagacacgtgattaataggcatatcaactaatgcaaatatgatttttgtcggcactttatccgtttttggtgatgttaaattgaagccacaagcattggcactttaattgttgttgcactttcggatggcgttcaatgccgcgtcgttgtgcgctacctgtttggtggggccactgccatggcaaacctgcaaaaataatggttgtttgtttatgaaaactcattaagtaccaactg

SEQ ID NO: 17868 - DNA, 2152 bp, Heterodera glycines
ttttctgtgaaaatgccgaaatatggatgtaaaatatggaaataaaaatgcatcctagagaagcatcaaaccaagctaaaactactttttacgctatttttaggccgaaatgagtgtgcaaaaaaaatatggaaatccatacaaatccggtccctagtgatcaagacatactacggtacatatttttttttaagatttattttttagtaaatggctaattaataattaccgtaggataaaaattcggtgatattcaccgaagaaattgttggatgaatcattcacaccaaatttaattatccgaccgacgttaccaagaaagttgccaatgttcagctccgcttccagcggtggcaacaccgtgcccagccagttgagcagttcggcaagcacctcgtcaaatttgccgctttggatcaacgcctcctccaggctgcgctggcgtcgcagtgccgcgcgcgataacgcctcccagcaccgcgtcatctcctcattcgcttcgtccaactgcaacttctcgctgggtggcgcgtgctctgccagtgcactgccacggcggcgaacctcgtcgtagacgcccgtcttgcgctgaagcgcgtccgcaagcgtgcgatgctcggtgagcgcttcacggatgcgctcacccgttccggtgctgctcggctcagccgcctcgcggtcgcgcaaccatcgctgctgatcctctgtccagtggagcaggtcgcggcgcgagtcgaagaacagccgggactcgtccagtgccatggtcagcgacttcagccgctcgccgcttcgttggccgagcttgtccatgcggtgcttcatcgacacaagacggttcttcatcggaatggcgtctttcttctcgcagctgagctggatgcgaatgcccttgttgctcagctccttcatctgctcaacgcgttcgcccagttcggcatggaacgcctggtggtgttgcagctgtgcgctgagtggctcgaccagcttggactgttgcggcaccatggccaaatgctcttccgccccgtacagccagtcttgaactccttgcatgccatgcgaaaagttgcaaagcatcctccaacgcctggcgcaaccgtgcctcgcgctcgaccagtttttgttgcgcagttgtccaatccgtgcgcagcttgcgctgctgtccggcgagcccattggtcagcaccaccgctggcacccgtagcggaaccgccagcgcctgctccgtcggctgcagctgcggccaattgttcgtctagccggcttaagcattcctccagctccgcccgtcgctgctccacgtccgcttggaccacgcggaactcgtccatttgtgccatcgccgtctccggcagtccgccaatgggccgattggtgcgcagctcggccaacaggtcggtcagccacaccgcccacttgttcaggtcgtcgctgcgcgagttggcctccgcgcgtgcacgctccaactccacccaggcctgctccgcctggtggccaacagaggcccagcgctgggccagctgatcaagcatggactgagtggcaacagcacactgcgggtcttgttgcatcatcttttgtccagtggccttgtcagggaagggagggaggaaatgatcaaatgattgaaagctgatctgattcagaccaataggccaaaatttaaaaaaattttaccgattttttcaaaattttatgatcaatcaccaagtttttcaaaaaaaatttccaattttttgaaatttgttcataaatttttttaaggcttttccctctgatcaccagtctgatcaactcattaagcttgtacttaagcctcacttggatggcttcaaagcttggctggtgtgcagcgatgtcgttttggatcatgcgcagcttgcactgctcgatctccacgtgcttcaaaccaccatccgatgttgtgtccagcgtggccaacaactgttcagttttggccaaccatgccatcatttgatcgttggcatgtgccaactgttcccatgtcctatcagggatcgttccaagtgttgttgagtgtcttcggagttgggcataaagctgtgcccatcgttgcttcaggtcagcagtgccacacggatgggactgagcttgggctatgagtgccgggcatggcacacagttcggc

SEQ ID NO: 17869 - DNA, 2230 bp, Heterodera glycines
gaaatttttcgcaattctttaagctaatagaggacgcttagggcattcgaatgataacaagaaagttggatttggttgaaatgaaaaaagttatagttcaagaactcggttggcgcgaaaacgacaccgtattttgcatataaacataaaaaatttttattttatgcataaaattgaaaattttggcattatgtcagaaataatcgctttgcactttttgaaagtatcaaaacatccaaaatttttctgaattaactcgggttggccaaactcaatttccaactacaggcaaactaatgaaaatttatttatttatagtagggttcctccccgaccccgagctccccggtccccgaccccgatcaccgacatttttgggcctattcccccccccaacccccgacatgtgccccccggcggtccccggcccccgacattttgtttcccggacccccgacccataatcggggaatcaaggaccccgagcgttgtaaaaatttaaaagttatttcaacaaaatatttaaatttacccaaacactaagcaaaaataaaaatttttaatatttttttaaattaatagaaattttcaaatttaacttgcacatttttcaattttccatgtgatttaatagattttcatccaattaattaccttctaatggcttcaaaagcatctgatatttggaattttttcactaaaatttcttcagaggttgccggatgtcgcaaattacaaaatcacccgcactcttaaggttttctatattcggtcttgggttaccttttttcgtacaagtaaaggcatgtccttgctccgcggctatcaagaaaagacaaattccaagcaaaaaaactcataatggtttttataaattaatgttttcacaattcttcttttaaattaaggcctgcccgacccggtggaattcgacctttgaatgatgatggcatttcgtgaaaaaaaacgttcttttaaccattgaaggagaaagacgtggattcggtgttggcccatcaaaaaagtcgcgcctcgacattgtcccagaaaatttgccaaatttggaaattaccgactttgattttttgcgtgaactgtgccctttattgggaatttttcatcgagagactttaaaggcaagtgaaatatgtaaaaactaaaaataattgtgaataatttcagttttctaatgaaaaatcgtcagcatcaactgttatttcaaccataaaaagattgcgtgattttttgcaagaaaaatctttctcaaatcgcattttgggcgttgctggagtcatagtggagtctttaaatgaacgaattcgtgaaatttgcagcaaccctctgttgcgagtagcaatgctacttgatcctcgatttgcttacacagaacttttttctcagcaaaattggagggttgttgaacagcaattagttgaatttgaaaaagaaagttcgttgaattattatgaattttaggtcattaaaataatatgaattttttatcccttaagaattggtctgcccgacaacagaaatggatgctaattttgatgttgacgactttggttgagttgggtcaggaattgatccgacctttgcttaccgtgtggtatttctattccttcaaccatttctggagatcctgactctgattttttatcaaaaattgaagctgaacttgcttgctttaaggcaggccaaaggttggaagtgaacggagacttattttcttggtggcatgaaaacgatggtcatcttcccgagttgtcaaaacttgcaaggatggtccacagcattcatgctacatcagtcagctcggaaaggctgttctcaaaagctggacttatctttgccaattcacttcgaaataggtcaaaaatcaataaataagtttaatttatttgttaatttaaggctttccgcaatactgtttgacaaattttgattgtaaaggccaacttggacgcacttttactggcaccaacgaatgaattagaatcagatgatgaaagtaaagaaaaagacattttttgagttttgataactttatttaatagcattttaaaataaaaattggttttttcgttaaaaaatttagttgatcactacccgatctgggtccccgacccccgacaattgagctcctccccgccccgacatgtcgccccccgaagtccccggcccccgacattttgccccccgaggggtcggggaggaaccctaatttata

SEQ ID NO: 17870 - DNA, 3323 bp, Heterodera glycines
  unsure (1)..(3323): unsure at all n locations
ttgtgggggaattaatgggataaaatggtatcatgggttggaccccgccccgtgggctgggtgatttaaaatcacacatatatgacatttatcctttttctttaacactatccttggccttattggttgtgctctggatttggctcttgggttcgggtcccctgcttatgggttaattaattggaattaaatcctctcataggtatggaccccggcccctgggatcaccctgggtggtctcgacattcaaaaacattggtaaaaaaagggtgattttttgggcggagggagggttttggacgcccgtaaacgtgtccttatactactctcgtccttcatttccatttagttcgggaagtttttccagagtgaggagaaattccaaagaacaaatttgtttttgttctttcttactttcgcatccaccattttgtaatgaaaccaaaaagttgcgattgtctttccaattttcctcggccgaaattttgtgttgacgaagaaattgcatgttgaaatgggattttcgtttcccggttttgaagtcagttttgtagacggagttaatttaccgaactgacaaattttcgtgatttgtttcacactttacggcttttccttttcgaagttgagtttttttgatatgcagagggatttagttttcccgttttactgatttcgtggccacaaccaatgaagaaacttcattagggatttgtttcccttttccagagaccaggatttgcttttcctgttacaaattgcagaagggtttacttttccttttaaaatcgttgctcgtccaaatttgtcgtttattgccactgctgagccacctttgtacaggagcgccacgtcgtaggaaaaagaatagtccaatgggaaaggggaattgtatcccaaatccaaaaccaaatcgccgtctcttttcactgctttcttttacttccaattaataaaacagcacacagcaatcaattacaaatttaggaagagcacatatatcacacataccccaaacaaaacaaaataaaataaagggtcacaaaaactaaaacaaaacgccaaaataattcaaatcaacaatgatatgacagttttcaataaatgataccgaatactaccagaaattaaatttatttgtttcagaaaaagtctaaaaattatttgtgagtaaatttgtttttaccgattgagccgagttttgttgcccactcatcaattagcttttcaatttgtgtttttacttttaaaattttttctttcttcttttgacttatttcaaacggagcgatgaattggataaactaattaaaaataagaattgaaataataattaatttggtttcttctttttctttttttacctcatttgatagtttaatttcactttcacgagtgaattgagttgttcggattaaatggtaatcaaaaaaatggtcatcattataaagaaaagcacctattttaattaaaacattttaaaaaataataattaaaagacatttaaccgattttctgttgtttttccatcttttcaatgttctccacggatttcaccaaattttccacacttttgaaaagggaattcagccgttccatgtttattatgtgtgaataataacgttgccaatttggtgcgcatttcgtttcatccgattcgtttgaagcggtaattttttgcacattttttgctaccaaaactgaaaatatgtgcgtgtgaagaatgtccaacatttggttgaattctgtgcttttgaatgacccaaattgggtggtaattagcccattagcttttttatcattttggggaattgacacggtttgtttggaagaatgtgttttaaattcggcactttctttttcaattttcatcagttcaatcgcctccaaatactcaattgttttaattaaactcctttcattttgctcactaaatttaatttgctctttattttcttaattaatttattaatagtttccagttatactacagaataagccgtaaaaccgaaattttttttagtttttattcaaaaaagaagaaattatttttttatatttaaaattcttgattaagttatattattttgaaaaaaagtacagatttttcaaaattttcgccactatttaggccaataaattggaatttcgctcctaaaaatcctcgtcctaattataatattccatagatattttttgatcatttaattataaatattatttaatgatcaaatttagatttttcttactcaagaacatatatatccaattcattgtgcacaaaatataatttctccatcaaaaattgcatcgtttcgaatttgtccaatttaatgccgacaaattccttccattttccattaaattttttccaattgtttttttctgcaatttcattttttgcacttttttcaataaatttgcgcttcgcttcaattgcctttccaagcagagaaatgtgcaaaaatggcacacattcggcgccaaatttgtcttcaaaataatttttatataaaatagtcaaaaaatggtcgtccattaaatctgaaagtgtgctaattatttaactcattagctttgttattttaccaatcagtttggaaattcccattttcttcagtgacacaatgcaagtgatgtcacgcgttctctccattaaattctttggcgaatttttgacattttctcttaatttttctccttttcttagtgtatcatttgtttcaagcgatttttttccattttctgaattattctcatttttaattgaattttcgctattatttttttgcttttccgacgaataatttttcttccgtttgccatttttctcttttccttttgactttttattctgacttttctgaatccaatgctcattttccctattcatttcttccatttcttcattaaattcaaaatgtccttcaatttctttctcctcctcttcttcttttacttctttttttggtattttctctttttcctcagatttttccgcctctttttcatctgattttatttcattcattttataattttggctttctttctcaattaattcttcaatttggtcttcatttgtatcgaaaaaaatttcagcggaattttcggactctgacggatttaaactttcatcggaagcagttacaaattcatgctaaaacaaattatttctagtcttgaaaatctttcatgaaaactcagttacattgcacaaaagctttttcattcttttcttttcgttgcttncccataanttttgcactttcttctaaaaattcataaaatcattattaaaatatagcgcacttacgagggaa

SEQ ID NO: 17871 - DNA, 2543 bp, Heterodera glycines
tcggttaaagtgattaatgtcgatttatcacttccgggtgcagtcttcggcatcattttattcaggttgccaattaactaaaatagtcttaaaaagtttttgaaagccgccccgccaacgaagacctgcaactgctgctcgcatttcgaaaaataagcactcaaagaagcgtctgtggtatcaatagataaactaaatacaaaaaaataaggaagataaagtatcataaggcaaacccgccaacgaagattttgtggttttttccattaacggaactgctgctgccaggggctacagacaattggacatcggttggctggttgccctcggatggaatttgtttagaagacatgttgttgttgtgggtgttgtccatcagactgtgctgccctcggatggaatagaaatataattttgctgtcaacgaaatattttgctaaacatataaaaaaatgtagcatcaacacaatgggatgtgcaatttcgctgcgcttatatagacttttggagagtagtgtaaagtgcagtgtagtgagtctctacactatagaacacaactacactctacactatagaacactctacactatagcacctgtaaaagtgacagcggatgtgcaatttcgctgcgcttatatagacttttggagagtagtgtagagtgtagtgtagtgagtctctacactatagaacacaactacactctacactatagaacactctacactatagcacctgtaaaagtgactgcggatgtgcaatttcgctgcgcttatatagacttttggagagtagtgtagagtgtagtgtagtgagtctctacactatagaacacacctacactctacactatagaacactctacactatagcacctgtaaaagtgactgcggatgtgcaatttcgctgcgcttatatagacttttggagagtagtgtagagtgtagtgtagtgagttaataatgaatttgtgttaaggtattcatagacggcggtgtacgcagtttcaacttttgtggttattataataaacaaaacgtaacaaaaatttatttgtgctgcacgaaaatcttcaaggacatcatcatagcatataataaaccggtaaaaaatttctcaaaatcaacgttaagatcataaaaaattctaactaaaattcatattgaaaatatatttcccactttcaagtacatctttcttcttgttcgtcccgcgcttttcatcttctttcttactaacctcctgcttaattcctttaaccttggattcaccacgactttgagtgtttttctaaattattcgtttattaacttagttcaaacagactaaagatttaattagtatttttttacatactcgagtgcgtttgttgccaagcttattttttggctgctgattctccatctgcttcacatcaacaactttcccatcaatggtatgaggtccacccgaaattattgcggcagtcttaggtataaagtagtttatctttataattcataaatacctgggtacacacgaaggtcacgaagccaaaacagcgcgaatgtttgttcttgacatgtcgtacaaccttgcaattttccaccttaccaaatttcgaaaaataagcactcaaagaagcgtctgtggtatcaatagataaactaaatacaaaaaaataaggaagataaagtatcataaggcaaacccgccaacgaagattttgtggtcttttccattaacggaactgctgctgccaggggctacagacaattggacatcggttggctggttgccctcggatggaatttgtttagaagacatgttgttgttgtgggtgttgtccatctgactgtgctgccctcggatggaatagaaatatgatttcgctgtcaacgaaatattttgctaaacatataaaaaaattagcacctgtaaaagtgactgcggatgtgcaatttcgctgtgcttatatagactttttgagagtagtgtagagtgtagtgtagtgagtctctacactatagaacacacctacactctacactatagaacactctacactatagcacttgtaaaagtgacagcggatgtgcaatttcgctgcgcttatatagacttttggagagtagtgtagagtgtagtgtagtgagtctctacactatagaacacacctacactctacactatagaacactctacactatagcacctgtaaaagtgactgcggatgtgcaatttcgctgcgcttatatagaattttggagagtagtgtagagtgtagtgtagtgagtctctacactatagaacacacctacactctacactatagaacactctacactatagcacttgtaaaagtgacagcggatgtgcaatttcgctgcgcttatatagacgtttggagagtagtgtagagtgtagtgtagtgagtctctacactatagaacacacctacactctacactatagaacactctacactatagcacttgtaaaagtgacagcggatgtgcaatttcgctgcgcttatatagacttttggagagtagtgtagagtg

SEQ ID NO: 17872 - DNA, 742 bp, Heterodera glycines
tagtagggctgggatttttatgttttaacatattttttttgcggcttagttatggcgagagaagcccaaaaatagcattttctccgaacaatttttgatttagagcgagttataaaaacataaaaacacatattttggcgttttggcacataaaaacatatgcacatatttcggggttttggcacatattttgcacatattttggcatttttgagaaaaatcgtaaaaaaaatacaagaaaatctgaaaatgcaccctaaaaattgactactttacgtttcttaagcatttagaaaatttctttatatatttaaatgcctaaagcagccaaatcaaacgctgtgttaaatcgtcactggatttcaaagttcccggaaggaacttattcaactgatggaaaaattaatccgggactttacaaattgattgatatcgccaaaattttgattggaggtcgggcgaaaattgataaagactgatattaaatatgattttttttgcgtaaatacacttggtttttccaatttttagcacatatttttgcattttttaacacatatttaggccttttttttggtttttagcacatattttgggtttttttagcacatattttattacatatttcaggatttttagcacataaaaatcccagccctatatatgacgcagtattattttacactagaaaactcgaaaagaaaatttttcaatttatttttcgccgggacaccaattctcc

SEQ ID NO: 17873 - DNA, 2835 bp, Heterodera glycines
ccctaaatgtttttattacttgagcatgctgttgcttgctaaaaaacttataggtaaaacttaagaatcttccgaggtctcgccgatcggtaaaattaagaattttccggtaccttcgatcgataaaagaatgtccagaggtaccttagatcagtaaaacttaagattttcccgtgtaccttcgttcaactctttgtatatttggttgtaggtactttcatattcggtctcgctgtgcttgtccgacagatgctgcttgagctgattgaggcttccatcagacaatggcaaagtgtctttgcattcattacattcaaccgattctttgtttatccgtttgaaaaggccaatttgccatattggatgatctatgtgattaaaaaaccggtcattataagagttttgagataatatcgcttggaggaacggttggtaacctaagaccttttaaaatttttctgataaaaaaagatttattttcctaatctctgaattcttttttatttttttactgtaagtgtcatggccaaattccggttgttgctgctgatgttgtgtttgttgtcgttggtgttgattttgtttttgcttgccggcctcctcctgtttttcagctaatttcttgaggcgtttgatgtgccattgttgtcgctcaatcaattcttttgatggtgaagtgcgccaatcgaaaaggccttggcctcgtgctaaaatcaagtccaaaaatgtttcaacaccatacagttgtcccttgaatgccctggcatctttggcttcaacccattccaaatttttgttcgtcttggcattggatttcacgtcgagttttcgaaaactaattattggcaaagggataaaaaatatgtatatgcttttgatggtaatatttaaaagttaattttaataataaaaactgattaaaaatttcaaatgttataaaattaagaaacatttttcgggttcacaggtgccggtaaacaccggcaaaaatctcacctaaacaaatcggcaaaacattgaggcataaccactgaataatgtggtctacttttcagattttcaagctttgtatctcttagataatggaaataacattcgtcaccactcgaaaaaagtggaaggaataaaaggaaaatcgtaaaaaaataataaaattgcaacatctttaaaatattattaaaaaataaaaacattggaaaataatatatttcttaattataaaatcaattttgcataattataaattgattaatgcaattttttgccagattgaaaatcaaacagcaatcaaaatttgaaaaaactaaatatgaaattggagtaaataaatttttaaaatattattttggtcgtccactaattttttgaaatattttgtttaacttcgatatagtttattcaaaatgtatgaaacttaatgttattttttgtttatgcgcatctaatgaatgaaattagaaaatttcgctgtatttattctaaaaaatagacaaataaatggcaaatttttttcatgtgaattaattaatcgtctgggtaagttaattaccacataattaataaaggtatcacgaagagattatgaaacgctctatttttccataatgtataaaaaaattttattattatttttgctatttaatattaaaaacagacaaatggcacgcgtttttcatgtgaattaattaatcgtctgggtaattctaggaataatttcataattataaaattattagaaaagtttatgaaaattgctccattcaggcaaatagcaagctttttttcatgtgaattaattaatggtctggcaaaatgaatattttaattaagaaaacgtatcatgaaaaaaatatgagaattggtccattttttataatgtataaaaaaatttttgttatgcacatttaatgaaaatcgtctgggtaaatatgaataatttcataattgacaaatttttaattttctttctatattattcgataatgcatataaaattaacaaaagccgaaaaaaaattcaaggttcatcacataattatgtcaaacacgggcaagaaaatcaatattttgtggattaaatttttcaacattgacacgcggtaattgcctgagtggtaattgcgtattaatacaagaattctacagtggtatctttgtgcttttggcggtggatcgtgttcagcaacgcacaaggccataaaggcgcctctcgtagtttccgttcattattcaacgtgtcaatgaaaagccatgtgaaaggatgggagcaggaaaagctctctttgcaaccgcctatgtgcagctttagcaaaatctgatgtactgggttccgaaaaattcacatttccgaaacttgacgtcattacccatatctttgctcaaaagcaatgaaatgtttacttcttgttatcattctcgttaaacctaagggttttatactagcctaacatcaaaaaatatagttaagtttgaacaaagtcattgtcaaaagtacacaagcaagcatgttttcaaatatctttggccttagcttttttgaatcttaaattagggaatattgaaattccatttttgcggtgctaacaacaaattagtttattgctctaaaaatataattgtttttacatatttatcatgtattgaatttcatagctttcatcctttctgctactttcagcttgttcggccattccttcctttatcaaatcaagatgccatttacagacagcttaaacaaaaaattttttctcaataataaataaaaaggcttaaacgctacaggattttttgctaattcaatttttttttttttttacaatttttttgaagacctgca

SEQ ID NO: 17874 - DNA, 2183 bp, Heterodera glycines
attttaaatgaccgatttttatcctcccgcttccctcgcctcgtcccatgttaatccctttttatacgcttcaaatttcaggtggcaatggtgaaatggaagcgatgttcagggttcttgccaaggtgtacccgcgaacttatttcattggcattggctttagtatgggtgccaatgtgctgaccaactgtttggcttctggacttgatccttctatttcttcgcgcattcttctcggcatttccgtttgccaaggctattgcgcttcggagtgctttgaatcgtttttttcacctttaattttcccttttagtgcttcttcccttttattcgattggcaaggcgggcgacgtttctacaattacatcatcactgaaagtgttaaacgattacttcggcggaattacgcaatggttgttcagccccatgtgaagtcgggattggtggatgaacgagtaagcaatcactcgggtggggtatgagatggattttactgtcctgaaaacttaaaaaatttttattttaaaaaatattttcaaacgtagaaagaaaaatattagaaaacttggtaatagtttggtttgttcccctattcttcaaaagaataacaattgtaaaactactttatatggggtttcgaggtcgctgatcacgaatctgatatccatttgaccaattcagaaggaaagtggatgaaattctaaattttttaacttaggaatatactcggggctaattttcgcatttgtatttgaaaaacctatttttatggaattgattttttatcattatcgataaaaaaagattccattttcatatcgagtgaccctgaaacctttgtgaaaatattctaacaaagggagaaaagataaaaaatttattcaaagtattaaaaaaataaatttttctgtaattaaattgattttatcttctttgaagatttaaaactacaaataaaatttattgttatgtgaatggttttaacgaattgtcttttaccaattattttgtttaaaaaacagctacagttatttatcttttcagaaactttggtcgtcgacttcgcttctttggcttgacgaattttacagtcgtcgggtgcacaactttgcttcagtttcggatttctattcccatataagctgccttccacgcattaaagacataaaaattcctatgattggtattaaaaatgaacaaaaaaaaacctaaatttttttattaaataaataaaattgtttcagattttcatcaacactttggacgaccccctcgtgcccgaagctctttgggaaccagttcggcagttgtgcgaaacgcacccgctccatgcgtttgttttgcttaaacatggcggacatttgggctttctcgagggcaattctctgaggcctcgctcgataacttggcttgaccgtttcatcctccaagtggctgcggcagttagtgaaaatgtgtgtttcattttgctatttggcaatgctaattgaaaaaaacgatttttatttactagttgaaaattggcgagatgagggcgagctgttcaaccttggccgatgtttttgatacggaagaagaagccgaagcatttgatgacgcctttaattagtgaagctttaattatccaaacacgtgacaattgctcattgaccttgtgaccaaatctcgattgtttatgttcgatagttagtgcaattaatacatttttgaatcatattcactgcattttttgttgcaaaattctttcatttgccgggttgtcataatagtctgattttttgataaaattatactgcttgatttttactttttgtgttttgtttttgtcaattacttttacaaaatccgttttttctaattttgctgttttattgtcaaatggatgattccactttgtcctcttcgtccgctcttccctttcattccccaattgaggcttcttcctcttcctctgccacttcgtccaatttcaactttctttgcattggtaatgaggcggagaagctcaaatggttggtgctgaaccacgtgaggccaaatgcgttaaagaaaatgttcgagccgttaatacaaaagaggcgacgggcggtgaatttggaggacgaattggtctgtgttcaagcgtgcatgctcctccaatcattggtcggtgatccacgatttgatgcgcaaaagcatcgttt

SEQ ID NO: 17875 - DNA, 2765 bp, Heterodera glycines
  unsure (1)..(2765): unsure at all n locations
ttttntggaaaaatatgntagacgtgaaatgccccatcgttccacccttcaaaaaaactacttacggttaacttttgaccaggtcattccaaaaatgaatccaaaaacagtaattaattttagacaatggagaaaattaaaaacaatattggcgactcttacgtttggatttcggtggacgaaacaacagacaaaatgggaagagcgatggccaatttgctgattggaaaattggatggacaaaaatggcacaacccacatttgatttccgtcaaatgcttggagaaagttgatagcgcggcaattgctcggttcatcccgttcccgtttcccgtcttttttgcccggacgggatttttacgggaacgggaaaaagccgggaatcccgttcccgtttcccgtcccgtctttttgaattcccgttccccgtttcccgttcccgtcaatttttcttaaaaaacgggaataaaaatacactggtagaattgggttttcagatttaacttaggcattttgccaaacaaaatatttgtttttgagttagtcaacaacaactcaagaaacgtatgcactattcatatgcacactacatttttgcttctttttaaaaaatcaaaattaagctttaatttcttgtcaatggctccatatcatcctatttggaaaattggcctctttgaaaggagcaaggagaacgacaaaattgctgaatgtgtcgaatgtaaagcccaaaaacaacgcaaattccaattcaagctttccgatggcagtgtttcttctttgattggccatctcaaaagcgacaagcacaaaaattccgaatacaagaacaaatttgacgaaattatcaagacttaaacaagaactggcaaaaagactgaagtgatcgccggaaaaattgacaatttcgttctgcgtagtagtggtaaatgaatattatgccatagtatgttctttttttatttaggtatcatgactcgcctagacaaagctatcatcaacctaatctgttgcaacaatttgtcgtttaacttggtcaatagcccacagtttcgagtattgtgcaagccatggagtgaacagctaaaagatgaatcacattaccgcaaacttttgcctgttgcaagtgaactagtcaagggaaagattaaggaggaattacgaaaatgtgattcattttcgtgtacatcagacatttggagcgggccaaatcaaggatttataaggttagctgaattttaccattttcttttatcaaaagttaagtctgacaatcgagggagttacaaacaaatgggaacgtgtgagacatactctcgcaattaaaccctttcccggcactcacactggacgtcgcgttgcagaaattttgtccgaaattattgaccaatgggaatgtcgagacaaaattcacacttttgctactgatggaggaacaaacatgaaaaaagttggttattagttatgggttgtaaatattcgttttttgcaggcatttgaggaaaaaaaacgaaaatggtcgaattttgcctttttatcgatcaaactgtgcggcgcatttattggaccgtgctatcaaaaatagttttggcaatcgagagggagaaatatcgggacttttttgtatgaaaacgacaatttctttaaaatttttcttaataattaagcaaattgtcgtcggattgttggaagggttaagcactcgattaaagcatttacagaattgaacgaagcacaaattgaggagggacttccgcagcacaagctgcttcaggtaagctgaattccggaataaaaacaccagtttgctgtaaatttaggaaatggcagttcgatggaattcttctttgatcatgattaggcggctttctgagcaaagggctgctattgaccgaatcgcatttgaacagaggaaatttgaattgactttgcaagatggcgagtggcgactgcttaattcactggagatgctcttggcacctttggaagaagcatcactttatttttgcaaatcaccgctttcaactcaaataccattttcaagagcgttgctttcacaattaaagaatttggaccttcgggtgaatatgtgaaaaatggatatttacaagggaattactgaaattgaagaaaatgcgttcaaagcttttggctggacttgaggaaagattcggtccatttggagaaatgagaagtgtgtatatatttttaaattttcttttaaatttcttttttagattacgatgctctttcaacattcttggaccctcggtacaaatatttatttgcaaatgacgaatgaccgatttcaaattaaagtgtgtatattagggttctaaattatctaaaatgtgaataattaagggtgaaattttggctcgcggacgaacaactgagtagtaatggctctgagcctattacgatctgaacgatgttgaaaccgcgtcgctttttattgttcctcctcctcccgagcaacgacgtacgattacttgattccttgtcgagaaatggcctcgaaccgagcgaaatcttttggtaatttttaaaagatttcttttattgatgcgatgataaaatttaaagtgcgaaatcgaatcgacgtttgacgatgaattcgaaaaatattgttcggttgatttggttgggcgagaattggatcctttggactggtggaaaataaacgaaggtctgtttcccgttctcgccgcgcttgccaaacgttacattcggccccggcaacaacgattgaagcgagcaacttt

SEQ ID NO: 17876 - DNA, 2621 bp, Heterodera glycines
ccattttccgctcatttcccccaccatcgccaaaatgtgataatttgtgacgagtgatttgggggggggggaaggcgaagtaacaacttttgagtccatccgcgttcggtgatcaaccgcttctgggaaaatgactgactgattgctcactgatcaataatcattgaaatgggcacaatgaaaaaaaaaatgccgtcttttttattcgccaattttcgctccgttcttttcagctcgaacattcgctaaagaccatttctcacgcggtgcttctgctggtggacacggtgatgcgcgagcaggaggagcagcagcagagaaacgaactctgagaaaagaaaaaggggaagggacggagagggaaagaaaaagcaatgggaaaaactgatcggaggaggaaaaggaaaagcagtgccaaaagcaaaatgagggaaaagcaatgccaaaagcaactttcactccgtcttttgcttgtctcatcgtccaaatgccactaaaacttcaacagaacggcgtcactattcactcagctattgatctcatcaattctcgtctcaatacgccccaaaagttgtcaccacatgccatttaatttcctaattatttcataattaatacgcaaatttctcgtcacttccccttttcttttttgtgtcttccaatttctcaattggaattattttgattatttcttttgttgttcggagtgagagaggaggcaaatgccgcgtggccattaattcattctcattttgccgatttcatcgcgacaaattcatttagggatttcatttcctttacaatagaattttattgctgaattttgcatcatttgaacggtgtgctcaaattgtatttcatacaaataaacggaagaaagaaaaggaagggaagagaattatttgtgttaaacaaatgactgactgtttaaaaaatatatatatataataatattcattttaaggcgaggagaggcattttcaatgaattgtaatgaagcatttgggggggggggtggcaaaaaatagtataaaggacttttgtcaatttgaacaaaaaagcgtcggttggtcacaattcacaggggggcggaagtcggcacagttttttcttgtcgaagtgccgtcgacgggggtgaaaaagcgcgggcgaagaatgaaagaatgttggcgtgaaagaattcgattgattcgccgttgcgaatgccgtggcgctcattgggaaaaagcataagcctatgatattgtaaataaatgataatttctaacaaaatgggttgtctctctattcaccggtatggcttttgtgcggcaatcagtgccgacatcagtttggcacagtgggaaaagtgcacattttcgtcaatcattccgtgcacaatcatcagccgtccctctctgtacaaatcaatacaaaattaacacattaaaagggagaggggacggaaaacgtactcattgggcagacgggggacgaaggaggaaagtgccgacttctcataagcctcggcattttcgtcgggcattcccatgtacctgtaaaatgctgtccgtttttttattacccaatgacatttctctatgaattgggtttttgcttcgcctcccctccctttctgttttgcccaccgttcagtgtacgccgtgtcgtacaaatgccaatcgctgaccgctcctcccacacacgcgcatcgataggtgcccgggaaacaggccaacagcagcagagaggcgtacccaccgtaactccaacctgaaaggacaaaggcatgggttactgtgcgtctcatattttgccagttttgtccaccgaccgatcactgccaccctttccatgtccaacagatcgccaaatcgttcccccgccatgcgcatgccctcctgttggtcctcaatctctgcgctgcccatgcgatgtttgatggccgactcgaattgtaagccgcgatttgccgagccgcgtccatcgaccattagcacggcgtagccaaaggcgacgtacttcaaattatgacaaacactgaaaaggaccgcagtaattaattaattaccgttggtaaatgttcggtatttttatttacctgtaccaactgttgcgcacgagttggacgctcgggccggcataaaccgcgtgaatgactgggaatttagcggtcccattgcgatttgcaggcagtaaaagcaggccatggtgcgttttgccggaatttgctgatttgtattcgaaaaagatgggtttgacgatgtcggacgaggggcggaagagatagggcattccccagccgacggactgaatgccaaaggacggagacaccacttggacaccgattctgacaaggggaaaagcgtaaaaaggaacaaaatggggagcatggagaaacaaaacaattagtgcaaaagaaacgattagcaaatgagtgttatccattaagggtaattgttatggtaattaccgatgagtgaacaccgcccgaggcaatgggtcggcagaggcagcggaatggacgaaacggtagagacggcactcgggcaaagtttggacggagctgagccaacagacgaaaccgatgtccgggttcaaaatgagcgaagcggaagcacgatcaaatctaagggaaacag

SEQ ID NO: 17877 - DNA, 2327 bp, Heterodera glycines
gtcaaagatttaggagtaataatgactctaaattatctttgctgagcatataaataaaataataaaaaatgcttacttaaaggcataccatatttgagaatgaatgaagactagagagctaaaaactattataagaatgtataagacttatgtcagacctcaattagaatatgctgttgaaatttggaaccctaacttaaaaaaagatatagaaagaatagaaaaagtccagaaatttttcacgagaaaagcctttaaaaaatgcggacttttacatagatcatattcagaaagacttgaaatttgtcagcttatagaattagccaagcgaagaaatattgctgacttaactaccgcttttaaaattatgaagggttttacgagtcttgatgctagtaaactttttactttttctgatcgaccccattcgtaggccattacttttgagaatgcggcgcacaaccacaaaaagtaagaataatttttttaaccgtatagccaagaattggaacaaattaccaattgttccaattcaggcagataaggcaaatcaattcagggcattgctaaaagctatgtatgagttctaagggatttattgacatttgcattgacattcattccattttattttattttactttacatttcatattgttgtattttttgacattattcattttgattttttttatgcgccacataagagcactaatgtgcctgtggtttgctcaataaatatatatatttaatttcgtattaaatgaatttggcaaaagatggatgaaatgtcgcggatgactgtgtataaaagggacggacattcgcattttcatttttggggagtttggcgtattgatgattccaattcaaatttcattccaatttttttgcctctgttttcggctttgaatttcttcttaaggaaaaggtgaaatctagagatccgcctggacctggatccaggcttggatttttcctggatccaggttcaggtccaagccatttttcggcaacctggatttatcctggacctggatttatgtccaggaaatccatgtccagcaggtccaggttttttccaaaataccgatctctagtgaaatctaataaattaatgccttctcattttattttatccatttgttatttaaaaaaaacaatttttaacttttaatttagacacttaaagcgaaaaatgtttgaagctaaatttacaaatgccgcccttctgaagaaaattgtggaagcgatcaaagagttggtcagcgaagcgccatttgactgtacagaaaattcaatgtgtctacaggttttgcagccttatctaagaaaatattgcaattaaaaaaaccctgagtttaggcaatggatgggtctcacgtggcactgatttccctcaaattggacattggccttttcgaagtgttccgatgcgaccgcaccattgcacttggactgagtatgggcgagctcagcaaagtttgtttgggtggacgattagggcattcagaactatggcacagtctttaaaaggtgctcaaatgttccaaatcggaggacactttgatgattcgctttgaggacagtgagcaggacatggtcacgttcacttttgaggacaccaaaggacggaagcaggacatggggggaaattcgtccgctgtttcgcccattcttttggcggcggtttaccacacgtttcatcaacaaaaatgattgttttatttgtttgtttttatttacttacacaccatcccagaaatgagctcctgtaccagaaaagatttgcatgtgtggctcagtggtttttgtaagatagtaaagggacaaagggtggtggttcgagtccgttgtgcaacatgaatattttcatttatttttgtgcaaaatattaaaaaatcacgatatttgggaattatttttgaagctttttaccaaccaaattggtccatcttggtatcattcgaaagctcttgatggggagaagctttttctaagcaaatactatgcaattagaatgagtagaaaaaatatatgagcgttcgaaattttattttttgaataacttttgagtttgagcacagacaataacaaatcagcacaaaaagatgcagaaaatttttctctatcggtatgcaaagtttaaagaaaatctgttaacggaaagggaaatctcttagagagaagtgaatgttgttattcctaataatgaaaatattagatagtacgcccaaaggagacaaaaaattagagaaaaaaagataatgtttttctaaggcattctctatttattggtgcacatctcgttttttgggatggtgtgt

SEQ ID NO: 17878 - DNA, 1466 bp, Heterodera glycines
aatttgcgggttttctcccttgaaaacggtaacccttcatacaatcggcgtagccaggggggggggctgaggtggctaaaccctccccccccccgaaatccaaaaaatgaaccccaaaatggcaaaaaaacattcattttttggcgaaaaactgctataaatctgcaaaaaaaaacacctaatcgggatttctgaaaaaagaaaaatacaacctaaaaatcgaatttttgaattcataattcagcacctccccccctcccacgaagccaaaggtctggcctatacgcccttgccttcatacatataagtcatatatgtagattttatcaagaaattcaaaacaaaaattatgttgcaattatatcaggggattagactgatttttggttatggattctttcatttttgggacaccctataaaaaattcacgaatttatttagacaactcaaaaattgaggcacaaattttggatcgggattcaacgaactttagctactttttctgggttgaatatgttcttcaaaaaaatattttataaaaaatggaattaaaattatttttatctttcttcaaaactttgtttatttgtttaattatgaaatacaaattaacagctccttaattgggtctgaaaaatttgaatatttttaaaactggccttattaaactcgagatcactccaagaggattttattttactaaaaacattacctaaaaaattaaaaaaaaattttttttttgggctaagcaaaaaaattaaaaaattctttccattgagagctaaaccatttaaaatatgttccgacaacatttcttgttgaccacaatgcttttgtgtgcacttttgtacccgattattattggagttggcccgccagcgtatttggccatttgccaatggaaggattgtgtgggtgaaaagccggcccccggtggctctcacacggtgagacacgattttattttattatttttattttaattaattgttttaaaaaaaatttaaattgtgacgaaatgatttgaatattgtttgtataatacaataaatatgagaaacattgcataattcaaatattttattcaaatgaaaaaccatggattttttgaactaaatcgattttataataattatcgtattcatattttaggattaatttaaaaaaacatattcatttatttaattttgaatttagatttaataaaatatttaaattaaatttatttgaaaatttttgctttattgaaattaagaaaaatttatatatttttaagatgatttgtttgcccgcgactcgtccggcccaatgtccagaagaagcttggaaccaactgacagaattgaacgagctggagccttgttaaatttccaaattagcatacaatggaaaaatcgcttttttaaaaatgacaaatttcggcaaattgttttatttttccgataaataaatcaatgtttgacaa

SEQ ID NO: 17879 - DNA, 1328 bp, Heterodera glycines
ttttttttattaatctgaaaatctgaaaattaatttaaaaccggttattataaaatgatttggcactaaagactttttcatttcattgcttcatgtaaaattattttaattgaaaaatggattttcaaagttttatttctttcatgttatataatcattttttttatttcgctatatcattttttacaatttttcgcaaatttttgctgtttgaataaaacaaaaattgaggaaattggcatttctgctgttgttatcttacgccttttgttgcccttcacacaaaaattaagtttcaggataaagcggcactctaaattgaatatgttttgtgccccttagggatggattcgtttatttatggcaaaattgccaaaaagtgatggacagaaaacgacgacactttccaattgatgtggcaaattaactttattcactttcttcaagtgtgtgtgactttctttataagttttgaatttcgtcaagcaaatttgaatggcatgcaatttgaaataaaatttttgtaggatttaatttttcatttgccataaatttatgttaatacgaaaattttactatttttataaaaattccaaattttaaagccaatttttattctgattaaatgatttgaagaaaaaaaggctattaacagtatagttaaatccaactttttcaagcttttcacaaattttacgcttgaaaaaacatgaccaaataaaccgctggccaatcattaaggtattcatcagtctttaaaattgttggaatttttatttttggcaaaatgcataattttcaacatcgacatcaaccccaccatcatcatgaacaaaaactacatgggcatgaacagcagcgcgttccattgttggcacaccggcactcacagccttcgctactcatccaaccgcgcaagcaatcggtaaacaaaattggcttgttagctaattgagaccaaaaattcacgagacctcgagactcgagaccaggggacttggcaacgaaattgggaccatgaaaacttaaaaaaattttctttccgagtcgatgaattatgacagcgagaatatgcattaaagttttgctcactttgtcagagcaatttgataaaatattcttggcataatttgattatgtatagcaccattgaatgtacacaaacgcattcaaaaattaccgtgaccgagtcttatacggtgtgatatgatataaaaattatttttcgccatttataagaatttttttaaggcaaaatattttatttgcaatattttaaccagcatctcagagggacacaacaccatgagcgtgatccgaagatgaag

SEQ ID NO: 17880 - DNA, 991 bp, Heterodera glycines
aaaacaaagagatttgtggtcctggagcgttgctaggaaaattttgtgactttttaaaataaatatttttcaaaaaaatattccccatttttttaaatttttccaccctcttcctttaccaaatagttatcgggcctgctcgtaaaatatacagtacacagacagtaagaagttttttttttcgatttttgtttttgcgccttttgtcgcccttcatcgcctgataaaccaaacagtttgcttcgtttggccccgaatattgtactcaacacaacgctttcggcgccatttgcagcaacaaatgatgcaggttgtgatcaggcaaatgatcgcaatcaaaagcaacgcagcatcgccaatgtaaattgcgggatggactgtcaaaaatttatgtaatttaatccgtgatcggaaaatgcgtcgtcagtggaaaatgcgacagtgatacaaatatttttaaaatgaaaaatttctgtagcattagtattgtagtacaaaaggcgaaaagaaccttgttcgtaattggtaatacagtagtttgtaactaccttgtttaaaacaaattttcagcagtttgatttcattaaaagaagttccctctgggttttttgagtcgctgataacgaatcagccaattttggactacggcaggggtgtgatctgtcctgatttgtcagatttgtcctgatttggaggtagcgaccaaaatttgtcctgatttcttaaataaactcacatttttgaaattttatggcataatgtcactgttttatcaagaaactataagatttgtggtaaattttgacaaaaacctgttaacaaatcgattaaaaacgcaaaaatttttcccgtcggcgcctatcggcgtcaccggacgcccgtgtccatcccccaaaattttttgaaaaacgcgccgcaaaaaaagcgtttttaaagaaaaaaaaagtcgtcgcttgacttttaatttaaattgaaaaaattggcccttttt

SEQ ID NO: 17881 - DNA, 2581 bp, Heterodera glycines
  unsure (1)..(2581): unsure at all n locations
tttgaatggatcaagaattttctcaaaaaacacaaactcaacattgaaaatttggtcccctgccaattttggaagttcggatcacactggaactaacaatgtctttcaaaaattgaaaagtttgcgcggaaatttaattgctgtcggttgtccagctcatgtgctccacaatgctgcccgtcgttcggcggacaatttaccaattgatatcgaagtgattatgttcaaaatagccggacattttcgacattcaacacaaagagtcgagcgtttcaaagaaatttgcgattattttgatgtattattctaaataatagtttctttcaaaacacttttcaggcaaagtttactgtcctcaactctcatgggccgacacgttggacgactttgaccaatgtcgtgcaaaaaatttacgtacttttgcaaccattatgtgaatatttcaaggaagatggacctttaattctacgcaattttttttatcacaaacatctgaagttattatcaattttctcaatcacgttttaccaatattttccaaatcaattgatgcacttcaggtggcttttgtgttttgatttaaaattaaacaacaaaaacaacaaaaccaccttgcaacagaaatttattaatgagcatccaattaaaaaacggttgtgtttcattataaaaatatttatggctattttttaagaagaacaaaatgattctgccagaattgctggatatcatgagtcattttaaagtgaaaatcaaggacagaatggacaaacaattttttggaattattactggtcaattgttgcaccgtctaacagaaaaagaagaacaaacgttgaaaaatgctttcacggtagattgagctaaaatgtttttaaatattacaaattttcagtcattctacaaaacaactttggattatgtcgccaaatggtttcgcaccgaacgttatccggatcatattcaatggctttcgcttacagatcggcaactagtccatgagaatgtcattgaattggcctcaactttttcccctgatttatccgatactttgttcgatgaagttagtcaggtcaaccacattttgaacaacatcgacgcagcagaattcatgcgactgacaacagagtaaaaatggcaaagaattttcagcgctgattttcccagtctgtacaggctcgtaagcaaattaatgtcaattcccgtctcaaatgcatttgtggagagagtgttttcgctttgttcggcgcaatggacagatgtgcgaaatttgttgaaggtcgtcgacacagtgaagtcgctggcccaaatcaaagtcaacttcaattttacatgctcggaatttcacaaaatgcttatttcgaacaaaaaattgctcaaattgatcatggacgatcaaaaataccacatttgaacattttaaacgtgttttgaataaaataaatttgtgaaaatgaggctttttgaccaaaaatgaggcttttttgcgtgccaaatgaggcttttgaaaattttcatctgcgaaccctgtccattaatcatcatcatgtcttttcatcctcttaatgatggtggtagaacagcaatgcaatcagcagaattgctggaaaaacggaaaaaataaatacctaattgtttaaaaattaaattgcctaaatgaaaattattacaaaaaaaaaacattatgtacctatattttcgttatttaattcataaaaaaataattttaataaaattttgacgagtcaaaaaaagtgccaaatgtggaccaagaattaacggagctgcaacggcacaattcggacgaacgcccacatctgtgggcatttccacatggaaaccaatgttaaggaccaattctttaggaaacatgtctaaatttggaaaagaacgtttttaacataaatgcgcggacgaaaaaaggcataaagtttttcaaaaaaaaanaagaataaatttgtcgatttaaagtttttcttggatctgaaattcaatccctaacctatctgctggtcgaaaattctggattggtttttaagagttgcggctaaaagtttttaaaaaatttttgtttttaacatgttaacagatttgtgaatatatattatttgactaattaaaaaaattaatttaataagaagatttttgtccatcaatgcccgctcgccccgccgcggtaggggtcagttccgtaccagtcaagttaaaagcatccatcataaatcttttcttgattcaaccaaatttttaaatttgattttattctaaagctccgccttggtccaaaaaaatgactcattaattaatagggattcgttttttaggcaaatgcctaaaacttctgcgcagttaatatacacagataagcacgaaaaacgcattttccggttggtttggggtgtctacgatgacttttataatgcctaactttgcctattttgaactatttgtgcttaatgcctatttttgtgcctatttcgccattttaggcgccattttcagaattttcggaaaaatccttaacaaaaatgcaataaaaatgaaaaatacaccacctaaaaaacgacctgaaaaaatttca

SEQ ID NO: 17882 - DNA, 982 bp, Heterodera glycines
gggattggcataggacaaatggacaaggagagtgagtacgtgggattggcaagtgccaaatggacaaagacagtgagtgagtgggattggcaagggacaaatggacaaagacagtgagtgagtgggattggcaagggacaaatggacaaagacagtgagtgagtgggattggcaagggacaaatggacaaagacagtgagtgagtgggattggcaagggacaaatggcataggacaaatggacaaagacagtgagtgagtgggattggcaagggacaaatggacaaagacaggaatgagtgggattggcaagggacaaatggacaaagacagtgagtgagtgggattggcaagggacaaatggacaaagacagtgagtgagtgggattggcaagggacaaatggacaaagacagtgagtgagtgggattggcaatggacaaatggacaaagacagtgagtgagtgggattggcaagggacaaatggcataggacaaatggacaaagacaatgagtgagtgggattggcaagggacaaatggacaaagacagtgagtgagtgggattggcaagggacaaatggcataggacaaatggacaaagacagtgagtgagtaggattggcaagggacaaatggacaaagacagtgaatgagtgggattggcaagggacaaatggacaaagacagtgagtgagtgggattggcaagggacaaatggacaaagacagtgagtgagtgggattggcaagggacaaatggacaaagacagtgagtgagtgggattggcaagggacaaatggcataggacaaatggacaaagacagtgaatgagtgggattggcaagggacaaatggacaaagacagtgaatgagtgggattggcaagggacaaatggacaaagacaagtgagtgagtgggattggcaagggaccaatggaccaagacagtgagtgaatgggatttggaagggacaaatggac

SEQ ID NO: 17883 - DNA, 802 bp, Heterodera glycines
aatggcataggacaaatggacaaagacagtgagtgagtgggattggcaagggacaaatggacaaagacagtgaatgagtgggattggcataggacaaatggacaatgaaagtgagtaagtgggattggcaagggacaaatggacaaagacagtgagtgagtgggattggcaagggacaaatggcataggacaaatggacaaagacagtgagtgagtgggattggcataggacaaatggacaatgaaagtgagtaagtgggattggcaagggacaaatggacaaagacagtgagtgagtgggattggcaagggacaaatggacaaagacagtgagtgagtgggattggcaagggacaaatggacaaagacagtgagtgagtgggattggcaagggacaaatggacaaagacagtgagtgagtgggattggcaagggacaaatggcataggacaaatggacaaagacagtgagtgagtgggattggcaagggacaaatggacaaagacagtgagtaagtgggattggcaagggacaaatggacaatgaaagtgagtaagtgggattggcaagggacaaatggacaatgaaagtgagtaagtgggattggcaagggacaaatggacaaagacagtgagtaagtgggattggcaagggacaaatggacaatgaaagtgagtaattgggattggcaagggacaaatggacaaagacagtgagtgagtgggattggcataggacaaatggacaaagacagtgagtgagtgggattggcataggacaaatggacaatgaaagtgagtaa

SEQ ID NO: 17884 - DNA, 1706 bp, Heterodera glycines
  unsure (1)..(1706): unsure at all n locations
aaaaaaaaaatttgacaataatnaacgattcagaattcgatctcttngaggagcattgcctccgctcccttcacttgtttctcgcccattttttcnccaattccttttgtgtgccaacaatccactgttcagtcgttttaacaactccttgttgttggaggatcgttccaacaatttgctgtatttcttgaacacctcgttcagcgccaatttgtactcattgagcacgagcttcgccgagtgctcggccaacacctcacgcctttctattattggaaataatgacaatacgtttaaaaatgggggggggggagtggatcggtctggccatttacgaaccgaaattaaggggcggtggtgccgataggctccgccggggcaaattatgttttcttaaacctttatggagcataaaaataaatctgcgacaaaatgctaaaaatcggcaaatggatcattttttctatgtttttcgcgttttaaattgctaaaaacgccatttaatgctttgacgccagccttggatttgtctagcgttttcattgtacaaaaagaaacctcttgtgatctttgggatttgcacatttatgacaatcccgtccacttgtggagtgacattttctgccatattttggatggcaattcgtgccggctttatcgcagcaggattgtctgcgaaattgagtacaattggtcccttaggtgtttttagggaaattcgcgcgaacttgaccagccgatgggtctgtaaggggagggggagggtaaaaagtgagcaaattttaaaacacaaattcgacaaaaaacaaaaatatatttggaaatgggactttcttttcgaattcggttctgggactcgaatccggaaaggatgcccagtaaaatctccaactggacacaactactatttttcaaaactttgtgaatggggatagtaacctttttaaataattccaaaacgttagtttattttttgtattcttgtgggtggtatagaaaaccctataacaaaacctcgccattgtccaatgttacagacaaatcctcataggcctttaggttgatgttgagagacaaatgcttaatgagcgcgttgttcagtgcgttgaaataaagttccatctccttgacggcttctgccacgatcttttgaggactcttcgacggatcactgaaaagtttaagatttttattacaacatatttttgataatttttgccatgaatccaaaaaagtatcaattttgcacgggaaaacaacatttagttttttgtgaattggtctgttaatatgcatcagcaaactgattagcaacatcaagctctgatgggggtttgaaaagcccaatttttgaaaaagaattattggattgaataaagtccagcgtaaattttaagagaaaaatttttttaaataaattagccctattttggttagggttcgaaaaagttcaggctacaaatgttgtttttggctgtggccacaaaatgccgggccgcaaaaaacagatcgcaacccagacacatgcgcatttgtccaaaatcagattcaaactaaaaaattttccaagtctgatagcctaaatatcattgaataagaaattgtagtcttctaattaattaggagcatttaattctgctgcttgaataattaaattaactgttaaaatatcagacaccaatcgctaatagggattgaaaaaaaaa

SEQ ID NO: 17885 - DNA, 821 bp, Heterodera glycines
aaagaaggagacgcgctcatttggacaccgcgtgccaatttgccggcggtgacgcaaagctatgaaaattttatgggctcagtgagtagcagggatgggccgaggtttcgcctttcgcattattcgcattttttggcgtttctcatttcgctttttggcgcgaaatgcgacttttacacccctaagaattggattaaattcccatgaaatttttcaaaattttacctataaattggctaattttcagtgaaaagctgtttataaatgatcaaaatttccaatttttttgcccgggggaaaaattaagaattttgaccctattttcattaaaaaaattctttattttgcggtttttctcaaaaaaccacaaaaagcctcattttgaaaatttagcctcattgacctatcaaaaaaccacaaaatgggctaaagcctcagatctgcgagccctgcacataaatatgcaaataaaaatgccaaatatgcatcaaacatgaacaaaaatatgattaaacctttttttgtccggtattcagtaattttttaactaaaatttcgttgttaaacataaagtataataacaactcatacacaggcaacgcgaacaatggcttagactaggcctaagcttttggcttaaaccaggcttagcttttttgtaaaatttttttatattagtaactttctgttgacatcattaagaaaaattataaaaagaagattctagcttatttttttaagtttctatttcaatttttttttcctttattttttatgggacgcgtaaactgttgttgggacgcgtaaaatgtgttgggacg

SEQ ID NO: 17886 - DNA, 3333 bp, Heterodera glycines
  unsure (1)..(3333): unsure at all n locations
atcaaatcacttcctcgtcaatgtacaaatgcttctgcttgtgcttctcctaattttgcttttcccttccgaatctcttcaggctgccagttttatcactttgcattgtcaagtatttacaaaaagcaattaataaaagttgcaaaaatgtgctttgccagggcaatggcttatacgtttcgggacgatggaatgaaaacggacagacggcggatttgccacttccatccgaactcacaatgcaacgattagctcgtctaattaagtgcttatttatctgttacatttgctttgaaggttcgtgtcgagaaaaaacaaagatggcaccgtttctttcatcagcaattccaatcgaatgcttttgacagttttgccaaatgcatttggacgcattgttttggctcagcataatcaaccgagtaatcattcaaactcctgctgatttgatgagtgccttttcccaattattcagctgatgggtccaccaaattcaaattaattccctacacggacggcacttacgcaattaaggtcaatttggaatgaataaagtcgaaaaacactgcccaaggtcaccaaattcaggcagcttccattggcaaatacttgagctgccgcaattacgcctatcagctgttcgccaaccgggaaaaggtggaggggcccttcgaaaggttttacttggacattgtgacgacattggcggaatttgtcaccgcaagagttccgctgaaattgcgacacttcaaggcacaaagaaaacatggataaaagagcaaaaagaaagataattcaagaaaaagggctaaatactgcgtttagaaggaaagaacaatttatttattataaaattacaaattcaaaaattaattttcttcaaagtataaacaaaaaaatgaatcgaatttctggtgccctccgattgacccctaattgtaaggaatacgtccacagcagatggacggcgtatatttgagcattgcgtccaagtcaagtcactttcgctgttttgacgcaaaatgtccaaaatctcattattaattttaaatgagataagtagagaaggagatttccgaatctgccgggccgggctgactttttcagaagcaaccggttaccgggcccggtctcccaaaaaccggtgaaaccggattttcaaattgccgggcccggaaccggtttggtaaaaatttaaattctcacatgtatttcaaccccaaaatcgacaaaaaccgtgtcaactgttaaatttcggctatatgtcacttcagtcgcaaaaaaaggcctcttcaatttataaatcataatttttcaaaataaaaattttaaagaattaattttttgaaatttttttttgattaattataaatttttttagaaaacctagtaaataattcacaaaattaaaaattttcttagatattcatggaaaaattttttacgattttttgaaatttctgtttgaaaattaaaaaaaaatttagaggaaaatgacagaggagataaataaagtgcgtggtgcatatcagggatggatggcattccgaggccccaaaaattttcggaaatcggaaattttgaaaaaattaaaatattcaaaaaaactagttatcatggggggtgggtccatcggtgcttatagacgccgccgggaaaattttttgttatttttaatgcgatttgttaagttttttcaaaaaattgttcaaattttgcgattttgagcaaatttttcaagaaaattaaggatttttaaggtacggcagtgccgataggcgccgccaggaaatctttggaaatttcggtgcaatttattaacagaaattgtataaaaacgaagattttttggctatatcataaaccggtaaaaaatgccggtttccggaccggtttgacattttcaaaaagaccggtttccgggcccggcctctcaaaaaccggtcaaaccggattttcccaaaaatcgccggaccggtttgccgggcccggtccgctctctataaaaacccgaaaaataggctgaaacagggggagcacccttatagataccaggatccaaatcttgggaccgtctcgnacaaaggaggggtcggcaagtgaccgtgggatttccaaatgaaatttggtgggtggatagatgacgcccaggttctattgtgaaattttgactatttttgccaaatgagcatgagtgccgagatatgacgtgccaaacttttttaatgaacaaacaaattaaataattatttgcaaccattcgcattgtcaaatggtgtagaggtaatgcgttagtaacagtcgcaccaggttcgaatccgctatatgcaattttttttttttaatttttttttttgctttttatgaaaagtcaattctcaaaagattagttttataaaaagactttatttttaattttactttttattttggtacatatgataataaaaaatatttttaattttactttcattttgatatgtacataagataataaaatatttaaaaaatacgacaggatatttattgcacctttatgtttaatgtagtaattttttgatttctaatggaaaaaaatttaaaataaaaaaaatcccacggtcacttgccgacccctcctttgtgagtgcacaacaaaaaaagctcggaattccttttttcgaccttttttttctgggaccagtaaagcgtacgattaccgtgtatctgttcttatttctaagaaatgtttgatttggggtagtgtcttattttcatttaaaagaggaaatttctgaaaaatttggctaattcctaacaaaattcattaaaaattcttaaaattttcccccagcggcgcctatcggcaccgccggctcccaaaactcctagtttttcttaaaaattagcccaagatcgcaaattttggtcattttttggacagaacttgttaacaaattgcattaaattttaaaaaaatttccctcggcggcgcctatcggcaccgccgaactctcttccctcacccatacccaaaaatttttcggaaaaatgcgccgaaaaaattgttaaaaatctgtttttttgattctaaatgcactgaaatttaccaattgcttatgtttcgataaatgttaaaatcttataattgattttcggaaatgtataaatttctcatttctaagccgaaattgctcagaaaatagttggcggtgagtaatgcttgattttgttgaataaaaaagcgattcaaagttttggaagcgtgttttaaaaaatgtccttatttttgaccctaaaatcttatttttgaccagcgatgctcttatttcgggaaattttcaagggtaaccctgt

SEQ ID NO: 17887 - DNA, 1453 bp, Heterodera glycines
  unsure (1)..(1453): unsure at all n locations
tccgatcttctaattaanaatgataatntgatntaatggcaagggatgaaaagagagtaaaatgaaccgaccataccaagancattgagaaatgcaccggagaaagggtgaatntaaaaaaaggattggggtcgaaaaggaataaccaaaaccagtggctatacgacgaataaaagtaacaaaagcagtggaggcaatgtccaagaggcataccccattccgacccccggacgcgagttccaaccgccgtaaccgccgctaggacagcattcgtagccacaacattgctaaaggaggggggaggggtaattagcggtcaattaagaaaaggtttgtccgtgcctcgttgtagttgcacgaccagacaatctctttgggccgcgactgtcctcccggcagaaacacgttgccaaactgcgggtccgagggatcaaccggcattcggcacatcgtccgaccggaagacattccgcctccggggtaatactgggaaccccagtagtaattgcgaccgccccagctgaaagacagtgagaatgagcagaatgacaagtaaatattgcatttaatggtgaacaatcactcggaaaataacagttttggtgaatgactcactgcatcggcgaagcaaccgaacgaatgatggctttgcccgcctcgtaagcaataaccccggcggcggcaccgataatcatatttttgaaggtattgccgcgtgactgtgagccgactccactccctcgggaaaaactaaaaacaaagacacttaaaattggaagcataattaaatagataaattcaagcataaaataatcttttagaaaatttaatgagctacaaaagaaaacaaaatgatcgctttgggtgtaatccaaggaagaatcacgttggaaaacgaccaacaattggattttaaaaattaaaaaagaatttttgacccaaaaggggactaaattgcactaatgtcatgccaagccctggcccgtcttgcctgggcgttcggtatgccgatcctccgtgtgtgcctttgctaaatgtgttggaaaatccgcctccgccagtctgtccataattcggtttcggtgccgtccagctaccgccggaaccaccaccacttcgactgttgccactgccgccgaacagcccaccgccacggctggccgaactcgcgcgagccgcagacccacccctaaaaaaccaaaataaagaagtagaccaaatgtaaagggtcaaatagtgcacctgccaaagccacctcctcctctgaacggaaaaagagaaagaattagtgttgcatttttagaataatgccgaaccttgcgcctcctcccccgccacgctttccaacgatttcgaccgaacagagcaaaaggaaaaggaaaatcactttgtactgttcgttttgcattttgggtagaaagaattaatatattcgtctctatcaattacacat

SEQ ID NO: 17888 - DNA, 1400 bp, Heterodera glycines
  unsure (1)..(1400): unsure at all n locations
tttggggtgttccaattttaggccatttccaattttgttctcccaatttaggcactttacgctcgcgtgttggaccgtcagggcaatttcacggaggcggcgcagcgttaccacgagctgtcgctgaagcccggactgattccttcggagaagcgccaagtgctgcaaaatgcgctcacctgcactttgctcgctgcgcccggtccgtatttttttgggcattgcgagactggtcaataaaatgcttcacccctcttatttattatttagttgtatgactgaattttcagtttttttcataagttcgcttttccctaagggacccaacgcaatcggttgctcaacactttgttcaaggacgaacgctgtcagcagttggtcggccattccctgctgaagaatatgtatttggaacggctcgtcaaagggcccgaggtgagaattttttaaatttcaaactttgaaaattttcaataaaatgtcttattgtttaaaattttttaagactttcaagaaaaaatttttttattttctagcaatttttggaaatcaccataaattaattttcaaaaaagaaacgctacaaactaattttcttgaaaaattaaaacaatacgttttagtttttaaattaggttgcgagtttttttgtggcatggcttgaaatacacgcccatttgaatttggcactttcagctgactgagttcgaactctctctgtgcccccatcagcgtctgctcgacgccgagggcgtctcaattttgcagcgttcggtcctcgaacacaacattttggccgcctcgcgactgtacgccaacatttcattcgacggattgggacaacttttgggcattcctgcggcaaaagtgatttagaaaaatggaaaatgaacgccaaacggccaacgaatgaaataatttaaggcggagaaagtggccactcaaatgatttccggggagaaagtccaaggggcgattgaccaattggagcggacggtttcattcgaaggtaaaatgccggaaaagtggcgaaaatggcactagcaaaacttttgattttttcattcatatattttgccttaaagttttcttgaaaatggccatttaacctaacaaattattacgcactcttttcaagtgcccgattcgtccaacggtggcgccgattcgcaaattgcttctatctgtgagttggttgcttcgatcaacgagaaattggctactcgcttctcggagtggcacaccgaacgattcaacgcgtacaaaagagcacaccaacagcccaatgatcccatgcaatagtgattattatttattacggtgccatttgttttgttcggcttatttatccaataaaaagaccgatttatttattttttcaaattctnntgtggatttat

SEQ ID NO: 17889 - DNA, 1077 bp, Heterodera glycines
  unsure (1)..(1077): unsure at all n locations
catgtttagaagcatttcaaagctattgcttcgcgataaaacaattaccaaaaagttatacattaaaatttcaaaaaagtcgaaatttttgaagttttttcttaataaattttcttataggctataaaattttttcgctttttataaagttaatagagcatgtaaaaagcttttgaatgataccaatgatgttggattttgttgacaaagaaaaaaagttatagtccaaaaattgcacgggcccaactgagcgagtccgaattttactgttaatcgagttttttaattattattagttttatctatctgttcactacgattttacattgaaaagggtgtaaaatggaacttaggcaatttttattatttttttttgaatttttccatataaattggccaacctttgccctttcttttgtgctcggttcgactggcgcaccaattgcagaaaaaacggcagaataaaaaatggcgagcgaactcagagccaaacaatttgtccgcattttattttttaattatatttaaaaaggataaataattattattttggtttttccaattcaatttaaatgggaatatttttgttaatggaaaacgatggaaagttacctaattgtgtttatcaaaacatcactactgattcgcattggtgctcaattaggcgaatactttctgtcctttttgtttattattttgtgctccttcgttaattccggttataattacataattatcaactaatttctataacccaagtcacttgcatttcaatcaatttttggcaaattaaaaagagcacaccttcttttttgaaaaatggtagaattcaaagaatgaatgatttaacgaaattctttaaaaagagcattagaataaatttttatgagtttaaactagagatcgtatacggaccggatccgtatacggatttttacggatccgagtccgtaatccgcatttttttgngtcgatacggatttttatggactacggattttccaaatttttagtcgcatcctgatcctgacccgtataaattatgataggattaccgaatattttttctgtacattt

SEQ ID NO: 17890 - DNA, 2445 bp, Heterodera glycines
  unsure (1)..(2445): unsure at all n locations
tagtcgccatttgtcanatcctcttcaagcgacttccactnttgtgccaccattaggctgagattgccaccgatgctttttcttatcttttcaatcacattgcttacggtgtgccatttttgcacctctaatttgagcgtcacttcttccttttgatcgagatccaagttcaaaatgatttctttaaaataaaagggacagaaattcatttattaaatattaaaaaggcccataaaataaaacatttaatttgaaattcattcgttgccgaattgcgcccttttacttaaactctgctcgatattcaaactcgaacttcctggtttttcaagatcttattcaagaaatccctaattactctgtcataagcattaaattcggaccataagtgatcggtggttggctcagcaacagtacaacaacagctcccttcagaatttggtgttgtgccaacgtttcgtcgtccctcagccgcttctccttaaacagcagcgtttgctcaatcatcggaatgtcctcaatttcttgcattttcttcattatgtaatgagtggtgttccattctttcactctcattttgatacgtttttgtcccaatagaattatcgtaatttctaaatatgtacagtaattaacaatcattggcttaattactaattgaacaagtgcacatggaattgtgcatgaacaaagaaattttaagatttactggctaacattgacaagaactgtgccgagtaaagaagttaaaagccaatatttatgcactacgcagtgggatagaggatttgacatttgcagatctgagatttgagggtaaccccgaatttgagattccgaaatactgagaacacgacatttggggatccgccttttgagaacctgtcatttgaggacccgaaattttcggactttgcttcatctgtttgttgcgtttatatttaatctgattggttaatttgaatcattttctctaattcaaatataaatttactataattaaagctaactgttgaatcggctgtgacacgaaaatcggagacagatatgggttatttgatgtcctcaaatgtcgggggtcctcaaataatcaaatacttaaatgtccggtagtcgtccactcagtttattccctgtgctaacgttcgattgcttaccaaaagaacgcgcttctttcggctcctccacttcgagacggacttcttgccatttgtaaaaaatattaatgatgccgtagtcggacaatgtttttcgcttatccagaagtcgtcccccataaaagagcctttggtatcggttcggaatgcccgtcttggcctcgattatccactggacattctgaacggtatccgacgcatcaatcttcaagccaattgtttttccgtttgtatttttcacttttattttgtattcctttcttaattatgacaaaaattagcatggaatattaaattagatttaattatatcattattttccccgtttaactattatctgtgaatttatgaacgagatatagaagcttgaggggaaactatgtgacgggttagatttgaaccggcttctctggctttccggaccagtgttctaccagctgaactgccgaccctgactcttcagatatatcaattggttttaatctatcattaagcatcctcttggaaaaactgttcttctctatctgaccttgaaagggaaatccacggcacaaggaaaagcacaaagtcattttctcggctgttgtacttgaaaataggcatttccgccctgagcagaactcctcggaagaacaaccgttgttctgcgatcggaataccctgctgctcgtggactttctccataatgtttttaacggtgtccgatctgtgcatttcgtaagtgatcagtttgttgtccttcgttttcacgtttcaaatccaaaaaatgtaaaactgcattgaatttataattgttctataattatttttctattttacaatgcattgaataagtcatcggtcagcagatcaaatcgaattggaaaattctgttcctttgttgtctcttcattcataattaattatccatcggcgttctttgtttctgctcaattcgccgccaaattaacagtggacgcaaaagaggccaaaacgtacaaaatggcagtcagcgcacaaagaatcatcagactgatgatgtttaattttatatgatttaaacatttattataaatgattttaattactcaatttcctttttgcctaattatcagagctgaacattttgaaaaaagcctggcacctgctgtacttgtacccgaattccccgactgagcttacctgtttttctattaaaaaaatgaattatgccaaaacagacaatgattttacacaattttccataaaagagaaaaatgtcattgttatataaataatttatcaaattaaatttaaattttttgtctcc

SEQ ID NO: 17891 - DNA, 2900 bp, Heterodera glycines
ctctccacggcaattaattcgatcattaattaattatcatttataatattgcctatttaatttgagttcatttcttggctctttcatttgcttttttctcacttttcatggcctttttccaggctcaccggccaatgtcagcattttgagtgccgatcagagaaaggtcattttgaggggactgagcccaaaggccgtctatcgctttcgaatccaagtccattttttaaattatttattttaattttgatttattgtgcgtttttttttttttgattttaggctgtcacctctcttggccttggtgccgaactcgtggagtatttcagcacggggcatttggccaaagaattggcccgccaaaaaatggaacccattggcaacagtgaccaagtggcatttccccctctttaaatttcaatttttttgatgcttttcaattcaagtccgatttgtccgtcctcgtcgggcactttccccattcggtcgaattgccgtgggactcttccgcccgtaaggcatcgctcggccacggcttttgcctttggttggcttttgcgtggacagcaattgcaatttgcagaatatttggcgaattcagcggccgatagcataatgaattaacaattaatttatgtgattttgttgtattatttgcacaaatatgggtattattatttcattttatttttaatctatattattgtattaaaatattaataaaattaattaaaatattgtgaatcattcacttttcaacaaatttttaatgacataattggcatggcaattaactaattatttgttaataaaattaatgaaaaaagaaatgggcagaaaaaagaaagaatttgaaaaaatgagttgggtcgtataattgtcaaaatgaaataatcttcgcctgtcctaaattaagaggcaaaaaccaatcattcaacaatttccatgcccaattaattcaatccgacgatccgttggcaaattgaaattgttttacctctccaacccatgtgatatgcccccaactcacccccttctcattccccccccatcattcacctcaccattttcatcccatccaaataattaattttgttcatagaatcttaccatttattggttacataatgtcggttaagaatgaaaaatgccataaaaacaaaagaaaatgccgtaatttttcataaaagcaaccatttcaaacattgttcgtatcagttgacagttctctgttgtctcagactgcaaaattaaatttcacggtaatttaactactccaaaatcttaaatttattaattgtttgtttaaaaaattcgtcgcgagtgtccgtcttttttttccatatttcgctgtcgcatcaatggcattttttcagacttccttccattttgccttgttttttctttcctctttccttctgtttatttgctttttcttccgttttcattttacagtatcctccctgtcaccgtatctaataccatctccgtccgccgtgccactctccgcttgcaatgcctttgatcggcgcctcctccaccggctccttctcctcctccttctcctcctacttctccccccgcgtccgttctccgttcgtccctctccgtccccgcgcccgtcgtctgcccaacgaattgcttactgagttggccactttcgcgcactacgactttcttgagctgagtcgcgccgcaaattcgcgtctgcgcggactctaccggccgattttacagcgaaaggacgcgaaggtgggaatataaaaggaaagaaaaagcggaagatatttccaatattcattgtatggctttaatttgccatcatcactttcagttgtgcgcgttgttcttcgacgacgtccgttcgttgtccctttggtttaaaaattgggctgtccgttccgacgctttgcgaaagtttgtcaatctccgcgccaccgtggacagcaaatggtgtgaggaggcgatgcagacgaagcccgacctttgggcggtgaatcgggcgcgagtgacttcccgcggactgatcgccgacctgcgcgagttgcggaaattaaccgacgaactcatcgccaccacccataaagtgggaatacaggcgcagatgaatagcctcgaaaattcaattcgattttcgttttccgatctctgccgagggtcgtctgatgcaaagtgccgccgccgtttccgcgccgcgcgattggctccgcgtgttcggcctcggctcctcttcctccgtccgtttccattctcagaggtcacttctcatcgccaaatcgttggcggtgcccaaaacggtggtggaccggtggctgaacaaagacttgccgagtctgaaggctttggtgcgcgggttggtccaactgttgcgcgacgacttcaaagacgagtccatcacgtgccaaagtcgtaagtttcggattccgatcttttttacgttttcttgattaatgattaaatcgcttttcagagtacaccggctgtatcaacgttctcaaaacgtgcgacactcgtctgaaagttcttatcgcttctctgaagtgatcgaccgctcggcggttgcttacaatgatttttgacttttaacttttacataaatgcttttaccttcttttttttattttatcatcgtttttcagtttcgcttatgccattcgttcataacataacataaagcttgttttttgaatatcctctcgtacgaaaacgacctggccccaaacttgctactgggataacttttgggcccttttccatttaattttcgttcgcgtctttcaaaaaatttgaatggaaatggtatgtagaagttagagaaaaggaaaactatagagagagatgaaaaaggaagcgagagatgaggtagaacgaagattcagaaagaaaggtgaggtagacag

SEQ ID NO: 17892 - DNA, 2182 bp, Heterodera glycines
ggaaattcctgcaattattaattgtgtatttatggtcgtcggtttcgcttttcggcaatttttccatttttttcatttcctcacattattaaaagccttttccatctcaacgatctgataaatgagccttctttttctcgtcaatcgtcatcgtttatacagtcatcatttgtgatctccttgttcatcatcgcagtggtgcgaaaagggaagaagtgcgaaaaataaagaaggaaatagtactctgtctgactgtctggttacgcttttgaaaaatttgatcaaaaatgtggtgccaaaccaaattagtaccgaaattcgagcattattgttttctatcggtatgcaagacgcagatttaacatagtgaaacaaagctacacagagaaagtaagtgttgctttctgagttgagttgacccatagcctaacgaatttattgtatgttcaatcaagacaaaaaagtttcgtaataggcaattttgtcataatgtctggcacaaataaatttcaaaaatattttttttttttttgcttgattcaaattttacaaatcccatccctggttaggtatgtcatcctcttcgattgttcacaccgaccagtgggattattttgtcaaggaacgaaatgacgcagtcgcaaaattctcagacccaccaaccaatttaattattcggtgttttattttcttaaaattaaaaataagaatcccgactttttaagcctggacaaactaattaacgacttccaacaacagaatactgaatggagtagcagaaaaggtacgcaaaagtgaaagaaatgcaaaatttgcaacgccaaaaccatagaatttgaaaagcatgtcgtgccatggtccgaaagcaaaagtgacaattgtgagctttgcaaaatacgctttacaattactcgacgaaggcaccgtaagtttttggctttgtgtaatttttgtaagaaatttttatagattgtcgcttgtgcggtgcccaactttgtgcttcatgctcccaatttttgactatcaaatcagcgcgtgagtttggtgaccatttctgataaaatgtttggcgctagttaaaaagagcgctcttttgaaaattttttcactttttttgagacttttttttttgtttattttacatataatgatgaatattaagcattaacagcacaattatggcgaataaaagtataattatggcgaagaagatcacagaaagcattaataatagtttttcctttagccctagcattaagtcgaaaaatttgttcacacatgtatgaattcgttaaatttgtactggttccatgaattcttttcgtcttttgctttaattgagcccagagtccttcacatttattcgtgttgacgttgaattcggtgccgtcagggagaatgacaatgcactactccatttggtttttgataagtccatgataagccagaaattgaagaatttcctcagaatcctgcttgtaaatccaacgtaaattgatttcgtccaaagaaggtggccgaaccggcagattgttgtaatcaattattaaataacgtgaaatacataccatctggtaaaaaaacaaattctgcatcaaaataaacaaaaaaaaaatagaccaaaaaaaagtgaaaaaattttcaaaacgccacgctttgcaagtagcgccaatttttctaatggaaattaaatgcaacgaaatggaaacccaaaatggtaattattaatgttaaattaaaattacaattcaaacttccaaatgccttttttgctgctgattttctgtcttttaatcaattgtggcaaaatttatcaacgaatttttatgccatgggaaaaatgaaattggaaaaatattccaattttatatgaaaaagcagaaaaaatgcgaaaagaattttgtgaggaattgttggaagggaaaaagtattgaaaaagcaacgcaaaaggtgagaaaaacggcaataaaattggcaaaagaattggaaaatgataaagtattaaagaaaacattcaaaaggcattgaaaaataaaaacgaaaaaatattattggatgatgcaaaattagttgagttgaaagaagaattagttaaaaattattcggaagaaaatttgaataaactaaagacccttttttacttgaaactccatgaattttttgcatcaattaaaggcaatta

SEQ ID NO: 17893 - DNA, 3727 bp, Heterodera glycines
  unsure (1)..(3727): unsure at all n locations
cagtgaaattaaaaaaaaagtttacaaattatttaagcttacagaaatagatattntgtgaaattcacaattgatccttcttccacatggcaaaccaattaatccgaaacaattggtcgcatcgtagccaacctaagaaggcgatcggacaaaatggaaatttggttcccaaacgaatattcgggaaaaatccctcattttataattttttgtattttttagcagtaaaagtcgctaatttttcattttattcttagttaattaaaatgttttttatttgtatcaaaattattttatattacaattttctaatataaaaacgtttgaagaaatttaagcattattgtaaagttcaataaaagatgtgaactcacacttagacgagtgtctcgtactcaaccaccgattgtgaggaataaatgggaacgcgcgagttcgtgccgttggatgaggagggcgaacggcgtcggccgagaaaggacaaacgaaaattgaattgagtgcctttattcaacgctcgaaacaatgcgaggaacaaaaaagaggcaataattccgctaaaaatggccagaagaactaacacttgcagcatgggaaaaacgactcgaggcggaagggacttgtaaaatatcttggtgctatgtcgtacggttggcataattcccatgtcgaacgacaatgcaattttttgggcactttttttaataagatgattagcctaaaagacaaaaaggagttagtttttcaggcttttagaaagcacttacggctagtgataatttttttaggctctaaaaaccgccaaaaaggattttcgtgcaggtatacataaaaaaaacccgttttgaggatttgtatcaaaaaatcaacataaaacaccaaagcagagttgggagcccatttaaagccagcaccaaaaatttcttcaaaattgatatattttatttttgacgattttttaatttacttcaaaatttttccgaaattttaaaaatgccgcaatcccgtgcgggatccagcaaattttaaatgggcgattgcgggatttatctttcgggatcccgtcccgcaaagttttgagttccaaaccgcagcgggacgcgcaaattttaaattttcttgatagagattagaacattttaattaccaagattcaacccctcaaaatcagtagaaaataattcgaaaattctcacattttgctgaaagttgtccaaggctccgtgattttggtcaccaattgataaaaagccaaaaacggagttcaaagagattgtaaaaaaagcaaaatagttccaaatcatttcggaaatattgttaataatttactaaaaaatatttgtttactttatatttgaatttcatttttaaaaatgagcaaaatgaaagtgaaaaccatttttagtgatttagcataatatttttagctgattcatcgccagattttcatataataataaatactcatttaattcgttggccttttctaaaaacggtttccaaaaaagaatgaaatatacaaacgatgctcatttatttgcatagaaattgacatttctgttgaaataaaattttaacttttcaaatccttcttttgataatcgcccatctggaagagtaatgatgatcagtcagtgcctaaacggaaataaaattatttttcgactttctggaaatcaaagaaatttttaaattggtatcattttgaaggctatgagtagggctgggcagagtaagttagttgaaggaatcaaattccgacaggggttttccattattttccgtactttctgtgctagaattctctaacaaacaagcgcaagaatagtactcccaggaatacggtagtttggtaaccaaatatttctaccttttctcgtattattcaatcaaagacccattaattaggtcgtgggttcgagtcccaccgggcgagtcactttaggttctacatcgatataatttatcctgggtgaaataatgccaattgaatgaaaccaagtttttactcttttcaatagtcaccctgagagccctaaccgatctttacgaaattcatcggtaaagttaaccaatttagctggttctaaaaatatcagtagggcagtgaatataaaggaatatatgtagtacaattccactaatagtattcatacatgaaagcagtttcgaaaaattcagaaatagaaaaaatatacattaaattaatggttttttccgtattttcaaaatattttttcactcttctgacccaattcttaacaatgaattaaattctcacttttcgcgctaaaatgcgaaaatgagaaacaaaaaggcgagaagagcaactcctgaaacaatttgtacaacaactgactcggtgagaacaattgattaattatgtcattagtattcgcaaaacatttagagaaagagagagaaaaagtcaaaagactctcgtcaattatttacaaataaatatttacggattggcaagcactaaaaaagaacataaaccacttgccgcacggtgctatgtcgttatttatttttattaaaaaattatgtggattatttgttgttgtttaaaagtagttttttacattacatattaactcaaggaccttgagatagatgaagtttggcttaattattaaaatcagaaaaatacttcaaaccctgtccctatttggcttcaacaatctttaaaatcaaaaataaaatttctataacccaaaaaaggaaacgaacccatttcgttctttagattttcaaaaaaaaaattaattttttttaaacacttatcaagcaactaatgaatgactaatgttgaagcctaatgatggtgatgctaataaggttcatttgctgctttttgtggttcggtggtgggaaaaacagtagcaacaacagaagcacaaaaaaccgattatcatcatcatcatcacattttctcataaggtcacacacattcagcattcatcaccaaaagcatcaaaggctaaatcgatttgtatcatcatcatacataattaggtaaataataattatgtaatttggctaattgtcccgcaagaatgtgtcattatctcgtatatttttagggggtttcgaggtcgatgaaaacagttacgccatccttttgacctataaaaaacaagaaatcgaacaaaatgaatttagtaatagtacggatcgtaccccactttttcgaaaaaatgtatttctcgagagtcgacacaatgatagtcatgatcccaaacgagagacttgggaacacaaaaaaaaaaactctggacttttctcaagaaccgagaccgatactttcgagcacagcacagggatgtcaatttaccctttgattttctccgcttaaccaaccacaaatttcctttctactacgcacatatgcatgcattatgtaaatgtgtgagtgagtgccgttgtggaaagataaaataattttggatggcaaatgccgtcgtcccgtgccgtgtgccgttggcacaaatttcacacaacggcagtcagcagaacattagagggcaaagaggaagtttttcttatttctttttctattcactccgcaaataatttttttttttcaaaattaattatttcactcattttcttttcttttccgggcaattttagtgcgtggcacttttagctttacactnnccnnntnncncnttcttggctttttagagatcccctccaaaacctccctcacccaagttccaaa

SEQ ID NO: 17894 - DNA, 2883 bp, Heterodera glycines
tctcgagaaaatttcgcggctcgaacagcactaccagcaggtacaggtcgaactcaatatgtgcttaccctttattgagcagcttgccgcaaaacaataatggtgatcttttttgcaaactccaatgtcgataatgcattttttgctggccgaatggatcatgccaatcttgcacattggcacttaacaaaattcatttttattttattatttcgtgttattctgatgccagaatttgaatggaatacctgaatttttgtgggaaaatttattcttactctataagccgagaaaattttttttgtttgggaaattctttcaaaatgagcagagaagcgataatttccgttttgaattatttaaatatttcacgctttttttggtcttaaataataattgtttaatatttttatgtcaaatggaaaattaattttttttttcatattcatttttgaattttgagggttttgaatcaatcacaaaaaaaaacccaaaatttttctttacaaaatgaaaaaataggtattatgcgtgaaacatttaccaagaatgaatgctgaaattgaattttgaggggtccactgcgtttcggcgccagcatgtttttggctataacttttttctacctaatccaaatccaatattgttgatatcattcgaaagcttaacatgtttagaagctttttctaagcgattgcttcgcgattagacaattaccaaaaaagttatacatgaaaatttcgaaaagtcgaaatttttgaagttttttcttaataaaattttttacaggcttgaaaatctatccgctttttgtaaggctaatagagcatgataagagctttcgaatgataccaacaatcttggatttggatgccaaagaaaaaagcttaagtggaaaaacgagctgcgccgaaacgccagcgccaaaacaccggcgccgaaacgcgtgggtcccgcatggaaatgggtcgatcccgaaaaaaacgtacaactgagtacctaagtcccggttttcccagccaaaaagtcccggtttttctcaaacttcccggtaccgtacaactctagttattcccatcacatcacccacttttcagtcctatttaaaattttagttggacactgcattgctaatattgtcaaaaatattcctttattttgaaaatattcaatgaaaactcatttgattaaaataaataaccaaagaaattggacgaattgaaaatgcaaaggcaaagaaaatggagagatcggtggggggatcaaaaacattttcaatgcgcttacaaaaaaaagaaaggcaaagtgcgcaccaacggagggagaaaatcaaaagcaaaatgagaaataaaacgcactcaaccaaaaagaaagtgagggaaaagacaaaaaataatgtgatcatccggagcaagaaattcatccattttcagaaattgaataaaaccgcgtcagaagcaacactgaagaaaaaaggaattaaaatttgcaaaataatgcaaactgtgtctatttccctgccccaacacctttaaattcagcaaaaacagtccaaacctcaagatttctgttgtgcaacaaaggacaccttaatgagaggcccattcagctgaaaggcgtgattcggcggcattttctatcatttaacagccaatttataggaaaatttaagcaaagcaaaacctctccggtggggtatttgttcaataagtaatccttctgcccgtcttggcgcatttccatggtcatggttccattggcgccacaactaatggagaattgctcgaggctgaactcgcattgaacgcgcacttggtaaatgttgtcgagacgatcctaaacaagaattattgcaataattgaagaaaagcaagagagagagagaacagagggaaaagtgggagaggagaaaaaaagaggggaaagacctaaacttttgaactaaccgattgcaatttgcgaatccaactcgtggcaaattcacgacttcggggtcgaatgagcaacttttttgagctttttttcgcctttttgccggtcaaccattttgtcaatgctttactttcaatcgaagtgatgtccaaaatagtgaaattgagctcctgaaaagatgaattttagctattcaaaaattcgaataaaattgacaccaaatgcaattcgtcgattcgttcgcacgcggaggactgaagcagctgcagatggtcgccggtcatttggagaaaacggcagttgctgaacagtgcagacgaaatcgcagtcagatttttaccgccaacaactgaaaaacatagaattaatattaggcgtttaatgatttaaacatacgacagtctccagggaggcacaacaccgaggcaccttttccggataagaatttggctgcgttaccaagaaacaatgccacttcgttggtcaattcactttcttcaagtccacctattacgatgatctcataaaggtccgaaactgaagaaatgccttcctaaattaagaaaattataaaactaaaattttttataaaaaaggtactttgattgtaagcttggatacttggccattgaccttcgcttttacttccacagtaagtgggccagtctccctaaatttaagctaacaatcaatcaccaaagattcacttgttaattcattttttactcggccctactgccaattcataaaatatgcaaaaaatttaaaagcacaaagaaaacttaaacaaacacacacttcttttgtttggatggtggtggttcatggtcttcatatccattttgccggacgttttcgtgaatcataacctccttaaaacatgaaatttaactttataagaaatataatagaaaattatatacctccctgattgccatcatcgtaacttct

SEQ ID NO: 17895 - DNA, 2698 bp, Heterodera glycines
ttgtacctcttctgatcacagttgtacctcttcttatcactcttctaatcactgttgtacctcttctaatcactgttgtacctcttttaatcactgttgtacctctcctaatcactgttgtacctcttttaatcactgttgtacctcttctaatcattttgtacctcttctaatcacttttgtacctcttctaatcacttttgtacctcttctaatcacttttgtacctcttctaatcacttttgtaccttttctaattactgttgtacctcttctaatcacagttgtacctcttctgatcactgttgtacctcttctgatcactgttgtacctcttttatcacttttgtacctctttctgaggccgcgaagcggccgaaaaggcccaactaaatttaaaaacgggcgcgaagcgcccgtctgaacttaacaaatttaaaaaacgggcgcgaagcgcccgtcaaagcaaaacaaaatatgaaaaacgggcgcgaagcgcacgtccgatctcaacaagtttaaaaacgggcgcgaagcgcccgtctgaggccgcgaagcggccgaaaaggcccaactaaatttaaaaattggcgcaaagcgcccgtctgagctcaacaaattaaaaaacgggcgcggagcgcccgtcagagcaaaacaacatttgaaaaacgggcgcgaagcgcccgtactatgccgcgaagcgggcgaaaaggcccaacaaaatttaaaaacgggcgcgaagcgcccgtcttgagcctcgatgtggactaaaaacccctaataattttttaaaaattcaaaaaaatcactccaaccaattcgatcaatttgaatcgcttcacagcctaggtagcgaagctcaagaagcgcgaagcgctttatcccaagcccagatccgacggttcacgcacccgctagttatatatatgttatataggttttgagtttcgtttcaaaaaacaaaatctcccggccgaaggccgggagtgccctgaaagtggtggaagggccttacaactttttgaggcgcatctgggaaaactataggtttttttctccgagggccaactgagtcccggcggctaatttctcacttttgcttgcgtttgatggcccataactttttttggaaaactcgaatcaaaaaatgttcgctgtgagggggctaagttgaagtgttttctaaaaaacaaaaaaaattccaggcttctacctataataggaagggctgcagaaaaatggagaaattcagtaccaactttgtccacttcagtcccaggcgaataactcgccagggtttgaactgagcgagggggtaccagcagacttattgtagagttcaatgagctggatttttccagtttttaaaatttggaaaattttcaaaatttttcgagctaggcctaaaaaacggttttcgggtttttgaattttaggaatttttaacgaattttcccagaaaaacggagaccacttccaaaacatcatttttcgagttctatcgactggtatttttttcggaaaaatttcgattttttcccggaaatagaaaaaaaatttggcctgagcgggacatttgagtcccaggtccataactcgtcaggggttgattttagcgaaaaattgtcttagaacatttttgtagagctttttaagctctatcgaacggtgtactacatgatgtaaaattttcaaaaattttcgagctaggccccctagaaattttcggaaatttttttttggacgaaaatgggggtgaaaaatatttttctggggtaaaataaggtgctgagtacgaatatgatgtctattttaagtttcataatttttggaattttttaaaaattcattatttttcgggaaatttttcggccctcagagattttcgggttaaattttgaaaattcataacaaatcgaagggttgatcatttttacagtaataaagccttaaaaatagagaaaaatcgggagaattttatgagatttatttggttttataatgttcaaaagaaaaaaagttattccagaatttctggaaattttcgatttttcagaaaaaaattcataactcggttctgaaaagtcatactgtaaaagtaaaatactaaaaaaatccgcaattttttactctattatataaattttatttggtagttttatcacttctttaaaaaaagatataaaaataaaagtgattttgtgcttcgggtccaaaggggggtgaccaggatttttgactggaaaattttttttcacaaaaatcttccaaaaacatgtcattatggctatttgagggtgctgatcacgaatacatgatcagatttcactttttgacatagtcaagacctcagaatccctgtgtgattggggattctgaggcatcatttttgggggggggggggggggggggggggaagttcgaatccggacggggaacattatattaattagatattgtttggtaattaaatgttttaatataaaattaatttcttatttatttttaaataaaagaaggaatttattttataatttttaaaaaattattaacacattcaatttttaattatatttttttataaaaccatttccttatttatttaattttgaaaccatattttacccttttaaactattattgtaccattcctacaatttttgagcctactaataacttctggactcttcgaatcact

SEQ ID NO: 17896 - DNA, 2585 bp, Heterodera glycines
gaaaaatgaaaaaaaaaacgaaaaatacacccctaaagatcaacttttggaaagttttgaaaaattacaccccacaaaacacgaaaaatttgagttttcgtcgtcattttggcattttcaataaatattttcgtcatttttttgcgaacatttcttttttttaatgagaattttttcgaaatttggcaaacttggaggtgtttttgatacaacgaacaacaataaaaaatatgcatttttaagttttaaaccccattttttggttgtttattgtactttttaggtttatttaagcaaatattaaatatgcacaccttttttgagatttttgggggtttacaacatatattttggcattttttatccatattttggtccatatttggccatttttggcctttttagtccatatttcgggcttttttagtccatatttaatgtccatatttcgcgttttttagtccatataatttacaaccctaattattacaaagccaattataaaaacaaaatttatttcaaaataaaaaaatgtgtcaataaaaaaaacacccgtaaacatttgttaagtaagagctctcaaaatgttgcgcagattttcaggcatcaatttcaaaaaaaaaaaaaatcagaattttttccgtctcgtcttgtgcacgaagccgttgccgttggtggtggcgctcacgctcagttggttgcggtggagtggctggcgctgaaactggcgattcggactgaacaggcgagcctgggccgccagctcctggttggacgggctgtgaaaacacacaaatgcatggagtggggaataagaagcggccgcattggcatttgaaagcattgggttgtgccgggacgggccggaacccaatctcgacaaattgggcgggatttgtctaaaaatttttttggagacctgattttttggcctcctgattttttcaaatgaaatcccgatcaagatacgatggaaaaaaccaaattgactaatccgaatcatgtccaatttgcacccccaaaaaatggcaatccaattttttttaaatccaatcccgatctcgtttggagataatcacttccttcccgctttttctgctgatcccggtaaattcccagtcagcagcaggtggtgggcgccgtcggaaaaattgaaaaaaatttaacgaatttcatcaaatgtttttttgccgcttttttttaccttccatgcctattttggcacgatgaaaatttgaaattgctcactccacctgtaagtgccttcgttggcacgctttcgccgtgcacagatcacgaagaagtagagcagtgcgaccaggcaaacgcacagcacaatcagcacaacaccggcaccaacaaaattggacagggacaactgatgctggggttccacctgtaaaaaattgcaaaattctaatttttaaaagaatttttttttttttttggaaaaattttggaatttggttgcatttgacgagaagcttactgtactgggtcaagtatctcggaaagaagcttgtaaatctcagttgattggtcaattatttcaaaaacttaagagcgtccctgcccccctcctgcccttaaatgaaaaatttacttatgaattgggtaaagaattttttgtttttttaaatttggagcaacaattaattgactttgggaacctaattattaacagcgggtactgtagccccctatatgttctcaattagcctgggtaatattgagaaaatttcgctgattctcaacaaaaataaggccaaaaatgttatgctgaaaactaattttggaagttttttgatcataacttttttgaaactcagtgaaatttttcaaaattttgtatgttaatatagaacatatagggctatcaaatattaataaaatggttcaatttggataaccatccatgaaaggagttatttatactcaaaaactggactaaagttttcataccaaatgcatgcacagctcgccagtgaagccttccatgcactcgcattcgtgttgaacaaactgagaaattcaaaaaaattaataaaattgttaccgatcactaaaaactacttagcagagtgatcagagctagttagcttgtcaagacagatcagtaagcctatgcaaatcacagcgatcagcaggataaaggccataaaactcgattagaccaagaaaaatagagtgctgatcagtccgttcacctaatcagaaactgatcgctactgatcatcaagctaatactagtgatcaggggatcaacgagaatttgatcgcaacacatctagtattatttgagtcagttggtgaatcagtaattgagatccaggggcgtatcaagaaaatttttcgggggggggggacccgacccgaagacctttgttttctcttttttttgctcttcaactgaagatttttttttgtttgcccaataaaaaaacttttttttcccgctgctgggtgaaaaatgcactttttcactaaaaattacccaattttggccgttttaaggcaaaaaacgtgtcaacatagtggaaaatggaggtccggcggtgccgataggcgcggccgggaaaattttt

SEQ ID NO: 17897 - DNA, 1940 bp, Heterodera glycines
atattttgcgggtaattgatcaatatacaaaaagtaatacctaaatcaaaaaaaaatttagaaaaataccgtattttatactttacacagatattgtaacagcaaaaaaaaaaaactgtacctgtgaagccgggaatgcatgtgcagcgaaagtcgtcgccgccgtcgctttctgccgactgcagtggcatgcatgtgccgccattctggcacggttcctgctcgctgcacacgtccacgcgctgttcacagcgtgtgccgcgaaagttgcgcttgcagcggcaagtgtacttattgttgttggtcttgttgccgtcgtctgcgagctgtacacactcgccaccattgcggcagggactgtctgcgcacgcgcccgccaactcgcagctcaaatgaatgaaaaatttttttttgaaaatttcagaaaaaattatttaaaacatcaaatcaaacaaatatatttaagacatttttcgacaattaatataagtttaattattttggttttcatgatttcgacaataaaattttgttaggtttttttttgctccgacgaaatttttaaaattttacagaaatttattttcaaaaaatgcatggaaatttttgaaattttgcaggctggtagcattatgccaaatattttcctgcaaaatttcatactaaatttctgacaacacaacattagatttgcttgctcaccgatcacccaggtagaacggcgggcattggcaacgaaatgcagcgccaattgcagcgttgtgggcagcggcgccaccactactggcggtggtggtggtgccgttttgctgctgcagcgcaacgcatgtgccaccgttgacgcaaggcaaatcctccgcgcacgcgtcaacgcgaacggagcagtcgcggccgcgccacccgttgtcgcaaaggcaacttgaagaattgaagaaaatgcgaaaagaaactttttttttttactatttattgttaattatataattaaaaaatgttatagaaattaataaaattttaaaatgtatcagggaagaatcttttaaaattttttaaaaatttaaacaaataataatttaaaaaaatttttttgctatcgaaattacagtaactattaccaacaaaataatgaacaattaattaatttccaataaaaaattatttaataaataaaataattcgtgattattacaaaagataataattaccaataaaataattagtaataataactaagaaaataaattgtaattaattacaaataaaaaaaatagtgattaattagcaataaaataattaggtatatcaatagaataattagcaattaataatcaattaaataattaaaatgtttatttgcctaccgatgcccattccacacgttttcgcatttgccatgccccgtgcacgctgcacgcgcacccagtcgtgaacacgtgtctgccaactgctcgcacaacgcgccctcgaactcacgcgtgcagtcgcaggtgaacaataatgacgaggccgaccgcggtgaagcgtgtggcgttgctgctggcgtgctcagtaagtttggcatgcacattcccccattggcacatggctggtccctaatttttttaaaattaattttaaattataaatttagaaaaaagcgtttttaatatttgaataacatgaatttaaagtttaatcaaaaatgggcaataatataaaaaaatctgtaaaaaatttaaaattaccaattttaaaataatttttttattattttaaaaaaagtgagaatgaagaaaatattttaatatcttatataataaatttattaaattattaaattcgaattagatgaaaaattattaaataaataaaaataatttttaaataaattgattaataaattgataaaagtttaatttaaaattaggaaaggtttgtttttaactaaaaaatgaaataaa

SEQ ID NO: 17898 - DNA, 2669 bp, Heterodera glycines
  unsure (1)..(2669): unsure at all n locations
tgtaaattcatataatttataccnctactaataattgaccgaaatggttaaaagatattaaatatttaattttaattaattaatctttgttttttgctcagggcactttcctttttaattacctctttttgtaattcaaatccttccctgtcaaaggaaatctcaaaattgattatttaactaatgtttcccctttttcccaagtccgtccatttcgggcggataaaaattacaacgtaaaattattgcaatcactcggccaaggaaatttgaccctttaattcccgtgaataaagactactaaaccatatatttatgactttaacagaactttttcgatgttttttaattaatatttattttacagaaaatcctcttcatgacaaagtgccgccccgaatcaaaaaatgccgccacagcaaaatattatttccttgctcataaccgagttcccccttttcaattaaaatgataaagctaagaaaaatcccaatcgaacttattgctgaaagcgcccgctttgtacggttcaatcgaaaatgggcaaattgtcgcgtgtcacattcatttgaccactttttgcttgaaaagcatgggaattggttgaatctgatcaaagaattggtcgggaggaggaaaattaaacaatttagctaattagacaagcataaaactattcaggtgaccaaatgcttttcatccaccgagtcactgttcaacaggattgcagaaatcccagacggattgtttggcggaaggaccccgctgggcggacaaatgtgcgcaaaacggttcgaagcggaaagcctttacataggtaatgtactggcacaaaaatgtgtgaaaactcaccgcactgtcaccgatacgggattgagaaattgttgaaagaaattatttattttaattaaagtcagaatgattagggattgggttggtttttggcaaaaaaaactcgcatattctgattttgataaacccccggatatatataattaaatgaaatatttaataaatgtaaagatcaaaattattttggttgcaaaaatttagcggttgtggattgtgttaataactgcccgagttttccgaacttttgtgacttaattgacctcggtctgagcccgaacgatgctaactacgcaagtttttcattatcagtatattaaatgtaaattatgatatttctttaaattcacaaaccaattaattaaatataaataataaatcaaataaaaaaaaacaattcgttaggttgttacgctgcttgaacgctcccgttctgctgtgcaggactgcatttactcacacgacgccactttggaggacctgaaaacacttggcctgtgtaagtcaatgacgtatgaagcatagaaagaaatataatcataaatttataattaaaaaaattaatttatttttttcacaattaatattaatttcaatatatttatgaaagaataatttgacagaaataattaactcattttttacagttcttcgtacagagaatagtcgcattactcgtggctacaaaattggaattggaatggcttagccacacacgacgaatacggctttcaaatgaagaaaaaacattgttttaaatatataattttcatcttaaaccgtaagatctcgtctcaatggataaatatataaaaagtctcaaagccttatttgaaaattaagaatgatgacctttttgtccgttttttaactcgattttttgaaattttatcacaaaaataatataaataattgaaaaaatgaacattcacaaatgaacacatttctgtggcgggagagccaaatttaaaaggccgatcactttcgctctgatcacttccattctatttattccgctggaaacacttcgggctcggattctttcggcattttgttgcagctaacatccggcattgaattgcaaagaccttttttttgcttttaaatacgcatttttgcaatccgcgttttcaaaaaaattttggggaaaaaaggggaggaggcgacgcctataggcgctgccgggaaaactttgcaaatttcagtgtattttttaacaggttttcaccaaaattgcggaatttttgcaaattattttattttttgattattttggatcggttgcaaaaaagcttagcattaatgccgaatgatttttactttttctattgtctgattaattttagtgcttaattaatgataaatccattcttttgtacatacagggtaaagatataaggcttagtctcattttaagtcaaaaagtctcacatttacaaaattttatcccaaatataaaaaacagtaaaatggtcaaatttatagttatttttcaaaacccattatcgcatattttttgtcagagattcttgtataaattttgaaaggaaaaatcatttgactttgatgctggctaatgacttcttgtttatgttcttttccaaaaatttttaaagcaaagtatataaatgagtggattgatttatcgtaattaagcactaaaactaagcaccaaaaacaaaagaaatattaaatcattccaccaaaaaattcttaattgctaagtttttgcgtggctggtcgtttcctaaaacccgccaagngctaggaaaaataaaaatgcaaacatataaattcaaaacttggctcaatttcactaa

SEQ ID NO: 17899 - DNA, 1561 bp, Heterodera glycines
ccccccccccccccccgcccttcaaaattttgaaaaataaataaaataataggagactcagaatttgaaaagtttttataaaaactgatgacaagctaatgtgataaaacaggttaattcttttcctttcagtattcctgcaaagtttggggcgcttctgataagtttctgaaaaaaaagttaagcctaaactttttggcctgtttaaaaaggaattaaaaatttttaaaaattgactagagcaatcgaacgctaacggacgacctaatggaaaaaaatccccgaaggagagaatttaattaaatccattccttcgggggaccgtgccgggtgccgcggggtaagcagtgctggttcgtttcatcacggcaccgaaccttttggctagtcagcaatcgttgcttaacttgccagatcggacgggtgcgcatgattccactgttccaagcaccccaccaaaagcaaaacgatataaccaaaatataaggaaaaatttttaaaaaattttttctccatcttcctttttgatactaaagcatcagagtgctaaaattaacttgtaaataaaatttggtgcgctttagagcactttctgaaaaaatatttatgaaataaaaaaatcgatttattcaagtgtccgtttggggtactcaaacaattatggggagggagcaaaaatccaacgcagaattaaagtacaggctatagggaagctattccggaaggattcggtctccccataaatctgggcgcatcggttcggggggactgccccgaaaacaaaaaaatcgattttttcaagtgtccgtttggggtactcaaacaattatggggagcaaaaatccaacgcagaattaaagtacaagctatagggaagctattccggaaggattcggtctccccataaatctgggcgcatcggttcggggggactgccccgaaaacaaaaaaatcgattttttcaagtgtccgtttggggtactcaaacaattatggggagcaaaaatccaacgcagaattaaagtacaggctatagggaagctattccggaaggattcggtctccccataaatctgggcgcatcggttcagggggactgccccgaaaaaaaaaaaaaaaattttttggataaaaattatttaaatgaactgactagataatatttaaaataggttatttctcttcctttcagtatccctgcaaagtttggtgcgcttctgatcagtttctgaaaaaaaagttaagcctaaactttttggcctgtttaaaaaggaattaaaaatttttaaaaattttattcatctccctttttgatagaaaaagcatcagagtgcctaaactaacatgtaaataaaatttggtgcgtttcagaaccctttctgaaaaaatatttaagaattaattttgcaaaaaataaataaaaacgaaagactcagattttcgaaaatttttttgagccagctagctcggcgctcatttcagtgtaagttagtcctttaccggggagtatccctgcaaagtttggtacgcttctgctcaattagcaaaaaatatgagtgat

SEQ ID NO: 17900 - DNA, 2852 bp, Heterodera glycines
actgataatcgcaatgctggtctttgttttcaattctttttcgctttaccacatttctcgcgtatgtttggtatattttattagctacgcttttttaaataatatagtttgttattctcgttgcgacattaaatgatcttcgtgaactttatctctgattcacttacataaaatttttaattgttaacaaattaccatcatatttacaatttcaatttccatataaaaacaaatagtaataggctgaagcagatatatttacaacatatgcatgaaaaatgaccaaaatatgcacctaaatatacaaataaaattgtcaaatatgcatcaaatattcacaaaaatcgtaaaatatgcaccaaatatgcataaaaaagttgaaaattagggggtgtaaattaaattaaaaaaatttcttcagcataaattttatcggttgttttttgcaaatgcaaatcaaaagtttctcaaggttttcggcagtgaagctcactgttgatcagggcgcggaacaaaaagttttcaaaatcagaatatcgggcccaaaaaatcagattttggggtcaaaaatcatgacattctgcaaaattgctttaaatcaagtcatttttaaattattcgatcaaaaatgtattaagtattatatttttcgcctccattatcgaatttaacaatttttttttcggcgcatttttccaaaaaattctggtgaacgggcgaggggaggggctccggaagtgccgatagccacaaatcttatattttcttgataaaatagtgacattctgccacaaaatttaaacattgcgaatatgtttaagaaatcaggaccaaatttggtcgatacaaccaaatcaggacgaatctgataaaccaggacagatccgcgccttgctgttgatccactcgcgcatccattcaaatttggatttaattttagggcataatcaaaattttttcctaagagatattcaaattgtaaaatatttcacaataaatggcaaaatatgcaaaaaatctgaaaatatgtacaaaaaatggcaaaatatgcatgaaatatgcagaaaaacccaaaatatgcaaaaatatgcaaataaaagtcccggtttttgtaagcaaataccaaaaagaaggtgtttttcgtactatttggactacgtagaatccaggaaaaaaatgcatttgcataaaattttgtctttatttgtgcgtcatcatcatcttagtcgaattcgttattttcttatataaataagatttgatattaatatgatacttaaatgatatacatacttgatgttagatcatcatcataaaaaagaataatatatatatatatatatatatatatattatttatttaagcatttgaactacaaatattttttgttcctcttattgcttttttattattttgcatttattttcttaaacattttagcttttgaattattaaactgtgaattgggttttagcttttttttattaaatttagtgtaaaacatgtaaattttaattagcagtaaattttatttgttgcaaaaatgtacttttaaacaaattaaatcacatagtttttaattggctgatctatttatattatagaatacattttttattataaaaaacttattttttcatcgttttatatagcacatttctaaatttttatgctaatgaatatattttagatgttaatcaaatttgtattttttaaaatcaaatgagaatcaactaaattttaatagtgttaaattttaaatatattattttacctaaaacaaaagttttttgatgaataatcattgttttgttaacttatttattaattgtcattccaatatcaagtgacaaataattattattaggttttttcttctatttttaaatgaactaattatttgtttatttgggtcttttacaattaccaattgtcaaattcttcatgttcgtggaaaagtatcattttcaggaaatgatctcgcgacatgcgaaatttcatttcaaatataatgatttaaaaatattttattgttaatatacaaatatgctctttgggtttgcctaaattgagtttaaattatttaggtttagttagcttattaattttgttgtttctgttgataatattattatttttgttatgaatttgtttaaattttcagtcccaattttatttttcccatagtttaattgattttagtattatcagtattctgtttaattaactttttggaattttgtcacatttaaatatttgttttttgatttaattcattaatttatttatcatttctcttctgttatttgcctcactgtttagcttattatatttggattatttaagtattatttatttattatatatatgttatataggttttgagtttcgttgctaaaaccattttctcccggccgaaggccgggagcgccctgaaagtggtggaagggtcttacaactttttgaggagaatccgggaaaactatagagaaaaattcagcgcggccaactgagtcccagcggctgatttctcattttttcgtgcatttgagggcccctaactttttttctaaaaccctgaccaaaaagtttccgctggtaggattttaagttgaagtgttggctaaaagttaaaaaaaattccaggcctctacctataataggaagggctgtagaagcgcggacaaattcagtaccaactttggccagttcagtaccaggcgaataactcgccagggtttgaactgagcgagggggtgccagcagacttattgtagagttcaatgagctggatttttccagtttttaaaattttgaaaattttcaaaaattttcgagctaggcctaaaaa

SEQ ID NO: 17901 - DNA, 2103 bp, Heterodera glycines
aaaaaaaggaagctcccaaaaattcaaaaagcacaaaaaataaatgtcaagttttcttcagcgtatattggcatcgctttattatgaaaaaatttttattttctttcacatgtgatttatgttttcagaaatcttcccaatccacaaaagatttttttttgcaaaaaaatattttttaaataattaaataaacaaaaaataaatttataaatttcaataattgtctatttcatctttattttagtttaaggtatcagttattgttggcgttcaatttttatgatgaaatgataaaaattaatatcaaaaaataattttgtgaataccacaaatatttatttattattataataattctctttcatattattacaacttcttcaattgctaaattgaatttttatttattttttaaatacttttcattttgttatgccacgaacgacgaatcatttgttaaaatgtaattttattctcttggctgttataatagccgataacaagattttcttggatgctttcatgaagattaaatatattgtatttgcacattattaaattacatttcttttttttaggtctttacctattttttcctcaactccacgtggcttgaaacgcactaaaaacatgttttttttgggggggggggggttgttaatttgtaagctacgtttcgagttattagcacctattttctaggtttttattttagcacctaaaaacctaaaatttttagaaaaaacttattttcacctattttagagttttgcccaaaatttgttaacaaaaatgcaataaaaaggaaaaatacaccccctaagaatcggcccgaaaatttcaaaaacacacccctgagaaatgaaaaatttctcaaaaattcacctccataatttatttgtttattttcttgacgagatttgttcttttgaaaattatgtatatccttaattatttggcataatatttttgtttttgatgaaattttcgattttacacccctaaattcggaactttttggcacctattttcccattttagcacctaaaaattggagccctagaaattactaacttaaattcagtaaaaaagatttcgcgaaggacactaatgacaattaattgattaataaaaatttcattataaaacttatatgtaccgcaaaaattagtctaatgattaaaagaattaaaaatgttaatctatgatagaatacattatagttagataattttgaaaaagtcccaccaaatctgtcggtgctgttacacactactcgtgctttatcggcaatcgccgtggtgctagtgcgtttcttaaaaactgccaccccccccccctccactcattttatgaaaattcttgaaaaattttaaaaaattgaaaaatattttgggaatactataaaaattccgggaaaattaacagttttaagaaatgcgcagccccattttggcagtttttaagaaacgcgtcagcacgaattcaaataacaaattaaaattaatatcttttatataataatatttttttgtaatttaattataaacattggaaaatccaaaccttaatattttaactaagtaaaataagttaagaagggaacaaaaattaagaaaatgtggcttgtacacaagaattttggaaacttaaaattaatatttaatcatattatttttttatcaaattttaatgaaagataatatagaaaatataccttcaataaatttatttcattaaaaattaaaaatcaaaaaaaaaataatacttatttaaacacatttaaaaaatatatattaacaaaaaaatataacaccagcacatttgatttatttttttttaataaatattgtttattttaatttttttttataaagcaccaaaattttctagaataaattttttgaaatttataaatatcttaaagatatctgaattaaatgaaaatttatttaaatagcactagaaaattactgtttaaaaaataattttaaatttaatatttgtaaaatgatacttaaatccaaattagcacctttgaaaaaacaagtattttaactaatatctctgttaaaatattatttaatttttcgataaaatata

SEQ ID NO: 17902 - DNA, 1475 bp, Heterodera glycines
ttttaagtggtttttcctagttaagcagttaaggtgaatgaaaaattttaaaatctatagttttggaacagcaaattaatttaaaatttttcaatttataatagaaaagtatgatgtgtatattaaattatttatttatttatttatttagactaattaagaaataaacagtaaaaaaagtttataattcgtattattatcatggccaatttttttataattaaaaacttcactagaaagaattgactttaaaaaatttcaaaaagagagtttattattaaaaacccatttttattaactatttcactagatgttaaaaataataaaacatgcattaagattaaataaattttgcaaatattattttattttaaaagtaatattttgacttatttatcaattaaactttaactattttatgaatgaattccgttaataaaatatgtaaaatataatattattaaatgagtatgaagcagatatgattatttctccagccaagtcggtcgcttaataatgacgggaatactttcggtatctgtgggaatgaagcatttctggaatttgggagaattggggatggtccaaaatacactgtagttttgctttaaccaaaaatagaaaaaatgtttttaataagtcatgctgggacatttcttaaaccctaataaattaaaataaacttatttcaacaattgcttaataaattatttaactaattgtttaaatatattttaattaatttgaccttaaagctaatttttaaaataaaacatttaaatcaaaaaaataaaataaagaaaataaaatttatttttttcttaatacacgaaatgagtgtgaaaaataacagacaagagaatttcaaaataattttaatttttaataatgaatatattttaaataaaaaatttactctattctattaaaaaaatataaatgaatataaaactaaaataaaatttaaaactgaaaatgtataacaaaattgacaacaataactctacccacacacaaagtaagatctgaagatcatttcgagaaaaatgacaattggcgcttacggtgcagaaaattgaaaatattttggtaagttaaaaattttaaagcttggttcaaataattcaagtaaaaataataatttcaataaacttaatataattaattttaagactactattgtaatttaaaataattaaaactttaaaaaaaaattaattaatattgaaaaataaatgttatacaagaaaaaaattgacaatttaaaaaacttgttagaaaatttgtttttgtttttccttaatttttctattttgaaaatacaattttttttttaatacataaaaggatggcaaatggaatattaaggaaattgtccgtttttaaattgtcattattttaaaataaaatggaaaataaaagcaatcagatatttatatgaatgtgtttacaattaattattttaaagtaaagaa

SEQ ID NO: 17903 - DNA, 2967 bp, Heterodera glycines
ataggaatatcagtacttattagtattgcacaccctcctcccctgttacttacccgatttgctaaaatgggtatatatttgtcacctatagataaatctgatgaaatcgaatttctggtatttaaccaggtctcggaaatgattagaatttttggttgcttattttcaattacaaaatttaagtctgggatcttgttagagagtgagcgagcattgaaaagcaaaccttttatttcatttataattttttgcggcttgctcgcgcacccctacgaaaccctagtcctgagtggttttgggttggacaaggttttgagttccaggtcaatgacgatgtatttatacacgccagcggcctggtttgcctcaaaagccttttttcggaggtcatacaatatttgtagttcatttatggtcatatcacgtctagcggtcaaattatgaggaatcacaggcattttgagaagtgtggagcggaatttataaaggaacaaattgcgggatttttgggaggaaaagggaattttaacaattctcggttttgcattttcctcacgtgccgtccgcggatgtctgtgaacattgtcgaggtcaatttcgcccagcagaccacattcttcagcaatttgtttgacaacgtccttctcattgaggtgttccggcaggcgttcaacaactgctcgctttgacttttctttgatcagttccgagtcgacgatggcactgttgagcattcgggcaatttgggatggaccaaattgcggaggacagccccatgggatttttggcgtaactgtgggagtactgttgttgtatccattaatttggggatttgttgccgtttgtgcgacaagggttgccaccaaaccttctaacttttctaagcgtaaatttagctgatccaaagaattggcagcaactttctcttttccatgggcttgcaaaagttgttgaagcaacttttcaaggttgtcaattcggtgagagaatgccgcgaattgctgctcagacgaacttgccgaagtgttcgccaagtcgtcgtcgtgtcgtcttttagatttgggcattttttgggattttttggaggagagaaaagggtttatcgattggtcaatttgatgaaaaagatgagggaatgatgaaaaagatgagggaatgaaaaagatgagggaatgaaaaagatgagggaatgaaaaagatgagggaatgaaaaagatgagggaatgaaaaagatgagggaatgaaaaagatgagggaatgaaaaagatgagggaattatttttaatgaaacatttgcaattttcgtcgaaaaaaatgcttacgcaggagcagaactcaaacttcagaataaccaatccaggtccaggtccaggcttttttcaaaatgtcgagctctaggaatgaccatcattaatagtaaaatcgatgagaatagctattgtcttggatgaggctgggttattccatccattcattctttccacttactggttataaagccatttatcatgtcttgtttatacagttattagctggtattgccaatgataaatgagcttaaacaaaaaatttaattttttatataaaatgattaaggggtttttgcgcgctcagcaacttgagagagaaatcgcaagtttacacgagcagaatagtatcctgatggcagaacgagtcgaggtaagtacgattgggcatgtgtctttgggcttgagttcacactgattccaagttcccaattttttacctgcttgtttgtccataaagttatacatataaagaccaaaaacagctaattttggggttccattttctatttaaaacgcaaaaagaattgtgctttgtttattgaactattctttattttttctcttttagcgaaaccgcgacattgaggaaattcggcaaactgtgggcgaaatgcgcggatttcttttggagctcgtacaacaagtaattcgtagttttcgacatgaaaaatgggatgcctacgtttcagggcttcaaaaaatagtgaaaaagttatcatgattagacatttaaaaaaaattgttgagccctcttttttgtttttaataactcaaaaagaccgtgtttgcactattacaaaatttttaaaattaatagtataaagctctttttcgacatagaaaagatttttatataattacagcgcgagaatgaattgggacagctgcgtcaagctgttcagcaagtatgtttggtgtattcacttgaaaagggtgggtctttacggttttatataattatagcgcgagcgcgagttgcaacagcgggaagaagaacttggattgttgcgtcgcttctttgtccaggtatatttagttcaaaactccttttttaccagtatgaggatagttttttgtggcaaaaacccttgaacaatgctctaaagtcaaaaataagacattacttaaaatttgcatttttattctccgatttgttctccttcacccttatattttttctattccttgtttcatgttggaaatgttggtggcattgtaaccggtggaacaggcggcactgacgggaacagactcggcggaagtggaggcatttttggggacggactcctccgaagtggaggcacttcgggagacgtactcggccgaagtggaggcacttcgggggaaagtggaggcagtgggaccggtggtactggcggcactgacgggaatagactcggcggaagtggaggcacttttggggacggactcctccgaagtggaggcacttcgggggaaagtggaggcagtgggactggtggtactgacgggaacagactcggcggaagtggaggcatttttggggacggactcctccgaagtggaggcacttcgggagacggactcggccgaagtggaggcacttcgggagacggactcggccgaagtggaggcacttcgggggaaagtggaggcagtgggaccggtggtactggcg

SEQ ID NO: 17904 - DNA, 830 bp, Heterodera glycines
cagcggaatgaggtttaacggggagacataaaaaaggaaaagtgggttgggtttaagtccgatggaagttattaaaaccaaaatgactattatttgcagtcatgaatataacaccaatttcatcgtctctccctcatcattggttttttataagtttcgaaagagtccgcttttgacttttccttttttgcttcccttttggtctttttggcgtttcgttgcgttctttcgttcgcttgtgtgaagtgaccctttcatttgttcccctctctgcaggaatgggagcgtattgagcgtgaacgtcgccaatacgaggagacggagttggagaagcggcgcgaattggaactcgagcgggcggaggcactgagacgcgagcagcagtggttggagcagggacgggccgaacgggagcgactggaggttggccaagcgaactccatgccgaaaacagaccgccttttacacagattgaacgcattaagcgggagcagcgagaaaaggaggaacgcgccagagagcgtgcaaagcaagaagtggaacggttgccacgcgaccgcgacgagtttgaacggttggagcgcgagcgaatcgaactggagcgacaggccatggaactgctggtacagcggaatgaggtttaaggggggggggcataaggaacgacttgagaaaagtttggaaactcagcaatgaaaatctttgcattccattccttcccatttcgaatgatcacagttaacttatcaaagttgggtttttcaaacgctttgttgcggcacattttttgattttgggaaactaggggacccggcagcgcgatagacgtc

SEQ ID NO: 17905 - DNA, 929 bp, Heterodera glycines
tctcgctaaaatagcttttttggcactttaatcatgaaatttggctttttatttagtacattcgcgacagtttgaaaatccaattttgctcctttccttctccctttagccgtggttgccatggcacgtcgactcggagctgtacccgcacaagtgctatcccccatttgtgcaggtcaccttagcaaaatctgttcaataaccattttaatattcccaatttttcagggctccagtttcgtaatttcgcgtgccgctgctgcggaagtgcttcggcacgtgtgcgcctttcacggctttgccattcatctcgacgacattctgatgggactgctcaccaactgtttgggcatttcgaacagtcaccgagacgggtacacatgtcttctctccctcattggttttttgtagagtgaagcgggaccgggacctagtagcggacaccagtatcgaggtcccggttttgaccagttttgaccgggaccgggaaattcccgtgttttttcccggttttcccagccaaaaagtcccggtttttcaactcgaaatgtcccggtttacctcaaaattcccggtcccgaccaaccctaattttttgtaattttcaaatggttcatttttccactatatttctttttttcctaaatttggttgtacatttgtatctactgtataaaatgattacttttaatgcctaatctcacttacaattaattagttagctaacttttatcctattccgccaatttttccaaatgttcttcgctcttcgtaattctcttctcctccactttcttctgttagcatttgccgtttcttccattgcttttgggtcgcccattgttttccccgctgacaatcgtacggtgtccgatgaccccaaccgtaacagttcgaaggtgccttggtcatatggcacttttccctcc

SEQ ID NO: 17906 - DNA, 1926 bp, Heterodera glycines
gagtcgggtcccctgttctgtgggcaattcccgaaagggttttttttattactcaaattttcttaaatccgggttaaaaaaacggaaatccagaatcagaagttcaagttttggtaatactatcgatggtgccgcctttttttggaagaaattttttggttctaaaaaggccgtggaaacatgtttacgggggtttttagggttgttgatcatgtatctagcatggcgaatagaaaataaattgttggattaaaagtgattgccgtttattaacaaaatgccatggaaccaagtcgatcagtcgaccaccgaccaaccgatcagaaatatcaattgtacacaaacaaattaacaaaaataaataaatgcccaaatttggacgatcattaacaccaccgtccgtcgccactgttaatgtgtgtttaattaatgtaaatgattcgattagccctctttgtcctacgccgctccttctgctgatcatcacgcctcacgctgtcaaatctgatcaaaccaagtccaactgaggaggcgttgtgttttgctcgactgatcattcattcatttttcattcattcgtccgttggcagtgatccgaaacaccggcgtggcgtggcgttgttcttgatcatttaatgttttatttatttttcacatttcagcatggttatttacgtactatgtatgcatgcgtttaattgatggaaaaaaagaaaaataaatgaattaaagtgaaaaaacgaagaaaacccattcatcaataatagatttttttattctcgatacgatttattcattttttgaaacgaaacttcatcattagaatgctcagttgcatctgcaggttaatggaaagaattttaagcaaaaatatttacaattttctattaaaaaacaaaaaaatttcggaatttcaatttggttttgttagaaataggtctatgtacaacgagtcactaataacagttgtggaagattggtacgaggcaataataaatggaaaaaatgttgactgtatgcttttgttagattcgtgatcagcgaccctgaaaacccctgtaatcgcgtttttaacttttaaaatttatttttcaaaaaataggtgggttgtcattttggggacaccctcgtttcggcgccgctcgtttcggcgccagcccagtttttggactataacttttttctttgtcaaccaaatctaacattattggtatcattcgaaagctctaagtgttctctattagcctgctaagtttcaaaaaaaatagttaatgctcaaaaaaattatgactagaagatcaaaaaaccaggccacatgtgtacttttgaccataactttgttcaaaattgatcaaattttttggaattatgcaaaataatagagcatcagaagggctctcgaatgataccaacaattttgaaaatttttcagggcaccgccggaccccctttcccctaaattttttggaaaaaatgcgccgcaaatttttttcatttcgaataaaatttgagaagtgctaataaaaataccaatttagtggtggttttcggggggccttttacataaggtttatcttatgactaaagagtggtaaataaacacagtctttaagacagcaaaaaatggtagaggggggggggggggagaattgtgaagtgaacgaaaaatggaatgccgaaatagtataattctcattattagggcttccaaaaaaatggatataaaaccgcgaatatggcaatagaatatgaaccaaaaattgcgaaatattgaattagttttccaagttgagggtataatttctgaaaatttcttcagactgactaaatataaaataaaactttctaaatggctaataaagcattcaaaatcattttataagagagctaaagtttactaaaggggaaaaaacaaacttaaaggcg

SEQ ID NO: 17907 - DNA, 1927 bp, Heterodera glycines
  unsure (1)..(1927): unsure at all n locations
taaatcagagtcccaagttttttttttcaaaataagacaaaatggctcaaaaactaagattcagacctcaaaaataatatttttttctaaaactaatattagcgcgaaagaaaaccaataaaataattttattaacataaatcaattgaatattttttcccgctgatcatttttttcattttaccgcatatgcacttttttgcgtcgcttttttccaaaaaacttatttttaaaaaatttcagaaaattgtaaaatgttctttaaggcattttgggcaattacactatttgttaacagattttcaccaaaaaatgaccaatttttacaattttgagccaatttttttaagaaaacaaaagatttgggggccggcggtgccgataggcgccgtcgggaaaagcctgaaaataagggcaaatcttacaaataaggacatttttaatttctaagacctagcacctccaaataaggacaaatcttacaaataaaaacacttgtgaacttatgctaaatccctaatgttcattcggttattttaagcctgacaataaaccaatcgagtggattttgcgaattgtcgatggaattgccaatccgatcagtcgctttccggaattggaatatgtttgttctaaaaaattatgaattaaaagcagaatttagcgcaacaaaaaaatcagtatgtcaaaatccaacaaaaaaacgaaaagtgtcaaattaaacttctctcaatgtgaagaaaatcaaatcaatgcctccgctgattggcaacaaattgtgagtggtgcgacgactgaccaagacaatttattaatttatggcactttagccaacatcgtccgggaaaaactgcagcattcaaaataccaaagatgacggaattactccatttaattccgattgcgagaaggatgatgcaaatttcgagatgaacgaagaggaacagttgatgagcatgttagatttggcatacaatctcgatgggaatatcatcaacgaagtgatgagcacaatcgacaaaactttgaatggcaaatgtgccgtggatgaactttcgagcacatccgatccgacatcgataaatggggaatgtgcggaaaatggcaacagcggaatgatttgcacatccgacccaactttaaagggagacagttttattctcgaagttccattttcaccgataagaagggacaaatgcgttgatgaaatggatgatggagagattgttggtgataatcaaaatgacagcggtggtgataatgaatgtgatcggagagcgattgtcagccagcagcaggtgaaagaagaagcttatgttcagtgaaatggctgtaaaacgttatcagaaatcgaaagaattttcgtcagtgcaagcggaagaaagtgagggaaacgacgacgacgcttttgtgcctgagccaatgactccgcctcgtccgaccaccccggcagactgtgagacgggcattccttcaccaaagacgccgccaccggtcgcttcctcccacccgacacgcatcaaagaagttatcgaaatgcgggagaatgaacggaccgtgcgcttgttggacattataacactggattgtgacgatgaatggtgatgctccctatttcatacattgttttccaaacattttcatacggttatgcttatttgtcgacatttctattttttcggaaattgatgctgtgttatattgaatattttttgcttgtgtgtttaatttgattgagcagcgaatattagagccccccgactctcccgtttttctctgcaatgcaagatacgcacgaaaaatgtttttctttgtggttgttaagcctgcttttcgagttattcgggactagtttctaggttttatttttagagcctaaaaattttcaaaaatcttattttggcgtnttgtccaagtatttatcaca

SEQ ID NO: 17908 - DNA, 1158 bp, Heterodera glycines
  unsure (1)..(1158): unsure at all n locations
aaaaagtaaattcattacaaaagcattgcaactttgcattttgttcaaatttctctgttttaaggacttcttaacatcgctcgagaggttcggatgcgcagtccggtgacgggctctcaattcgccgcgtggggtgggatgttctctgtgatcgactgcggcctcgtttatatgcgtcgaaaggtaaatttccatggcatttgaagaaattggacaaacattaaaatcatattttttctgcattttatgtgacttattggaaggaattttctgataattaacaaatttttcctgggtcacaccttaaatagggggggggggggcggggtcgacccgctgactgttcgtatgagtggccgaaaaatgggggggggggacttcatattttgtggacaacgacctgaaccttgaaatcctgattttccccggacttaggtttgcatctcatgaaaacccaggtaaatctggaaatcaaaacccattcatgaaagtatggattttaacattttatcgtgaaaatccctgaaattggcgcgagaaattgtgattaatttttttgaatgatcaattttatagggatgataaaaagttaattaattggcaaggcaccagggatggcattccgaggccccaaaaattttcggaattctggggtcaaaaaaatttcggaaatcggaattccgactccaaaaatgtcggaattccgtgccatccctgattggcaccacatttacgggctggcgccaaaatgaattgttcccaggttttatgtgcatttttttaaacaatcaatgtttctgaatctacaatttttcttggccgggtttggcatggaattcatttacaggctttttcaaaaatatttgtttataatatattcaaatacacacactaattatgcaatgccttataatgttaaaaattaagaacagtgacaaacacccaaaaataatgatcaaacagcaattattaatcgtattctcatgactcggactttccgtttaggaagaccctctaaattcgatcgctgctggcggtctgaccggcggtttgctctgtgcacgaatgggttggaaaacggcgctggtgtcggctggtttcggtgcagtcattctgacgatgatcgaaggggtgggcattttgatgaaccgangtgat

SEQ ID NO: 17909 - DNA, 3349 bp, Heterodera glycines
tccccgtgtttttgccttctctgttccctgattttctgcatttattgctcaacaaatgcttacgttgttcatcggttgctcaacctttttgacagcgggtgccatttgcggcggtggaggccgtgccaaaggcgggggcggcggcggaggagcgcccggacggcgcataatcggcggcggtggaggcgctgaagggcgtttttggatttcctgaaaatggcattatttgagtgtacaaataaacctaagcaatcgaatgggcaattgaataatttgaccaatttgtactagtttaagcataaaatgatcactgacacaaagcctacctctgtacttcccgttcgccgcaacgttgttcttttctcgtccgaatttggctgcgttttcgttggtcgaagtgtttggaattggttgtgctgcgagagggggagtttgctgggctgtagagcaatggtcgtcttttgttttggcaatttggccggcaaaggcggtggtgcgccgggaactgctgtcgttgaaaccgatctaaaactgaaacaaagttaataagtgcgagtgctaatggttgggagaaggggaacaaaaaatgaaatcaaaaattagagtgaagggggagtactttctaatagtggaattaaaaaagaacaaaaagaggggcaaatactaaaaattgcgccagggaaaaggtaaaaaacagacaccaaaaaaaagttcattggtttggtctctcttttttattaaatggaattgttgcaaaaaaaataaaaataaatttaattggaaataatatgattggaaaaggggaaagaaataatcgtcagccttttcacataaaaatgcatttgccctgtccaaccaacacccctcttattaattagttagattttggtcaattagttaatgtcctccccatacttttgcaaattcgcaatggccgccgccctcgtcgatttgtttgccgttgcgtcgtggggcggcggagtcggcgagtgattgttttcgactgtcttcacattttccgatgcaattgccaccggtggtgcctttttgaccgggctgctccttggcttctgctgcccattgttcctaccgagcgtattcgatgcgacaatttggccggcagaggacgatttttggtttttcaaatcactcggctttctcgggactccgtccctaaacaaatcgcccaaattcatggcaccgcccggcttcggcgctgcgcttttttgactgacagtcgaaggggcagtcgccgttcgacccgcacaaggctttgtttcttcgcctgaatgataaaatgcccacaaataatcgaaatacattttaaaatctgcgagtgcttaccgacgacctttccctccactgctggcgccgatctgtcattagtgacagcctttttgagacgcgtccctttgtggatttcgttcagcaacattgcccgttctccggtcgctttttgggttgttaatggctgggaattggttgagaaggatgggggcgggggaggaggcggcggaggtggcggggccggcattgcctcaatatgagcttcagaaacggattaaagtgaatgatcggaagaaaagtgaataaaggatgaccaaatttacacgatgaaattgaacaaaataaacagagagcaaatggctaacagaaacaaagcctttgatgagaaggcggtactttggcaatcaaaaatttaatttaccaatattttgcaacgccaaaaattaaatttaaccgcaatttcaaattatttttaggttttcttaaaatttctgaaataaaattcgttattaaattaatttttgtttattcatctcaattagcttcgtatgaatgtgctcattgtcgcaaataaagctgcttggtccagtttgtattcaaatcatgtgaactctctgtgccttttgctgtgcccacgttctcccaaccgatgcaatgccattaagtgagtttctgagttcccccccccatccgtctcaaatttcctccgttccatttttaagtttgctctctttttatgtccaaaaatcggaaaagaatttgtacgatttactcggagttaaatctgatgcttcacaatacgacatcaaaagtgcttacttttcaaagtgcaaaacggtattattttgggcaaagtgagttcgcatcttttgttaattggggattctctttgtgttgttgatttttagaccctttttttttgtccctgtaaattgagtttggcttctaaaaccgactttcttgaaacttttctcgtgaactcgttctgtcaattatttccttattttgtttaattttctaaaggtttaaatcttttagctccatcctgacatgaaatgtgatggtgctacaaaaaacgattttttggagctaaaacaagcttatgatgtgctgaggagacccgccgagaggcgaaggtattgtattgattggccatccatccaattcaatccttttttgccaaattgcacagatacgacaactctttgctcctccatgttaaacagatggacaattacgccaaatacaacaacggttacggaagaggacaacaccacagccaaaacggagaagcatttgacgggtgcttttttcgattcatttccttaaatcttctggctagactcatctcctttcaaaatatcaaattttgggcgacttaaaacttttaatttttcggtttactgaatttatactttggataggttcaattggtttttttgatacattttgctaaatcccgtgcatttctatggtgtgcctcactttggtgcttatttgttagtccaaatgaatccatctttcccatttaagcttttctacccacaaatggcgttctccgctggccaatgacgacattcattttgtgttcgctatttttatgtttggccttgtgttcgtttttctgttttactttgctcaatggtctctctcccctccgttttctaatttattttcaatttctctccaaaggtttgccattcgtcgtcagaacaaagagttagcagcgatggacggtgccgacgaacttgccaaatgttttatgaggcagcgcggaatggacgcgtcgatgatcaacgacccgatccaagtgagtggaggaggcgaaatgggcataaaacttggaccagaattgtaaaagtgccaacattgaaacactttatccacccaatttttacactttagaaggaacgattcgcgcgccttctgaagacggacattgaagaagcaatgcaccgccgaaatgagaacccggaaaagcacacagatccaatgggaattcgggaagagagaacaaatgattggctgggggctgtgaaaagtgtggaaggaagtcgcagat

SEQ ID NO: 17910 - DNA, 3291 bp, Heterodera glycines
ctattgattaaatatccattgatagtttttaattttcaattcatagtgtatacatttatttatttaatgaattcataagcgtttttttattgattcttatgccttttgattgtattaaatcataatttcggatcttacatcccttgtttacacagtgtttatatgtggttgttgtacgttctgatgtaaattttttacaaatgtgatcatagtcattaaagtttctaagtgtaattttttatatatatttttttttgtaaattttccattgatctttaattatatttttcgcggaattacatgaatgcgaaaatttttaatcaatttcaattaattttttatcttaaaattccgaaatattttttcttataaaacccaaatctcgagtagggactttaatgattttaaaatttatatttttaaaattttaatgttttttcttttacaattaaatttaaaactattagaaataaatgcgtttgtttcatcagatatttttaatttgtatagctgttacggtaccggagcagaagagtacgctcgcaccctgattagatttttataaaagaattaatttatttttagctcgcttcctttcgtgaattagacaaatgtgatcatagtcattaaagttttaagtgtaaattttccatcggtctccaattatattttattcgcgcaattacattaatgcgaaaaatttttggggcttattaccacatatacgtagcccaatacacacactaaaagaataattatattaggaaaatttctgtttttcgaattattcaaaattttattgatgatctttataattatttaaaataaattttttacatcaatgtggaatttagatttaatatacgtaaaaggatattggaaaatttttttgattattctttgattgcggatgaaactttattttttatttttctaccggattttaattttttaactgataaacaaatgaaagaaattatttgtaaacgaccgagatgtttttttgcttttggacactcaatttatttccggtcgtttatcaactttaattaatttcctttaaaaaattaatttaattataagattttttggagaattataatccttgggaatagtccaattactaatttaaatattctcaatgtatcttttgttgattaaatttgcagactgcccaaatgttcagttctttttttctttgcatgctcgttgcttattatttatttctcttaaatttcaaataaatttcaatattgtaatttattctataaaagagatagtgtttatgaaccagaataaatttttatttgtgaaatttcctaaaaataaaatacatattttttccaatgtgcttattatattattgctaattccttcatttgtaataagcagttcaattaattaattctatgttccttccctaaaattttagcttatgatttctgagttattataaatcaaaaattcgattttaattttcatattattattcaccagtataccggatcattagttatgacattgaatgctcagtaagcatttataattatttttttattattaatattttggtcgatatttgattaactctgataatgaaggaaaaggagaataaagttgttatacagaatttgatctttttgtgtttttaaagttggcttcgtttaaaaatttttagtcttattgttacgcacataacgcatgtaaatatatgtttaaaatttttgcatttacaataattatattttttgttacttagggtattaactattttttgctgtgtaattgaataggcaattgagacaattattaaacagcatttgcatttctattataacgtacaacatatagtttttatttgttaaagggttgtattttatttatttattgtctataatcttatgttgaaatgatgatgcttttatgtttctctttgcggggacatttatgatatgattatattatatggcactaaatacattttcgtcttttttagaagaaaaaaaggaatttaaccatttaatttattaaatacaagaatggaacattaatatgactgattatgaaagatcattaataaatgcttttgattgtttatgacaggtttttctcgggaaaaatgttttattatttgttgaaaattatttattggctaattttttaaattattattttttattaatttaatttcttttttattttcgaggatgaacgaacatctggctagaaaaactttacgggtggagtaccacgcgcctgacgccaagcgcgccgttcctgatcccatgaagtttgggcggaagcgcccagcgatggttgctggtttttggaatttgccatttttagagctcaatttattttgtttgtttcgtcggagctaaagtcttattatgattatttatatttcatattgaattccaaaattactaataaattaatgggattcaatgtagcatttgtatttattttagtcaaatgtgtattttataaatagcttcatgcaatggtcaaggtctcagcgattgaagtgcgttgtcaatttcaattttgcccatgtatattaatgctactgtttaaattacaatttagtttattatttatttagataatttttgtgttttatcttaatcttcgtataaaatgaaagtatttattttaataaattcatttgaagcaataatcaaattaataaccaaccgaaattctgccagaatatattaatatttaaaatatcataattaaaattttataatggaaattattatagttttttcctcaatttcaatgaatcgcgttgtaaaaaagaatacaaatctattaattaataaaattcaattttagcaaagtgtcatacgtggacaatgcgtatagtgcgcaacaaaatttcttgccatgcctatcaactcggatgcctgtgccacagtttggcactttctcaaatccgcctgattttttatgatgctgtatttcagttaattgttctcttatttcgtttttgatagatttatttgcaaaaaatttttaaatttaaaaaataagcatatttatttttgaaatagtttttccaatttaatattatgttttataaaattaaatttgttggctatcagctccatatatttgccaatattagagagtagcttagtattattgtttaaaattattaataaaaatttcaagttaaattaggttttttgcttaatcaattttaaatttagacttttcgtgcgggatgcagcgttaatcaattgaatatcatgcacaacaaattttgatgctaatattgtataa

SEQ ID NO: 17911 - DNA, 1074 bp, Heterodera glycines
ttctccctcccccctcccgaagatgtaaaaaaaacttcaccgtctaaaaatttttcagaaaattcttcgaaaacccgagaaagtggcagttctcgcagattccctaagatttcttgggtttaacaatttttagttgtaagaatgtttcttcgtttttcagtttctttcgacttaatgctagagatagaaaaaacgtttatttgttcgaaaaaaaattataggccgttttttgctaaaaaattggtatattttttcgctttttttcggagatacgacaaaattaagtgcaactttatttttttattgtactctgattgatgtaaataacattatgtccaacaaataaatacttgttgctgctgttgtggttgggtgttgataaagatgatgaacaagatgaacacacggaagaggaggaggacggcacgtgcccaccaccgccgaccgagccaaagtgccgattttgggccttgcgcaccgaatggaggaccatgccgagcacgcacaatgccaacccgacaatgttcacggtggacaaatggtcgttgtgcaaatagtgggccagcagcagactgatgccctcctggaaaaagggccatgaaaattggaaaaaatttctaaaattttggtgatttttttttggaaatcgccaattcaatctttacctttacgatgccaagaatggacaaagtgatgccggatgtgttgacaagcaaaagatacctttttggggaaaaatgggaataaaaaccatgcgataaaagaaaaaggaacgggaagcacaccgtttttcaagattcttgaacatttattgacaaatgagaaagatatccggtttatatggtaatgtcagagcagcattgtttggggattggacatttggagaagaagagggatggaattgatgaggaacccgggttttgaactgggattaaaccggaaaatttttgaaattttttagaaaaatcattttttcaagtgaaaataaaaaggaaccatggattattgggactaggcaagatgaaagagtgtaaaattaattgtaaaaaagactcactcagcaattccatcaaa

SEQ ID NO: 17912 - DNA, 1032 bp, Heterodera glycines
tttccaaccccctaatatcaacactaaaggttttccttcgcccctccgataccttttatgataggtgatagatttaaaatggacgagttgttagccctttttctcgaaaattctttgaatgtttaagtttttcaataattttgaacacaaacccccacatgtccaactgtgtggaccgccacgtgaacaggaaaaggccaaatgcgatgagaaaggcggaggtgcccaagctggtacgccaacgctccaatctttaaaaaaaaagtgttaaaaataaatatattttttattgttggtactgaaaatcgctataaaatttcaaaaaatcacctgagcatcagggagaagccgacaatgaatagaatggagctcgacttggccattgtgtacagcgaaatggtgacatactccaaagacctgggcaaaatttaaaatgaaggtaggcagtggaaataaaaaaatttgaaaaatccaagggggtgggaaattcaagaaaaagtaaaatttcagtcctgaattccaaatcgcgtattttcggacaggcttattgggaagccacagattaatgagtgaggggacatcacaattgggattttagctcattgtcagtccgtttttaaattaatcgaattttcgatgattttgggtccaaaaaaggtatagagatttgttgacataccaattggacagtccgatgtccaacgaggcgcaaaagccgatgggcatcagccagcggagctgttcctgcagcggcacgcgcacgcgacggtttttctgcgcccattcgaccaccgaacgaatggtggtggccagccaatattttgtgaggtaatggccggccacaatcagcaggggcagtcggtagtgctaaaacgaaccgattgattgaactgtattttggcatcaattgggttaaatgcatttacacggcgaaaatttcaattttaacatgaattttgaaaacaaaaatttttttttaagtgaaagcaatgaaaatgtcggatgtgccgaattcgtgtcaattggagtcaa

SEQ ID NO: 17913 - DNA, 1437 bp, Heterodera glycines
  unsure (1)..(1437): unsure at all n locations
catgccaattcataattgncttcgtgttcttcaattcggactatgataacattgatttgctttacgtcaatcaattcgaagcaggagttagcttcgcaaatgattgccatcgcttctgggtctgtccaattaggaaaaacgatgaccgcgtaatcgtatctgaataggtcgaaataaaatatgaaagattttctaatcgactcattttttgaattaattttgtaaattgactttttgtttaggcagacttttttggccaacttttttggattttctaaaattcaattctgaacgatcaacaaacacataatatttaaaagtttcttgatcatactgtgctcacgaataagcactcaaattcacttacatttctgcacctaattggtcaacctcatcctttatcttttccgctacagattgatactcattttcactctctgcgatatccgaatcaccaattgccgattttgcacgagtgcgtgaaattgttggccaagtgatttcctgatatggacataaaatgccagatatggacaaaaaatgccaaatatggacataaaatcccatatatggacataaaatgccaaatatggacataaaatgccaaatatggacataaatcccccaaatatggacataaaatgccaaatatggactaagaccgaaatatggacaaaaaaccttcaccaaaccaaaaaaaaaaataacgtagaaatgctatttttgagcccctttcttcatagcatatgcgcagaaaaaatatgtgttaatccatataatttagaagcctacttatttgattgctttgtaaaataataaaagataatctttcatttttcaatataataaggtctttttaccagcatttttgctatccaattagccaaatgggcagtgatttcttgcagccttaatttgatggtcctatggtcaatatcaatatctgtttgtttgcccgcataaataacgttggcacaatgtgacgcgatcaaagactaaaaaaagaatcaaaaaactaattcattaagtgcgaaaaaccataacctatagcaaggcgtgtataaagtgggggggtnggactcttcctaaagggacaacattccgtgggttccaatggtcacccgttgttttcattgctccttttcggcccacctgctgcagtgtgtcgtctccgttccgttcgtcctcttcgccctgtgaggcgagcagtgtccgttccgtgtggtacgactgctgccgcgtgtcgtcgtgcccattttccacggtttccattaagaaaacctcctcgtcgtcagcgccaaaatgaaggcgttcatgggaggagcaagcggagcaagacgaaaggcggagttgtggcgactgtgaaggcattcccccgctggtggtgctggctgacacgtcttcttgccagcgccctcgaattttctgaaaaatgat

SEQ ID NO: 17914 - DNA, 952 bp, Heterodera glycines
  unsure (1)..(952): unsure at all n locations
gaggaaaaattaattaatttatttctntaagccattcgctcccatgtgcatacttagtggctaaactttctgcctttcattatttntcgtctgtgttcaaaattctncactngggatagaataattttcatattttctttacattatcttaattaaaacttaattaattaaaaacattccaactttttttaaacagcctaaaaacccaaaaattaaccaaatattgggtcattttttgggtaaaatctgttaacaaatcgtattataaatttcaaaaaatttcccggcggcgcctatcggcaccgccggaaccttgttccctaaaagttttttggaaaaagcgccgcaaaaaaaagcatttttaaaagcgcaaaattcttgcaatttttggtgcaaatctgttaccaaatttcagtcaaattttcaaaattttccccggcggcacctatcggcaccgccagacctcgggttagagaaatttacattgaaaagcgcgacgcaaaattttttttattgattttcattcgataaaaaaattcttaccgaatttgaacatattaaaaaaatttttaattgacccgaaacccgacttttttctcgacccgaaacccgacccgatatttttctcgacccggaacaaccccgacacatacgtattttctgcataatgaaaatccgagttcaatttgttcaacgcttgccacacctcatcagcactgtttgcactgtttaggactaataaaataaaacaattaagcattaaaatggtgctaggtctgttcttaaaaaccgccattaagggcgtttcttaaatccgccaaggggtaggaaaacaaaaaatgtaacacatataaactcataaattggcttaaattcaaccaaattaataattcttggtgtcattcaatcgctttaagtattgtctatcagaatataaatttctgttctaaaa

SEQ ID NO: 17915 - DNA, 943 bp, Heterodera glycines
ttcccttcccctgcacttccaccgcttcttccgtcgccttttcgcgctgccgcctcaccacaaaaggcaaacaaaacacctcgaagggcaccgcttgctgcaattcatgcaaatcggcaaatttgcgcccatgcaattcatttgcggagattgccgaaggagaggcggcgagaagacggagcagcacatcatcgggcggagttgacgaggaagacggggcggagagagaaaaacagagaaaggaggaaaagaaaacggagcagcatcacaacaatgagttaataaacggaagaatagaagaaagagggaaaggaggggaaaagggaagagggggcggaagggaaggcgaagagataatgacaaaataaggacggaagacaaagaaaaggcagagataaaagaacagcagatcaatttcattatttttttgatttctttttctttcccttttcgtctctgatcgatcattcgtttgatttgctttccgtggccacctctgatcgaattattctcctcatttgtcaaatgcttctgatctcataccaaaattcgctcaattcctcccattttgcaaatgctttttttgttatatcggaacaaagccagaacaaataaataccggtttaactaacccccgacactttaataaagaagaagaatctggtaaaaatagattaattacatcttttctagaattttatttattacttttttaattaaaactttttatataaaaaaaataagaaaagaaaagcaaaaagaaaaattcaaaatatttttatatttattgcaattcttatttaagtagtaaaaaaagaacaattatattttgaatttgttaaaacattatttgtggtttaaagtttcattgcacataaatcaaattctttttaaatttatcgcatcaaaatttgtgagagcgacagacacttcgcttttgaaa

SEQ ID NO: 17916 - DNA, 861 bp, Heterodera glycines
ggtggcgcattaattccctctctttgtgcccaaacctttggaatattatttaaactttcatctgttggcattcgcactgactttgacactttttccgggcctcagcacaaactcttgagggaatgagtacacaatttcgcgttttccgtcgatgcgcctcttcaatttccattcgccgattggctcttccttggatcggtgggtgttctccaacaccacgtatttcccctcgggcgatgtctccaaaatggacacattgcctttggccgacctttggtacgattgtcgggaggacttttcgccgcgcaaaatgcgctgagactctgaaagaatagaaggaaagggcaaatgcttttggacatcaactgctgaccagcttcgtcctgacggcggatgttctgcgtcttcaccacctgctccaccagctgataaagccccgatctgtcctcctccccctccagcatttttcggtaaatggcaatttcggcgtccaatgtctgcttggtgtccagcaacatttgcagctccaacatcagtgcctgcgcttcgtcgcgcagcttccgaatctgtgcgtccttgtcgttcagtgccgattcgtacgccctttggtcgtcctccacttggtaggccaattcctcggcctgtctctccagcagagagttgcgtccctccaaatcggccaactttccgcgcatgtcgcccagctgcgtgcgcagccgcttcacttcctccttggcgtagttctgctccaagttctgccgcgcactcattgtctgtatctcctgcactttcattttgtaccacgactcgatgtcgcttctgtttcggttgttcagcacgtcataatcgttgcgaatttcg

SEQ ID NO: 17917 - DNA, 3034 bp, Heterodera glycines
cgaatgttgtcatccccgtgctttcgtccctcccgtgcttccgatcatgttctccctcgtctcgagcatgccgtcgaatcgggtatgtctgacgctcccgatagtcgtcgttcacgtgagcctgctgtttttcgatttttggttgcatcagtgccggccgatgggctgttgctggggggaacgcccccatctcgtctcgatttcgattgatccattctcgcgctgtgttcgtcactctcatgctggcgatggacggcactttggcacgccgttggaaaatcccatccaaattcggcatgacgggtgtcgcgactcgttccattggtcttcggttgtgttgctgtacaacttgtccgccgttctgccatcgtttggccgccacttggaaggatctctcacattcttccatgttccgattttccagtggaggtgggtcgtcccccaccggatggctgttgttggtcccgaatgacccgctcaatcgagaccgcgcgattgcttcttcttcatcctcgagtgccagtcgcatcgtccttaagtctccgatgtgctcgtccgcaatttgaagcagttcagctggtgttggatggtttcgcaataacggcacctgtttgccgttagcttctcgaattcgtgctcgttggtcgctcgtagaccgattgttggtggctgcagttgccccctgctaacggcaccagtttgccgccaatcttttactcgggcgggccaagtgtgtggcttggcccagctgaggcgggattggttcccgctcctcttcaccgctctcgtccctttttcctctgctcactccgctcgctgtgccgtaaagggaatggccccctctttcgccgttcgtcctgatgggtctgatgctgctgaccgatccgatcagcgccaaagggggacgagaatgggaggggggaggggtgacaaaattgaactggtactgttggatgttatacagcgatttgctgcttgcttaacggcaccaccgacaagattttggtgaagggcttgtcggacccctttgagcagctccgaacgggcgggagttgctcgacaagattggttgtgaagggggcttgtccgaccctttgagctgctccgaacgggcgggagttgctcttcgctcttgactcgatgaaacgggttttgactcccgtttcctgcggcggatgctccggctggcgggagactgaggccgaaccgcgagactccggctgcgggaatctgaactgctcgaatacggaaatttaaaatttcgaatccgggttcgcggttcgaaatagagccaaaagaatgttacatttgtgattagcacctcgggctacccctaaaaataattttcacaaatttaaaaaaaaaaaatttttcgggaccaatgttctttaccattgcccatcaataatacaaagactttaaacctcttgctctggaattttactgtgtgaaatgtccttttgagagttactgtatgtccttgaatttttgtattttgaagtgacagtaagcacaaagttcgtatgcgttatgaccttttttactgtctgtcttgtgtaagctcatttaccaatttcgaaattcctttgtttgcttttttctcaaaaaatttaataccttggtaaaatgctttgcctttgtattgtcacaaactgtgcataaaaccattacacgcaataattttgttaaaacgatgcccccccccccctcttttgggataaaagttttgttctaaaaaatcgtgaaaacatgtttatgtggattgattcgcgggcggggggggggggggaggtttcttcggtaaaatgcattgtttttaaacattttccagcaagcattcttcctttcctgtccgttcttttccaattgacaaatggcaaatgaaattcttgaatttccactgaaatatgacaacgatatacactatttaaaagtccgacgtactgatacggtgcgcgaattaaaatttgtcatcgaggcaaaattgaaaattcccccggaagaacagagattgatgattggcagtgagtcaattctttcataaaatattttactaaatcaactccatccagactgtgtgcagccggatacccgccttttgagttcaatgaaagggctggatttggtgcgtgagacgggccctgctgctcctccctaaattggcaatgctgagtagtttgagaaagacgaatgattattggcttttgactttgtttgttgcgaataaaaattaaaaagcaaaaagttctcaaaattttcatttgtttgaacacaacattatgtcctttacataatttcgtaaaactttttattatttctctctatgctcagatggcattttaattgaaaagaaccggcgagacgttccgtttgctgtacgatgtgaagggacggtttgtcatccaccgaatccaaagtcgtgaaggccagtacaaactgtgcaaggtgaagaaacaggcggtcggtgacaagcaagtgccgtacattgtcacgcacgacgcgcgcaccattcgctacccggacccgcacatcaaggtttattgaccgtttagacttaccaagttttatatgccaccaaaataatattggcatccagtatagttttcggtaatagtgacaaatagctcatttacaaaattaaacaataaaagtaaaaacctaacacaaaatcagttatgtatgcactgaataggaaagtgccgagaattcgctctaaaatgggggccgtgtcggattccgagtccaaaaaatctccatgcatcatactcaattctgaaaagctcattttgattgttagtttttatgtgtatctgaattcttgccgctttttcacaaatactgcccagcaattgtcaaaatgtcatccaaatttgttttttttaggcggacgacaccgtagtgattgacattcacactggcaaagtgacggactacgtcaagtttgatgctggcaacatttgcatgatcactggtggacccaacattggtcgtgtgggcattgtcggacatcgcggacgtcacccgaattccttta

SEQ ID NO: 17918 - DNA, 3058 bp, Heterodera glycines
ttttgagaaaaagttaaattttatttcatttagtatccatgcatatgtggtgtaatggttaaaccttctgcctttcattatttttcgcttgggttcaattccccactgggatagaatattcttcatatttttttaccattatttttactgaaatttaaatttaaaaaaatattctattccaactttttttctttcattttaagcatcctaaaaacccaaaaattaatcaattggtctttttttacaaattctgttaacaaatcgcattaaaaaataaaaaatttttcccggcggcgcctatcggcatcgccggcccaccttgataagttggaatctgtactactgtggtataattgctttaaattataataattttttatttggtctgtttgttatctttaaatttaatattgcatatccttgcatttatttgcattgaatgttcatcgtatatttgttgaatttggtgaaattttgtttagcataattaaattgtattcacttatatttacaaatgttttaaattcaatgcttttgatctcttttaatttattattcttataattatatagtttaaaaccttgtcgatttccattaaaggttttaatttattctgttttatgtaatatgtaataatttcggttttataataacatttttattttataaggcaatgttaaataattaaagcaagtcgaataattaaattgttttttttaatgagttcttttgtttttatggttttttagagaaaatttatataactctttttcaatcgaagtcaatttattataccttttagaaaacttatttttatactactccggatttctcgttcataagacctgctatggcttaatattttgccaataaatttcattaatccgacaaattgtatgataataatataacttattattttaaatttattttcttgctggttcattctcccccgcgttattcaatttcgcattctccaataactgctgataattgtcaagaataacaaaattattaatataaaaaataacaagttattttatctataatcttatgttaattgtgttttatttttgatcatttcttatttcctattattcatagaaaattttgtttttgatttgttaatttttttaattattttgacaattatagttttatattaagcttagtttttaatttggaaaaataaaaatttatattcctgctaatactattaatttcaaattgattcttttcaaaaacaattttatcacgcatctttcatcaaattcatgacctttcaaatttactatgcagcattagtttataaataaatttaaatttaatacttcattcctattacaaaaaagaacaagttctattcaacgcatgaaaatactattagataatttttcattcaattaattgtttaatattcgtttaattgtctctttatatgttcttgctatatccataaaatttttattcgattttgttagtgttaacttgctacataattaattttcaagcatttttcttttttattaatttgcagcatcagtagtcattataaattatttggttttcttcatgtagtgtttaatctttattttttcttgtttaaattatatttattttaactcgtttttgtatttaatttgtctgtttatattttttagtttgatctgcgataaagactttttgtttaagttttgaataatggtgaatttaattattttggtttcatataaatgtataacttaagaaataatgtttaaattaatatttgtatttatttgctaaataaaaatctaaatttttgagattaaattattagaatagatttactcgcgctttagctcagaggcaagatctgaaaagacaattgcgcgttaatcaaattgatcaagtaatttatcatgaatttttataataatttttttcatttatttaattttgagtcattttttaaatttattgtaaaggcattatagtatttaattgggtatttttattccatgacattctaaattctgggttcttatgatgtaattagattttatataacataaattatttaaatatgctttataaagattgttatttaattattataatttgatttattaatatttctgattaaaatctaaaatattaatattatttttctttttattaccattcatagttattagtattttatttggttatttacgaataatgttgtttcattgataatttatatattatagttagttccctccaaatatataaatctgaacatgttattttttaaatatattaggatttttattttaattgacataatgaatttctttttgtgttttcatatgaaatattattcatcatgagaattatttattttattaggcttattatttcatgttgtctataaattccttttttatttttattttaatagtgttatttaaggatttcataaaatgttttgagtttttattataaaatgttaatttatgtttttagcatcacaataaatactttcaatagtttcacaagtaaattggtatgctagccgacctttcagttatcaaaataatataaattatttttattttatttttcttcatcgagaaagcgagagaaaatttttgattgacccttgatcacctgacttggctctcaatccttgtattcttttttcctccccggcgattgccttttttcagccaatagttttcgcttatttaaaaaagaaattaaaaattttcaaaatttttattcatctccctttttgatagtaaaaagagagcctttttaacttgtaaataaaatttggtgcgtttcagagcagtctctgaaaaaatatttatgcattaattttgcaaaaattggaaaagtggagcatgttataacttctaacttttcactaggttattagttttaaattaggaatagttttggcaggcatgttgagtttcatttattcaacttaattaaatatttttttattgttttcaacaaaaatttttagcttgcaagataaataaagaattttagaatataaaaagattgaatttcatctttttggttg

SEQ ID NO: 17919 - DNA, 2834 bp, Heterodera glycines
  unsure (1)..(2834): unsure at all n locations
gatccacttgggaagttcattgagcaccgtcttcagagcgatggagctgacgtcgcgcaattgctcattttggctcaccatattggcacaaagtgagtccaccaaagtctccaactgagccaacttaattttgtgcacaagtggtccttaattttatataatttattttttgaaaaaaaagatggggatgaggggtaatggtaatactgccgatagttgccccctttttctgaaaaattttatttgcttccaaagtcatgaaaacatgcttccagggtcgctgaccacaatccggcttccatttcgacctatttcgaacccggactcgaacaaaaagtcgaaaattcaaaaaatttcaaaatgcactttagaaacaaaaagcgaattttggattttttaaattttcgactttttgttcgaattcggatctggagttcgaaatggatatcggattcgtgagcagcgaccctgaaaaccattggaaacatgttttcaggacttttgaaaacaaaaaaaaaaatcttcaaaaaagtggggcaactatcggcagtattatcaggataatccgacagaatgtcaaagggataaaagataaacgcaacctaaacaacgacacgccagattttgcacttctccatttttgtcctgtatcagagtaagcaaagccctcacaatctaacaaatttaaagtaagacaaattggcgctatttaaaaagagtaaccttttgaattctatcaaaagcaaaaggggtgaaccgtttctcacgcagaaattttgtgcgagaaaaacgctgatgtgatcgatctacaccgctcccgatcagcgatccgatgttcgctgcaaactctacatcgtgaagtccgccacaaatttggacactacacaccaatgaagaaggaacaactccgacaacaacaaacaatccatgaagaagatgcactgcttctgctgtcacaacttgggactcaaaaagcgtatgagaggatgaaggcacttttgcgtctgatcggtggaaaatttgatgttttcccaccattgaaaaaagtaaaaatgtttttaattcaaaaaaataaataaattttcggtcacaaaaatcaaaaagactatctgcgcagtactccaatatgaggcgatttcaacgccgcatggaattggatttttttgttccgacattgccggggcactggaattcagattgtccgcggccaaggacaatctgatcaacttcagatcagacgaattgactttaaaattgagcggcgacaacgggcagggctttacgaaattgacaatctcattgccccatgcggcgcatgcaaattccacggccaacaatttcattgtggcagcatatcccgcaaaagactcaagggcaaacctgagcaaattctgtggcaacatttggcaacagatcagtcaaatagatgaaattgcggacaaaaaaatcaaattgtaaaaattaataaaaattttctgaaatgaacttaaatttccagctttctcggtggtgatctgagctttttgtgggcaattattggacactgtggctcagccgtaacgacatttccctcgcctatttgcgaatgccgtcgggaccaattgttggacgcggaaaagtgtaaaatgaggacgacggaggaaacggtgaatcangctgagcagtttgggcgtctcgtgcaaatggagagaaaccaactgttgctgcgcgagcgttgactaagggaatcgtcgatgagccacttttgcgatcaatcaaatttgaccgaataattctggcgccttttcatgtcttccagggcattggaaatgctcgatcaaagagctcgaagcatcaacagaaaacgcggaaattgcaaacgaattttttcggaacatcggggccaggagggaagcgttcagaaaaaaggacatgacggggaactcaatcagaaaagtcctgattcatgcggaccaattggagaggcggtactcagctgaatggccaaaaatcatttgccaaacattggggcacttggcaaaaatacaaacttttacaaaagtgcttttttatttgatatttttgaaaattaattataaatttaaggcacaacccctgtcgccacgggatttggacgaattggaaacgtcgattgatcaatttcggacattcctcaacgatcagccgcggatgcgcactttgctagccttaaaaccaaaggtccacttgctgttgaaccattttgtgccgttcgccagacaacaccaatttttggcacttttagacgagcagggtcaaaaagcattttgaaatttaagtcctggattttttaggtgatgaagcattgcattcggtgtggaggcgattggaacagctgtggaagacaatgcctgatgaagaacaaatgcggcaattgttggaacaccattttgtgtcaaattggcttctcgacacaggaaaaatcgacgaaatgaagcgggtcagtttggtgaaaattgggtttcaaataaaattcccatgcctcaggaccgtgaagaacaacaggaagaaatcggaggccgggagagcgacgaagaaagcgatggagaagaacaattcgattttgaataacagttggataaaaggttttttctttgtttttgcaggaaataaaattattaaaaaattttgagcttctttaaaaactgtgttaccatttcacatatatttatttgctttaaaaacctcaaaatacagctataacatgcactggattcgaacctgagaccccccattttttgactaactcacagaccactaagacgaaaaaaccaacttaattgtacttggagcccaaaattgactcgccgtgtgta

SEQ ID NO: 17920 - DNA, 2273 bp, Heterodera glycines
aaatttttgagtttttcggtttttttcgatttcggtttttttcgggtttttaaccaaaaccgttcgaccgaaataattaaaaaaccgaaacaatcgaccgacttttttgacaaatcagttggccattttttaaataaaattcattaaaaattcttaaaattttcctccggcggcgcctatcggcaccgccgaccccccaaaaagctatcttttcttaaaaaattagccaaaatctcaaattttggtatttttagacaaaatctgctaacaaatagcattaaaattacaaaaaaatttcccggcggctcttatcagcaccgccggacctaaagttatggcttgagctcacaattaaggcaccaaaaagcgcaaaatagcactgaaaaaaggcacaaaaatcccgaaaaaggcatgaaaaaaggcatttaattttttttttggctgccttttctatcattttccaaacctttagtatgcattcaatagagtttcaatagctctacaattttactcagaggaatttttgctttttctattaatagaatattttattgcttttttgaaaaaaaaaacagattcaaaaaaaaccgaaaaatcgaaataaaccgaaaaatcgaaataaaccgaaaaattttcttcggttttttcgatttcggtttttttcggtttttaaccgaacccgttcgaccgaccctcttgtccggtctctagtttttataacattttttgctttttttccttatttaattaagctatagtccgtttttccttttcatatgaatgactttttacatcatttttttgcggcgctcttttttaaaagaacttttcgggaataggggtacggcggtgccgttaagcgccgccggggaaaatttagaaaatttaagtgtgatttgttaaaatatttacaccaaaaaattaccaaatttggcattttgagctaattttttaagaaaaaattgatggttttaggtgtctccgggtgaaaagtgtaaattttagccctatttattaaataaaccataattattagggttgtaaattatatggattaacatattttttctgcgcatatgctatgaagaaaggggctcaaaaatagcatttctgcattaaaatttttagatctgatgaaggtttttagtccttataaatccatattttggcagtttttagtccatagtttggtccaaatttggacatttttgagcttttagtccatatttcgtgcttttttagtccatattttatgtccatatttcgcagtttttagtccatataatttacgaccataatacataattacataatatcgatttttttattgttgatttaaatttaaaagcactaacagaatattaaatttatttttaattttccattgaaaaatgggtggcggcggtggcgataagcgacgccggggaaagttttgaatttttagtgcaatttattaacttatttagtccaaaaatgacaatattttacgcttttaattgttaaagttgtgattgaattctcatcggaaaaaggaataattttgaaaaattagaagaaaaatgaaccacttcaaggggaactgatccaacgaaaaaacgaagaacataacacaccagaccacgcatatgttaacgaaatgaacaaaaaatggcctaaaattcattttttactttttccgcattttttgcgccaaattcctttccctaattatccccagccatctctcccaaatttggaatgtcgtcccaaagatcattgccaatttcatccgctaatgtcccttttgtacaccaccgttgtcccctcagggctaaatttacgtttggaatttcaatttcacgtgcaataactttttgccgtcgccgtggataaataaatcttcgactttttctcctcctaaatattttttatgctatgcatattttgggcattttttgccttgttggcactaattttaaattagaagatgagcagaatttaatatataatcattagggctgccaaaaacatgtacaaaaagcggtcaaaatatgtaaataaatttataaaatggttattttttgaaaaacaaattcttcgtcaagggtgaaataagcacaaaataacctattgtaaatatgctaaaaaacattttagtattttataaattaaatttttggtataattttggatttttgaggatttccaaaaatttccgttaaaaatcctcaaaatctgtaaaaatgaaaatatgtaagaaaaaagtctaacgaaatatgtaaaaaaattaaata

SEQ ID NO: 17921 - DNA, 2500 bp, Heterodera glycines
ctcctgcctgatcgtaccgatatccgcagcaggtctccaaggtgaacagcctctagtcgatagaataatgtaggtaagggaagtcggcaaattagattcgtaacttcgggaaaagaattggctctaaaggtcgggtcagccgggctgttgcgtgaaacaggcggcttttgcccgtggctgcgtgctgttctttcggggatggtgcgtggactagtggtgagagctgcttgtggagcgcttcagctgcgtgtatgctcgtcagggtatgcacttcggttggcgctgaacgaccagtttagaactggcacgaactcggggaatccgactgtctaattaaaacagaggagacggatggtccttgtggacgttgaccgtgtatgatttctgcccagtgctctgaatgttaagccaaggaatcagctgacccgcggtcgtaatagtcgatatttttttttgcaaatttcatttaatacaatggcacttttggcttcattcatcattatctttcgttgttttgctcctcctcctcttcctcccctctggcccatctgtccaataaaaatatttttgtctccgtttcgccccttttttggccaccgattggttcggactttgaggttctctggtagtaatgatgccacctttccatcgcattgccttgcctcagctcggaaagtcctatctgcaaatcaaattttgccagtttaaaaaaaagcgattttttgggaatttgtgccgaatttatatggaatgccgcaattagtgatgaaaaatcaattcccggcattttactgcgttcattcaacacttatgcaaatcccctctcaatcccgagaatgaataatttgcccgactttatctcgacaattgaacccgatctctggtctgattaacagattttgtctaaaaaataactaaatttacgaatttgagcgattttttaagaaaattggatttaggatccggcaacttttttaggattgaaaaataaattttccttaattagacggcttagaaaatgccgattaaaaagttgtttttttgggcggcacctctttgagcataattgctgttgggctgacagctgttgatacggaaatgaacgatttggaggcagctcggaccctttcgcgcgctttggccaattgatccgctctttgacggcacttttctcgtcggccaaaaggaaaaaaaattctaccatatttactaaaataatgcacgcaccccctaaaataaagccccccccccttttagagggattgaaaatagagccaccgggggctctattttaggaatggtaaattaatctaaatctcctgattaccgtactgcgaagcctgcaaaacagcagcacacataccgtagcaacaaatcacggtaaagctataaaatttgagtgattttttgggttttatcccataatttcccacaaatttttaatttttactaacctggggataagcacacaaaattatgacgaccacccaacaaaacaatatgaacaggccgagcactgaaaaaaatagaaaatttttacacaaattttctcaaaatgggaaatagaaattgtctcgaccagctatcactttcacaattttctccattttttactgataaatgatcagaacagtcagtcttttcattggttgttccgatcatatctatggaatttgttcagactaacttatttaatgatgtgtaataattgaagaaagcatctttatctttactgatcagttgacataataaatcagtgccggcacgaaaaaggtgactaactttgacgcattttatacatttttgtgaaaaatttccaaattttctaggccttttctaccgggattttccggttcgagactcccgatttttgctaatatttattctttccgtctcttccctattccctctggatcaaattttcccataaaactcactgaacagccttttctgcttttcattgtcatccacgagcagtgcgtcgtcgatggatgtgttggcgtggtgctccattttttacaatttattttctaaaataatttataggatttaaattaaacaaattcaatgggctgaaaatggcacaaaaattggaattaacggtgcggaaaaatgctaattaagaggaaaatagttataatttaattatcattttaattgcttctccggggctttcattgtttgggaatttttacgaataaataaattttcagtaaaattaaaatttatttcttttaagatttccattaaaaattagcctcaaacagcacaaagtccttaaatcattaaaatttttgataaataattgaaaaatattgtggaatagatttaattgaattttaaaataaaatttaaaataaataattttaaacagattttccactccccttaaaacattttaaagtaaaaaaactaatttaacatcttacgaaaatgccaatgccgcccaaatttagcaaaaacggctgaatttgccctttcattaaaagaatgaaaagca

SEQ ID NO: 17922 - DNA, 3099 bp, Heterodera glycines
  unsure (1)..(3099): unsure at all n locations
tgtcccctatttcagtttacacgaccacaaaaattggtctactgaggttttaaatgatntataagatagtttttcagttctttgtaaagaattttttggtgnantgtatttnttttanaaaangtttttttgggaaatattaaaanaataaattataattataattatagtgaanaaatntaattaagatgtagattaaaataattaattaatttaattaattaattaaaatgaattaaaatnatttattgggtagtgaaatgannngnntnttnngatnannnnagantnatanttttttaanttggtngtagnanngaaaaatttagggtttgttcgaacatgaataaagttattgtataaaaaccaggtattgtcaattgattgtattcataaaataccgctggactcataaagtgcattagagcccttaaaaatttcggcatttaatttggcgctatttaatgcgattgctcgttattttcaattgtttaggcatttctccgtgccaccaccagcacttcggcctgctacacaattaaatttaatgttcacgagtcaacgctaattgtgccatttgaattggtgaacggacagacccaagaaaagttgacactgaagaaagaacggaaaaatgatttttataataattattggtggctgttgaagcgatgcccaattagtgaaaaagtggcggcggatcaatgggaaaacgacgaaaattccgccaattttaacattgtccaatttgcgcttaacagcattgacaaaaatcatcactgcattgggtaggtgagcagaggaacacagcttttgcttttgttaatttgagattaccaattttaatttgttgcatttaattaggtcattatgtccaccagcggcgggtcaaatcaaaggaaagggtcgtctgaaaatgagtgccgggcccagtggcaagagaaagaaaaagtgaatgcaattatttgagaaatgatcgatcatttttaatttaatggacaaaaagctaatttaatgctgtattttctctcaaattattcctcatatattattttatttattggttttccttctctcttaaaacatttattttattgtttcgaacaaatcagaaaaattcttcaaaaaacaaatgaaagtgagagagcatttctgatgagagaaaataaattagcatcaaataaatttcaattggtgagattgatcatttctcaaataaaattaattcacttctgcgcagtcattaaaataatcactcattccgctgattttttattgaataattttttcaagcaaatataccaaaaacattgttgaaaccaccttttacttggttaagaattttaaaatttagcctattaaatttattttgaaaatgttattaggtatatttttcaaaaatttccgatttccgacgttttgggggtcggaatttcgatttgcgctttccgaaaaaaattttttgagcctcggaattccgaaaatttttggggcctctgaatgtcatcagttattgcggccattagcggtgggtcagagcaacaaaaaagtcctctatctctgcggaagagaattaattgaaaaatgatcgattgctttgaattgattattggctctgatgatgctttttttcttctttttgcagtttttttaaaatttaatattattttttctaattatttttaatgattttttcccacatttgttggttctttcataatttcgaatacatttaaatttatttgctttttctcatctttttatgcttcttctctatattttttgaggttttctgcatttgatatgtaggtttatgaaaaaatgactatgaattatgtgcatatttaaatattgtatgctttttatttaatttaggtattttatttattgctcgtttagtctcgcttctattggaaagcaaaatgggaagacgtcgacgtcgtttaaggaaaatgtaagcgaatttgtggactaagttagatcgggaattatttgtcgaaaatttcagttggatttgtacggatgtttggatggacatgttcccgttttttgaccgtccccaactcggcctcaaattggcacttctttcgcctcgttttgatgttttagtggacaaatatttcgatggcaaaagcgaattgccaatttggagaccaatcgaaattcgtaaggacagtgtcgcaaaagtgccaaagttgcgtgtgcttattgatgccaattctgttgaatttccattgcccgaccattcgctgcacaacaaaattcgctttgaggacctttatattgggtaatccttaattgtttttgacgaaaatttaaaaacaaaattagttaattctaaataattaattaattatttaaaattaaaacaattaaattaaaaaagaatcaaaagcaatttattttccaccatttttagtttcattgatcactccgtcatcacttttctccgttccaatcaacaaatttgggacaaaggcaccaatttggatttgtggatgcctacatcataccacatttatgtcaagcggtgttggaaagttttggtcaatgaaatttggcccatttttgcgccgaacattcacaacttttccaatgctaattggttgttgtacgaattgcgtcgcctcatctcaccaacaatcctcaccgatctaagcccgctgaattcaatactttctgggaatctgttgcccgattcaattgctgacgatggaccaaatgcaactgctgaccaagtgttgtccaaatggttgcacactccgcgcactgatggccaactgaaccgattgttttgtggcaattatcctatactgatgatggatatcaacaaatggatcatcaatttcaaagaggtcaaaaaagggtactacttttcggttttggggcctagattttaattttaaaaaaaccatcaaaggacgcgcagaattgaaaaaagtatgcgcgccaaaaattattatattgcgggcatatttcgaatcccgaactcgaacaaaaaaaattttttcaccaaactcctcctttattgtccaaattgattcaaatgcactgaaataggatccatggccgtttcatgcatttgaattaaagctggat

SEQ ID NO: 17923 - DNA, 1086 bp, Heterodera glycines
  unsure (1)..(1086): unsure at all n locations
cgatttttcaaaaaaaaattgtaaaaattttttccccggtcgatttttgtaattttttgtgtgcgctgtttttctccttaaaaaagatatttaatttttttaccatttgtcaaatttatgaagctaaacaaacaccgccaaaaagcgcaatttaattatttaagaaataagggttgtaatttcataaaactaacagctgctgcattttcatttcttattcaaattaaattactttttgccaccaaattaaaaattaattattaaatggaatactaaaaaattttcggagaaccgatggacagacagaaaatcataaacatttccgattcaaaaaaattaattaaattttaaggtgaacgaacatgcactttttcaaccaattcatcattgtcattggcattattaaattttaaaaaagcttaaatgaatgcctcagcgaacaacacggtatcattaatataattaaattattttaaataatttttaatttagttttatttggccttcaaagatgtccatccaagctggtcactaattggatgtggattgatttacggactcatcgctacagttgggattattttgaattcttctgtcattcttgtgactttgttaacaaagtatgtgcttaatgaaaggcgtgggaataaaatgatttaaattttttgaaaaactttaattaggtcattccgtggcaccgttaattaccttttggcactttgttccctttttgaattgcttcatcaaagtggccattttctgtttgtgtacaccgcattttctggacagaatttcattgagaatcgtctggcagcaaaaattcttttcatttccacgattggactcggtaatatatgtttaaaaaattaaccataataattcaaaaattatattaaaatataaattcaggtgcaatcactccaacaatgtttttcactggcattgaccgactaatcggaattgctttttcggaaatgtaaaaaaaatttttactaatttaatttttattactaantttagtcacgataaattaaaaacgcgactgtatttggcaatgactactgtcatttccttgtcatatggatt

SEQ ID NO: 17924 - DNA, 1687 bp, Heterodera glycines
  unsure (1)..(1687): unsure at all n locations
gactaaataagcactgcaaagaatgggggtctgggtgagaaaagagaagggaattggtgagggataagaaattttgnataaaaataaattaaattatttattttcatttatagcatatatgcatatcataagtggtatagtggctaaaccttcttactttcattatttgtccgtcggttcaattccctgatggaacagaaaatttttttatattttctttaccattattttaattgaatttaattaataaaaaatattttaatttaaattattatttttttcatttttaatagcctaaaaacccataaattaaccaaatatttggtcattttttgacaaattctgttaacaaatctcgctcaaaatttcaaaatttttccggcggcgttttccggcggcgcctatcggcaccgccgggccccgccccctcccaatgttccaaaaaagttttgaaaaaacattgccacaaaaacagcgatctaaaagcaaaaaatttaaaagattgttaatttatttaaaaaaaatacagaattttgggactcagaaaattccaagaaccccccctgataacaaaaaacgtaaatacaaaattttatgggtacatttttgaatattggcaattttcgtaacaatgtgcacttaaattttcaatttttttcaaaaaaaattttcacttgggaaaagtcccggttggtcccggtcccgggttttttcgcggtcccggtcccggtcgaaaaacttggtcccggtcccgacttttctggtcccggtaagtcccggtcccggtttttgtcaaatttcccggtcccgctcaactctagttctgatagatttcataaatcctttggcatttttaacaaaaattttcataattttttgtaaacaaccaaagaccaggtttcaaaaaagattcaatataattttttttttaattttggcgtttttgttaatagaggacactcaaatctatcgaacaataccaagaattgtttaaattggttgcttaggaaaaaattatggcaacttttttgtcggatattttaactgtgttatatttttcagatcattcctctgtttgttacaataagtaacttgtttactataatgacttttgccatttatatctttcttggcattacaatacgtataaaagcatcaggtaaaacatattaaatatgatacaccgccggtatttttatcgaaatttttgtgcttttttactggtgttttttgatcctgcgattcaacctaataaatggtaattaaaataaaaaatataggcttgccgtccgctgattcgtttaatcgtcgcacttttcgtgcccttttttgcattatcactgtgaatatcggcggctatttaatctcagcaattacttactttctgctaattccaattgcttctccggtcaatgcttttttctgcgctttaatggccgcaattcctatgaacattggcgcagtgtcaaacggacccattttatattttacaaggtgtaattatttaatttaaaaattatgttaatattttttttactattagtacggaatatcgacaggcatttcaaatagtgtttccatttgtattcaaacgaatttccaaccaaaatcaagtcgcacctcagcaaaatgggcctcctattcgcgtgatctcacaaccaagaataattgacagtgttaaccataa

SEQ ID NO: 17925 - DNA, 3389 bp, Heterodera glycines
ttgttgtttcacttcttaatttgaaaataaagtatttcttttaatttatttaaatttttgttttttcaaattttattttctaagttaattttgttatgcttttctattgttggcacctccactgattgcctttgcttcttcttcttcctcctgtgccgttctgttcctccccgcttccccctttgcttttcctccgtttgcttttccttttcctttttcgtccgccatttccgtcccattttgcttctgctgcttcttctgtgccgcttctgtcactgcttcgttttcgtccgtttctccttccactccgccaaattgggcttcctcctctccctcctcctcccgttgttgtgcccgtaacaattgggtgaccagctccaactcctcgtcctcgcccgtcactttcgcgccatcttcatcaacggcatcatcaacattgtgatgctgttccgcttgtgttgtgatcaccggttgctgctgtttctcagcgatggtccgtttccgatcacaatttgtctacaaagaacaacaatgaattgttggaaagttaaaaaatttaatgctttacgttttaaacataaaattaaacaaaaatgattttttttttttttggtaattatttttaatttatttctttcaatttgcttttgtttttcacccgtgggcatggcgttatcgccgacggcgtttttccaattctttcctcacacctttctacggtacactcaaagtggatgacgctgccaatgttcaatcttcgttgatcaaattgggtattgaaaagaaacatttgcgggaattttcgcagtcgctacagtaaccaaaggcagtttttggtttgcggtagtcaaactttgcgttgattgagttctttggtttcgctgaattatcattgggagaggcgtggaggaaaagctgttgaacagcagacgatttgattgctcaaagtcggtgatcaaatgcttgtccatgctgcaaccgtcggagtcgatcagctaaaaaaaggggcttaacaaagtcgaaattgggataaaaataaattttgatattaaaataattaaaaactggaattaggttaaaaatgaaaacaaaaagaataagcatttatttataaaaattgtttgtttaaatgaaagggcaatttcaaaaaatggtaattatttattatttaattatacagtttcaaaaaaatgttattttttcattaattatttattaggtatttttaattaatgttgataatctatgttcaaaatttgagtgatgttgcgcaactcattccaaacaatggccaacaaaacccaattgtttttacgtttttgcccatcagtgaatggcaaacgaatgggtattgtggtacatggtcattatttgtgcctgttggtcaccaacagcagaaggaaaatgcaaaagttgaagctgttcttttattgggtgtaattaggcatcatttggaagcctaatggacacaaaaagagtaattatcgctaatatgagcaaaaaacgaatgtgcattcgaacaaaagcaaagggagttttgtgctgatgaagcagcatttgatgaaaagaaaaaagaacaaaagtatgaacaatttataaaaacataaaaagaaaaattcttaaaccaatgaaattaattaaaaatatttactatcggagaggcttataaaattaaaaaatatgagaaaattaattgaaataacttaaaagactttaatttgcaagagtcgaaaaattgaaatatatttattttttaatattttaattgaaaataaagtgcaaattatggtgtgatttgggagaagctgttgctgaaatgattgtgctcgtggtgtcgtcgtatttgctgctatttgcctctctttccgtgcgcaaattggcgctgcgcgacaaaagttggtcgatgggcggaggagcgaagcggggtgagggtgggcacaacaaatcacgacaaatggggggaccaatgcccattaaggggttatttgcataatttaaaaagggtaaatggtaataaaatgaacatttttaatttttggtgatacgaacggaaaagagaaaaaaaaataaacgaacatttgaacattcgctggccaatttaaattatttaatctttagtcacaattttattcacctgcactttcatttgctgatcagctgcgatcgctgcacaggaatggacaaaaatgctggtccattccattggttgaacagcttgcaccgacagattgtattcagtgccaaaaaaggcgatatcaacagggaaacgagaagcggaagtgccattggaagagacaatggccaagcgaaagtcactaaattgtaaaactagttcaaattcaaagacgtagccagggtgaaggaggccaaccccacagaaaaagccaaaaattatttctttttttaaaagaaaacgtttgaaaaattaaaacaataacagaaaatttttgtaatattttaatgaaggccaatttgaaaataaaactattacattaaaaggaaggaattcatcaattccccacaaaagccacctgctgggttgatcagcagaagaaggaatgtcacttgatgaatgggaccagccggtacaggaaatgttcacagttctgtcctgtttcagcatcaccagcggatgttcatgtacttcgagcagtacccacaatgttgaggtgtccttaattttttgaatttcaaatgcactcacaacaacaagcaatcaatcatttagccaacaaagaaatgcctgccggggattccccggcaggcattgaatggtatggcatggcaattccatcacataattaggcgtttagagagaaaggaaaagcttttcattcaaccgaaaatttatgccattttaaagcattcttcgacagtccttcagcagagaacaaaacaaagaaatgcagcaatgatttctttacaaaattaaagggaattccaacaaatggcagcagaggataaaggacgaggccctcaaaattaacaattttcatttctctgatcgcaatcccttttttcaagtcagaaaaggaggggaaacaaacggcgcaaatcgagtgcaaattgttttgcggcaatagcgccataatttatgccaaactcagcagcctaacattacgattttaggaatatcctaaatacccgaatattcatctattgttagtgctgttcgtgagttttgaactcgagttttgtttcaaagtttgggttttttgagtcttaggtatcggtctcatgaggtcaaaaaacggtcatttaagcactcttttatcttgccgactttcacggcaattaagagagacaattatgaaaaaacagatttgaggaatgtcttctcaaaaaatttagaaatagcaaatgttttataaaataattagggattagaa

SEQ ID NO: 17926 - DNA, 2062 bp, Heterodera glycines
cggtgctaggtcgttccacaaaaaagctcagtgtgggcgttccacaaaagagctcactgatcgataaaattaaataaataaatttaattattcaattcaacaaaacacggtgccgtccggttaatactaatgtacggcgggacgcaagtcattttcaaattttttaatttttcattttttgacatcacttctcgccaattttctccatttgtagtagacctagcctgacgccattgatataccgttttttagagctcatcgagctgtacaaaaaagcggctggtaccggcaagcttagcttgggttggccatcgacagggtcgggggcgaggctgagggtcatccggcagatgtgcccgaccaatgacgggctccaagtgaatggatcaagaaccggacccggcctgggagatagcccttgaaaaactgaacaaaaaattgttcttaaccgggccggtccgggttccggatcaggcacttttggtgccccgaaagtggtgcgataggcttccggaaaatgaccaatcaatcactgagcttttttgtggaacgactcaccacgtcactggtctattataaatgtcttaaagcaaaatcaatgcgatcagaagcaatcactatcaaacaaaaactatcagatgccattcattagcgttttattggtcattatttgcaaaaatgccgtgcgctttcagaggcgggcgtcgcattgtgtgccatgacgaccgttacattctgaagacggccgccgagaaacaggcggtgatcgtgtccaacgacgagtaccgcgacttggtacgcgagaatccacggtggcgcgcggtggtcgagaatttgttgctgatgtacagctttgtggacggaaagtgagtagggagagagaagtcgggaaattttttggctaaaattgccaaaaatcggaaattttgctgaaaattgggtaaaaattaattgggatgttatttatttgaaggtttatgccgcccgatgatcccctggggcgacgtgggcccaaattggaccaatttctgacctttgcgcacactccgctgaatgctcagctgtgcccttacgcaaaaaagtgcacatatggcaacaaatgcaagtgagtgaatggcacggcatggacaaaggcgtaattatgccaaaaaaaataaatgaataaataatttaaatatatttttaaagatatttccatccggaaagagtaaacggcgtttggatcagtgcaaccgagcggttggccagcagaatagcaaacggaattggcatcgaaaattcaaaacagctgttggccgcaagtgagttattaggggggggggcaattaaaaaggcgggttattaagggtaattaaaatttaattaccgttttaatgtttgccttcagggccctcaatgatcgctgaacactcgcagagacaaaatgcttcttcttcgtcttcatcgctgttgccgacgacagtacggcacaacaacgtgggacggacgcggtcattaaactgcggcggaggcgtaactgttgcgccgccactgttggtcggattggcatcaccaacgacggcacaaatggaggacgagcagcgaagcaaacagcgggaagagaaccaacaaacatcgattacggtgggtgtggatactgtacgcatacagtcgggagtggaaatgcaggtggaatgatactgtattacgggagggaaatatccgaatttccgagagtttggcttataagggaggtgtagaagctaatcctggatttattttagcccaagaatcgagcccagcttaatagtgcttttcgagaccgaaaatttcccgaaaccgaaaccaaaaaaaactcgagacttccctcgagtcgagtgagactctcgaacagcatacagtcgagaaatatcgcgctttctcaagaccaaccgtagaacttttgtgccgtgcgttcatgatcgaaattttatttcaatttatttgcagcacgatcagcaacagttgctgctatccccgccgttcccgcgccatggccatcaaacgctgttccgtttcgagtcgagccccgcaggcgccgtcg

SEQ ID NO: 17927 - DNA, 2741 bp, Heterodera glycines
ttggctccggcgccaaaaatgatcagaaaaaatattgccccccgttccgaaaaataaaaaaattgaaaaataatgatagcgtggatatttgaacactcacagttgggtatgttcccgtgttagaggctcatttatcccaacattttatagcgtcctttttccgaacgtttggatttattaactttacctcaacttttttctcacaataatttttaattttgtttttaattgtttataattgctttttcctgactggtttttacgtataaaatttctgagtttaacacacttacaggttgcacacattctgcaatgaatctaaagttttacaataaacatacgcacatttttggagaaatggttgttagagaaaaaatgtggaaatctgctttcggtgaaaaagcatcgcctggatagtatgtttttgatgaagagggggacgaggcggatgatttaacgtaagattagtgcaaagaaatttcattcataattaattataaatttagcctcggagtttcggattttttgcgccttgaatgtgtgctggattttaaaaacaagaacatttcttttacaaagaatgttgtaacgtattttgttgactttgagattgacgaccaaccggacgatgagaacgccgcttaatgttttgaatttttaaaattctatgttttttttttactttattggttacctaaataaatggattattttttcccttcatttcattcattatttcttaaaataattaaatactttattatttgaactcatgtaactcgatctttgtcatttttaaattttgcttttgcatagaaaataatgaccgttgaaaaatcggtgtcaaaggctgagagacggcgctgcttttttgacattcacatcgatggtgagcctgttggacgtattgtgatggaactgtttgacgagcttgttccccgcacgaccgagtttgcattcaatggacatttttgcgtattttatttgaaaacaggaattttgtgatgctctgtactggccaggccggcattggcaaagtgacgggcaaaccgttgcacttcaaaggctcaatgtttcatcgggtcatcaaaaactttatgatccaaggcggcgacttcagcgccgcaaacggcacaggaggttcacattttttacaaagttattgtttttggtcggaaaatggaagtccaaatttgatagttttgaggaaaaaagggtctgtccgcaattgcattggcattcaaaagaagggttttttggtgtgttaaaatattttgtgacgcccttcatctttgtactatgattattcatgacgattatagggttgggcctacgaaccagaaaattcgtccagtattttttgttttgtctttgtgctgaaactctccctggttttctgaccttatttgttttggactccgtcaatgtcccccaaattgaatgaccatgtaaattccaatttttatgatttaggcgagtccatctacggcggtgtgtttgatgatgaggcatttgtggccaagcatgaccagccatttatgctgagtatggccaaccgtggcaaggacaccaacggctcacagttcttcatcaccacaaaaccggcgccgcatttggacggaatccatgttgtgttcggcaaggtacaacttttagtttttttcgcttcagtttttttcatgtcgttctaccgcgaaaatgtcgtgcagttacaaaagttttttaatttaaattgggttttggctggttttcgggcagtttttcgtggtttcaattcgttttcgtccatccaccacaataccaaaagtttgcccttcatttttcgaatttagttatttttagagggttttccgaattatttcttcaatttttaaattatttcaaaatccaaattttgtttcagctgatctcgggccaagaagtggtcaccaaaattgaaaatctcaaagtgaacgcgaagagtcgcccgttggccgacgttgtcatcgccaacagcggccaattggtgaagaagcgcagtgcgtcagcccatgacacggaagaggagggggaggaggagaacgaagacaggttttttgggggaggggacgtcaattacacattcagatgacaataaatttgccatgatttgggatttcgaggcttgggagattgggtatccaatagggatttgttttttcaagaaattgggaagggtggaccgaatatgaaacaatttttttttgcatgcgcatttcgatcccaaaaattcataaaaattgaaattttcaagagaaaatggcaagataggcaggaacagatgatcatttgatttgcgtccgtcataatgaaatttaaaaaaaaaattagaaaatatattttcccaaactatcccccatttagcaccaaaaaacggcaccatacgcgtaagaaggagcgcaaacggtcttccaaacggcacgacgaagaagaggaagaagaaaatgcggagccaacagcagtgcaaattccgaagaatgagccggagaacatttcgtcagtgaagctggaggatttgccgcaggtgccgaccaccaacaaatttttgatgcgaaggtgcgctttcattattcgaccattttgcccactaggtccactatcgacaactctgcatacattcacaggggtgtctcagcccaacggccatacgacggacgattgggacaggggggtgtctcgggaccgatttatcatacgaaagtccacgtttttctccgacgacg

SEQ ID NO: 17928 - DNA, 996 bp, Heterodera glycines
ttgttttttgaaattttaagcccaaaatgggtagatttgtcattttttgtggtctgagaaaatgattaaaccggaaatacagaaattttgtggttttcatatcacaacctcttaatatatgacttagactattggtaaaatttttgaaaaaaatttcgaatttcgcttttcgcatattttggctattcgcatttcgcatttttcaatttcgcaaatttcgctttttatttttcaatttggtccatctctggtgcaaatgtcttttttggggcacattatttgttgtggagcttcataactttattcacattcaaaatgattcacaatataatttaaaaaaggagagaattttgaacaaattgtgaggtgtacaaaaaaaaatcaaaaaaaaatataactactgtggttcatatgtccttttaaagttgccatgttaaacgaggcatgagcagcatcaacacgaaatgtggaggagagctaattttaaatgaacattttttatatttaaataataattggtgaacggaaatttttatcttcccatcccaaatgccgaaaacgaacccagttatcactaaatcaaaagggaaattgtttacgatggtttggatttaaaaaaactaaagattgtatcggttcagatttttcgaacatatgtaatcaaattttcgttattgtgattttaaacacccataaaaaatgggccaaaattatttaataatatcacgaattgaaagttagcgactctacaattaaactctaccgtttgcttcgagttccatttgaacaatctcaatcagcttagaaaaagttggataaatcaaagcttataaattaggcgaaaattgaataattatgccataacagaaaaaacttttttagtttcaattgactctcatgcaattgaaacgctgaaaaattgtttgcgtcattgtcaatttacatttagagaaattttttcaaaaaattatgctagcttttagcaattttcgccac

SEQ ID NO: 17929 - DNA, 1608 bp, Heterodera glycines
  unsure (1)..(1608): unsure at all n locations
atcggattaaccttccgtattttccgttgccgttttggcgaccatgatgatcaggttgtgccaagatcgatcaggaaagatcaaattccactgtggccattcgctgaaattctaattaccgttgttccggtgccgtacgatttcgacttggttgccgggcggaatgctaaattagcattaaaaaataactttccaaaaattagcatattccaactttttttttaaatttagaattagactaaaccctacccctacctatactctttaccccccccccccacttcgccgaggcgctaatgatttattaccaatgttgccgagcgggattgggccgtccatgatccgttttccaagtccgagtgcgcactgcgcagtttttaacccacatgctgctattgaaatttttttaaattattaaaaaaattttttgacagttattcccgtaaaattatttttgcatttatttttaaatttactaaattaaaattatttcttgctatcccaatatcaaagttcctttccttcgagaaatttaaaaatgtcaggagcaactctgtgaagacatttaaaaaaaaccgaaagaaatacatatagaatttttgtaatacaaaaaattctagtaattcatctagtaattcatttaaaccctcacatccgattttgaatgaaatagaaaacatttgcaatttcccgcatcgggtcggcaaagcaacccgaaaataatcaaacttggaggatcagtaaaattcaagttcagttttcaaaatggtaattatttagtaaacaatttcatttccgaataaatttttcgtttttgattttgattcaaagaaaatttgtcatttttaagtctttcgcggtttttaagtaagcaataatgattagaggaacttaaaaaacatttttttaaatatatttggcctaatttattgaaagttaataaatttttttgaaattttgtaagcaaatagagaacctttaaggctatcggatgataccaagaattaaaaattcggttgttttatgggggtatgtcattgaaaagtactgtaaactggaacttaaatttatcttcaatttaattttttcaatttttacccaatataattttgtaaatgtcgtctaaacaatgtgctgctgccaaaaggacaaattgtgaagaaatcagagaagcagtactgttcggtccgagggtttaaggaagacaatcaataaataaatgtttattgacgaacaataaataaaaagcgaagacaatttggtcggaggcaaataacaaaataaaatgaatgaggggaaagaccaggagggagggaatgaccgtctatttatgggcgagtgacaacaacaaaatggcggggatttgaatagacagatcgccaatataattcaaataggctcatccgaacacctccccttttgagcggctcacggcgagtacctttgtggggcacgtctattccgttgcgggtatcggcgtggctgaacttgctgatctgcttcttcggccactgattcgtcgttgtctaacggactcagatcattctcgagtccctnctcttgggccaggggaaggggctcatcctgagcttccaactcatggcaatt

SEQ ID NO: 17930 - DNA, 3297 bp, Heterodera glycines
ttatgccttagaaaatttaaaaaattgtttttcaaaaaggtgtataccatcgacaatattaccacattttttatttgtagtgttattattattattagggctttaaataaaaaagataaaattgaatttataacactggaagcccatgggatttaagagcatgcatcacaaattatgtgtgttgcggaggtctacgtcagaaaatcgggcacaataagataaaacgctatgatagagagagattcttaaaaattatttcataaaaataaataaagatgaaaaattgatagcggactatttttattgaaaaaaacccgggaaaaatactgtcaaacttttgcttttaatgattattttggaagaaattcaaaatagtaaattgaaattttgtaatttcaaacatatactaattcatatattcatacaaaaataaatcaacaaaaaaaaattttgctcccaacaaaaaataagtaaatctattttaaaaaagctttattaacacagcggcccaattttgggctccaagtacaattatgctggatttttcgtcttagtggtctgtgagttagtcaccaaaagggggtctcaggttcgagtcctccttatgttgtgtgttaatttcaatttcttcttttacagaagaaggcagaattatttttttattaataaaagttttcgtgtcaataaaaatcatattcaaaaagcgttggttacgtacaacatcgacaattttatgaaatttttttagcttataacttggtgaatagtagagcaaataaaaccattttatgctcattttgaagggaaaattctggagaatattgtaaattttatttggtttggccttaaattgtggacttggctaaaaaagaattaaattattgaaatgttcatcccttgtaaaaaaatttttcctattgcttaattttcttaaaattttgcataggccaatattttgacctcctctagcgattccaagtttattttatggaacttaagtttttaactcgagatcggctcttctaattttacaagggaaaatcccaaaaaaattttaagttttgcaaagttttggcgttctgattactaaataaataataaacctatttgcactgagagcccaaaattggggccgctgtgttaataatgttaataaaaaaaaatcccataaatttctttaaatgaaacatttttaattgcatattttcttttcctattttagaaattaaaatggcttagtgacgagggcagcggggcacagcgggggacaaaatatgccattctaattgttgtgcacatatttagcacatcaatcgcttgacagaacgggggaccaaagcaagaaccaacaacaaatgaccaccaatctttaaacggcacatttgttctgccaaaaaaaattaaaaattcttttacgcatgggagaaaaaagaaataattcccgcggggaattggcggggcatacccaaactcaatatggcacgggaagccgaaaacgaaatgagaaggcaacatcacaaaccattggcacatatttatagttagggcttatattaggggttatttttgaaaattttagcgtcgattcttaggggtctaatttttgttgggcataatgcccaaaagacgctaggtttttcaaatttttggacttttaggctctaaaaataaaaacttggaaaataggccctaataactcgaaaagtaagccctatttatagttattgagagcaaagtttggccaagtgttggtggacaagcaatttccacttttagaaaaatggtggacgacgaatggacgagtgagtgaatgaatggaatggtcgcggatggcataagcaaatgggggtggaaaggggggtaaataatttggtgccaatggtcttccgaccgacccgccgccagtggttgcccgggcaacccaacccatcggcacaatcggcagaaattggcacagttatttgagacaaggttgggggagggttagggacaagcgaaaaatagccacaaaaaattgagggggaagtgaaaagtgtaagaagcggacggtaatttaacggaaaaacaaaaacaaaactttttgaaaagacgcaaaattttaattacgaaatgagagaagggcaaataattttttttaggggacacttaaatttctttgctgaattttatttaaaagatttgttaaaaggatatatttataccaaaaaaatgtaaatttttgacacggttcaatttttaaaatttttaacagtttgaatttatcaatgtttataggtcttttttgaaacaatatccaactctttaatttctgttttaataaaaataattttattttgattactctaagaaagataaaattgttttcgattcaattaaaaatttgaagaaagtgtcaatgttgtgacagccttgagattaaaagtttttctttcaccaataaatttccgttcgcgagggattacatcgacatttgtgacgacattgaaggattatcaacagtcagtcacaatgttttgccacaattttgttcattttataccaaataaaatgccattgggataattaattctctcgtcaatttttttttttgcccagtttttttttttcaaattttatcctcgtaatatattgaattttgtcaaaaagcaagttttataaagaaataattttaacataaaatccttaatcagaaatgcaattagaattcataaaaatttaaattgacaaaaattttaaaataaataaaaatttacaaatattttcaaaattccaccatttattttccatttaatttttaaattaaatcataatttgtgtgaagatttatatttttgggctttcaccgaaacaaatttataatttttatcaaggttcgaggccgaaaatccaatgtttttttctgcgaggaatggctttttggctttctaatcctgtgggtgcaatcttttgctgccccattaccttggattagggtgactcaccatgaccaatttttaatcaaacatatgccatcagcagaactaatggacgcattaacgggacaagcagcacacatatttataagcacaccagattagtaggatttgggtgcaaaagtcaagaagtacgatatgttttcggacattggatgagacgagcttatcccttccctaaatcataaatccgttggccagcaaaagcagcaaaatccccgggggctttaatggcaggagagaagcggctttgtgtagtcggaaaagcgatttgttattgggtgaaaaaggcttggccgtcatatgatgacgccaggtgaccatc

SEQ ID NO: 17931 - DNA, 946 bp, Heterodera glycines
attttatgggggtttatttggggatttctatcctcaacaagaaaaaaagttattccagaatttctggaaattttcgattttaattataaatttcaataccattatcaaaaaaaattttcctttcttaaataaaagaaacaaggcaatagcagagaaattataaacagtaaataaattgatcaatcccaaaaatcgcagataaaatattataaaaacttttaaaaagatcagcaactctgaacgcctttcccttcttttagcggctcgttaaaatacttttcaacgtattctccatccaaaaattctctctcgaataattcctctactaattttttccatttttcctgtaaataggggtaattattattaacttttgaacttacaatttacattgatttccttcttactgagtaaaatggacacttcaagttcacagctagaaattattttttgcgccgccgaatcaattcgattttttaattctggacccgggtctaactcatcgtcaatctgaatcattaaaattttttcaaaaaattaaaatattttttacgctaatgcgccccaaatcatcgctgaagccatattttttcacggaaaggtaggccaactgaaacaagaacagaaaaaacgataaaaataaacacaagctactttgttcgcttcctttacatcgcccgaacaagccgttgtggaatgtccattccacattatttccgatattctgccggccaaatatgccttgatgttgccgaataccttctttttactcatcatcacttcgtcgagtttgggcagcccatacgactaaatagaaaaacaaaatcaatatttaattcttctaaagaataattatttttacctctcctaaggcaccactttttggtatgattgtgacgtatcgtagcggagtcgcatcgccgtcaagcaccgctacccgcgcatg

SEQ ID NO: 17932 - DNA, 2785 bp, Heterodera glycines
  unsure (1)..(2785): unsure at all n locations
caattctgcgcgttcttnttacctcaaacttgggtaaattaaaccaaaaatttaaatacaaaatgaaaatgtaaaaatacaatttttacagtaatgatcgatggggtgaaaaaaggaggaaatgggagttttcctcaagtgtgatgcgaatgaatgtgccgataggggaatttgatcggccttaaatatgagcaaaaatgagtgggccgataatgaattgcatgtgaatggaagaaaaaatgcgtaaatgagtgacaggtgagacgagtgaacaaacaaatcctacaaaactttactagggaaaatggggtgatagcgtaaatgggccacaaaatttagttactaaaatagatattctcattaatatttcaatttttaaatatttattccatactttcaaacattctgggattgcccaaacaacagtagcaataaaacttttgggcataataataaaagaatatgccaaagccagaggcgttcagactgtcatttttcatattcaaaaattattgcaaaccatccaaactttgctttgcatataatccttaattttcggctttctgagggaaatcttagcaaataaatcaaaattaatttaattattactacaataatgaacggaatttttttaagatcgatccttattatcattatattttatattatttccaaacgattaaacattgcttgaaaaaaggattgatcttaaaaaatatccattcattattgtagtaataattaatttaattttaatttatttggtaagctttaaataactatttgggcagttttagcacttaaaaatttcatcccaatttataactgtttaaatttcacatctataaaaaattgtggttgcaaaatgcaaattaggcgattgatttgtcaatgattcgactgggaaacatcttctctactcgcgatgagaaagagccaaggtatggccattctgcgctaatttatttatccgagtggtgaattgggaaagcaaatgtcctatcgttaatttatgcaatggaaacgaatatttttcaattctgcgcgtcctttttttaaattctaatctaggccccaaaaccgaaaattacttcagggtttgatttacttttttcctcttttgattttatttttcttttaatttttatttactcattttgctgtttattttaattcacaaaaagtaaaaataattataatttaaaaaatatacagttttatctcgtgatcataaatagggcatagaattatatggaaatccatattttttcctagactctgggaggcgcctgggatgtatgaaaaacatgtttttagcttggtttgaagcttctagagtggatttctatatccatatatttccatatttcgccatttatgtccatattttggtattttgtccatattttatgtccatatttcggcatttttccaaaaacatctattagaacggccctatcagctaaattggcctttttgacccccaaagatcggaaaaattcccaaaagatcatttttttgcaaaattttctcgagaatattgaatttaattttaaatttgtaattttatgtcaaaaataagcaaaaaagcgaaattttcgctttttgtttaccttacatttagcgaatttgaagaaatttggagaaattacaccctcaattttgaaaaatttatgcccatcttttgtcattttatgtccatatttgagattttcgcaattttatgtccatatttcgcgatttgttgtccatataattcaacgccctaatcataaattaatttaatttaaaaccttaaattcctccgtatttcttttatgatttctaaaagttttattgtcattgttatgtggcaattttggcctttttcggttcaaaaaacaacacacacctttaaagaagggatcaagatacaataatggacaatttttcaatttctcaaaaaaaaattttcttttttttcgcctgtaaagtcactaaatataacaaagactatcaacaaactcaaaatgcttagtaagaaatagaggtggaacgcggatagaaaaacccgcggtcgcgctccaacacagttaagaagtgaccggccgaaaatagttgataatcgagcaaataatctttatttttgaatttacatattatttaatatattttgaacgaatttatgaattattttttgtattttcctcaacatattatattaatcaaattcatcaacacaaaatattagcactaattgaaaaataataataatttacccaaattgccaacaaaaagtaaggccaaaattaaggatgccatcaagaaaacagtcattttggacgagttgaacatcatttttaatggtcaaatgttgaggcaaaaaaggcaatgatgagcaaaaggaaaaggacaaattgtatttaaaaataataattataataatatttttagagcccggacgggaccggggccccgcggggattttgccgggacccccggtcccgggttttttgggcaaacaaccgggaccgggagtgccggaaaaaacgggagtcccggtcacggggccccgtacgggtccattttctaagtcccggtcccgttcccggccatttgggccggaaaaacgggactaaatttcaccagtgaaactgccccaaatttgaaaaaattaataatttttttggcgaaatgtttttgtttaaaattttgatatgaatgtaaaaatctataaaaattttcacgctggaccataaaaattcatgtattctcaaaaaattgagttaaaatcgcaaaactttat

SEQ ID NO: 17933 - DNA, 1501 bp, Heterodera glycines
  unsure (1)..(1501): unsure at all n locations
ctgcannggtcggtcaaaancggacgaacaaaaaacagaaaaagcaaatgcatttgagagtgaacacccaaaccaatttggcaccaattaatttgaggattttggaaagacatgtcctggggaagccaagctcattagccgatgttggtctgtccttattaataaatcagttcctttggtgaatcacggcttttaagaaccaaaaaacccctaattttctaaacaatcttacaaatgattcaaaataacccaatcattcacctttctctgcaaataagtaattttctcgccaaaatagtaaaggacgtattcgcgactgaaaaattccgagaacaaatagcacaaagttgagccgagagtggtgagcacacagcacaaaagaaagcccagccaaaggccgaacacagcgccggcggcgatattctgagaatggagagaaattagaagggaaatgccaatttattgtcaaaaaagtgcgggaatttgtgagtccgtctcggatttgtgaatgtcattttctaaataaataaaaagtacggaagcattgaatgaatggttattttttagttcatttgccagtgaattcactcgtcgccaacggtcacaaaaatttggttttagcaaaaaccagaaaaaatgagccgggaatagcgaatgtctgtttgtagagataggcacagatgaacagtgttgtgatgtaggaagtgtgcctagttttgtacgctttgaactgttcggccattgtggtgaaattctcaaattgcgtcggcaattcaatgggcacggaggaaaacggagcatctgacagggaaagaagcctttcagaacaaagctgaaagtatcagaaaagggacaaatgaccaaaagattggccgagagtctcgactttcaataattgccagatataattaatcacgcggtacggttacaaactcagcacactgaccaaagcatggccaagggagggaaagtcgcccctttttaggcttttgccaatcattcgcccattggcccgtcacatttttttgttgttttatgctcacttctgccgttctgctcctccttcttttggtgaatggctccgaccatttgactttcgtcgccccattcaggcgcattgcaaatgagcagccacagggagaaagtggcggccacgaaaattgccgggaggatgaaaagtctcgtcattcattcacagctacggtagtgacgggaggaggcatacggtaaatattttatgcgaattttaactgagactgtttggatttagtttattcagtgcgtcaaaaagtttttaaaaaaacattcatcagcaaattcatttgggaataatccgcgaaaagagtgggcataggacaaagggaaataaaaggggggaggagaaggggatgcttttggtttgataataaatcaaaacttggagataagacgagctctgctgataggcgatcactgagagcggttgatggggaagtgatcatcggctcagtgatcggaaatt

SEQ ID NO: 17934 - DNA, 949 bp, Heterodera glycines
gggcgaatgaaaggggggaaaaagagaaagggggagagatcgccggggggtcggatgctaatggacgaaatcgaaagaaaaagctgctggacaagcagttcaatgcacggagtttggctgaggaaggcggaaaatgcgccccttttagcgggacgaaaagccgccgcaacagcacaaattgaggaagcgaaagagaggtcatggagagggatcatccgaacgaaacgaacagccgaaagaagaaatgaggcgagcgaatccgggacaaatgggaaggaaaatgaggatcaaaggaaccaattaataggcaatttcagcggacggaggaaaagccaacgaacgatcagagaaaggcaatcaattaattgggacagtttcccccgaacttcgacgttatcagtgtacacgagcacaaatcacagcaaaacaaaacatttgctgtcacgtcatttgcaatatttaataatggtgccagtcaattagtgaaagaacgaacctatcaaccgaaaaatatttttattaaataataaatacaattaatgaataggataaatacatatatacatttgtacaaaaatgatgtgaaaatcccagcagtatttaataattaatatttccatagtttttaagtggttttggggttgggtaccctaaacggactcaaattgtgatttttgtccgctcccccaaaattcaggtttttctaaattttacatagagctcgagcccgggctttcgacaaattggaaatgcggggacaaatgacagcacttgaaaataagcaaaaacaaattgatcattaaatttcctttaaaaggattagaaaatttgaggtactaattgcttaaaattagtattggaaaagatcggtgaaatattttgagggatggagaaaatctcgcttttccatgagggtctcgccccatcactgccaataaactctaaaatg

SEQ ID NO: 17935 - DNA, 1785 bp, Heterodera glycines
cgaaatgcacaacagcaggcaatgattgaggcgactgctgttgtgcagcggaaccggcttggtgttgggccaaaaatgcacgaacatcgtcagccaacaaaggctttttgttgaaattgaccgccacttttgggcccttttgcatcgttggctgctgttgatattgttggtttgcagaaaaagatgatgatggcaagcaactaaatgaaaaattcattaaaatttgaaatggaaacgaggaaaattttgaaaaattttttttttggttttaggtctgattttaaattaaaggaaccaccgacaatgccgataaagagccaccgatggaaaaattcatgaatttacaataaattattaacaaaatggtgatgagtttttttaaatctgtccgtttttttccaaaaatttctcacctatcgggactcaaaatcgtaattgtattttaggaatttgtaattaactccttgcccaacttttatagtatattgtttcacttctgctctcacctggccagggtggccaagaaagcgctttttcttcccattttggtgccaaataagcattcggcagcaatcaataaatctcgtctttgttgccgattctcatccgtgccgccgtcgtcgtcttcgtcaacatccgttccaattggcgcctgaacgcacacaaccgacccgattgaagggctctaaagaaaagataatcaaaaaatttaatgtaaatttttaaaatttgagaaaaaccggtaaaaaacttcactttcccggaaaatctcccattttccgatcactaattatttgtaaaacatttataaccaataaattaacatgcaaaacacacttctccactgtccgcaaacatcaacagttggtgcacattgctgctgctcatttcgcccattgcttttgttgggttggcatttgatttcattgtgcactgatgccacaaatggtcggccaaagcagtcaactccactcggaacacgtcccgttgaccaaccaccaaatatgcgcaatggtcgcaaaattctgtaaaaaaagaaaatgtttttttaaatgaatattgcaaaattaatgggttacaccaccaaaagttcgccgccgaaattttctttatagaaacagaaaatttccaagaaaaaaaattcaaaaattaacagcgattttttgtgttaatggcaactcgtagtactagtccgaaatagtgacataattttcagccaaaaattcagaacataagcgaaaaatttcaacacagaaatgcgttttttgcaaaacaaaatcaatataaggcgaccctaagaatatcaatacgcattttagtttattaaaattaagaactgaaagtgtcttctaatggcgcaatttatgtattacatacttttagatttaaagtaatagctaattaaaccttctctacgatggttttttgtcaagtatttgattttcaacaaaactatacaaaatgctaaaacccgagcaattttggcctgtctgcaagagggaattgagatatgtataaccgaaaatatttacaatttgttctctattcttgaattaaaaatttcttagttatttgatcaaaaattgattaaaatcccaagattaataaattagaatatggtacccccattttcatgattgccgatcaaacatagggtagtcaaaaaaaaccgaaacattcaaaatcctcttttccttttttgtttaaaaatgcgacagaagaaggactccaatcgtcaacaaaatgtgtaaacctccttagccgtttgacgggcatcctccatgt

SEQ ID NO: 17936 - DNA, 1505 bp, Heterodera glycines
  unsure (1)..(1505): unsure at all n locations
tttgtatcaatgacgcattttncactgacgcattttccactgacgcattttctggtcacgaataaatatgtgcctcaattttaatatattttggtcacagcaaattttccatttttgttcaagatttcatgaatacttttggatttttcagtttttcgtaaatatttcgaaatttttcataaatataaattcatgccctattcagctttgcatgtaatatcgtttcgtctaaccacaaatggaatagatcactggattgaatgaatatattgattcttcatttatacattatatattatattactagacaaattttcattttaaaaaaagttaacattaaattcgccaatcttttcagtaaatagttctgccagaccgccaacaatttcttcaaaaaacaatatataattctactatttcaaacttttcttaccaaaatttcctcaaatacaaatttttcttcagctcctataaaaaaccaaatttccctttgctggagttctgacttttctgcttctccaatccaaatgtcaattgtctttttaatatcactattactcatttgacctcatttctaccaaaagtgtaagcggcacgtgcccttcttttggttattttatttttgaataaataaatatgttacaggcgcaaatgtgccagttccgttttaataatgattttccgggctaaaaatgtttttttccgtgataatttaaataaaaaacaggtaaatacaaatgaaacctaagaacccacacatttttataacattgtaaaaatggctcgtgccaacagcatcagtttagtggggtcactgtcgacgatgtgccgctgaagacaaatgcaaattgtttttggtaagcctttcgatagtcggtgctaaattaatttaaaaagttttttaaacatttttttaaataaaaataatgcctcgtaaaatagagaattggcgcatttgacatggcacttatgccgaacacaaagtaaatgatttgtgtggcgcaccacaaaaacattgggttttcaattagcgaataaatgagccaaaagaacaaaaccgccgccaaatatccgccaaaattcactaagacaattataaaaagagagcgcaacactttggcattgaattgggcagaattggcatttgaaggagcaaaaaatgaactattaaataaaaataaatttaattaaatatgatacttttgcgaaagcgaatgagaacagaaattgctccataaatgaacatgatgaacagaaaaaacagtgcagtgaacatcattccatatggattttgcttctttaaaataattgacaaattactcaatgaaataatataggtaataaataattattattttttaattactccgttaaaagcaatgcgcacgatttcggaaaaactgcccaanatttcgaatgcgtatnggttggtgttggtcaaaatatatttgccaataaatgttgccaatggcgcataaacagctgatcggcaaaacataaaaagc

SEQ ID NO: 17937 - DNA, 1435 bp, Heterodera glycines
  unsure (1)..(1435): unsure at all n locations
cataaacagctgatcggcaaaacaataaaaagcaaaaagttgaatttcaccgctctaaaatggataatttatttattttttatgtatttgctttcaacaattgcttttaaatcttaaaaactagggtgctcgaaaacgagaccataaaaagcccccagcttttctcgagccgagactctcgagcttcttctctgtacaaattcattacgagcgatgggcacccacccaaaaacaaaaagcacaaacttaagcgggaaaagcacagcgaaaagccgttcaatggcgatgaaaagcattaacaaaaaagaaaagggagcgaaaaaattaacggggagcatcagacgatttgcgagtttaaatggcataaaataatggccagaaaaggcggagaaagttaacaaaaagaaggacgagcagggcgcaatttcgctcaacgaataggcggccaaaagaatgttgacggagccgcgcagagtcctaaaaatgcactggaaaaagcttaaaaatcagggcaggatcagctaatatccttttcaaaggactgatacgttgtgttcaaaagaaaaagtgggaaaatctgtaaattcaaaggacacttcagaaaatttaccaaataagggttaagcagcgatttttattttttgtttttgcttttccgcgactttatttaggcccgcctttttcaaaaaatttttggaatttaatcaggatgaattaactgactttttaaataaattttgaaggtttttacggaaaagttggtccggcggtgccgacgaggcttttttcgaaagctcatcgaccaaatcatataataaaaccatagataaaagaacatatttttgcagttttgacgccatgttttgatcagcgcctaaaagtaccctaagaaaaatggcatctttgaaaaaaggacggttcagaatcaatgcaaaaaaggacgtcctttaaaaaaaagagatgaacccgggaaaaataaaaaatctttttcttaagaacccatggatgctctatctacccacaaaatttcattcagagatcccacggacacctggggaccttccttagtcagtaaattaaggattttttatttttgggataccatttatgcgagttttcccatcaaattttaaaaaatgctattttaccaaagaaaaaataatagagccttttaaagtatgattttgaaaaaaagtcctattttttaagtgttgtcatccaaaagtgacagtattgaaaagtatgtgacaatcacatttaaaagaagctttttttgtagaattaaggtaattttaagagtgcttttgcagtgattttcttattttggaaattttcgaaggcttttctaccgtanattgaaatanataaacaaatttaaacactttgttctaattgtgacgtanagcagtgaaaagtggcacaaatctccgacgat

SEQ ID NO: 17938 - DNA, 2017 bp, Heterodera glycines
tgatctcattgtattgctactgctgaatatgagaagcacttgcggatgtgttcgtcgctgaagtctgcggcttgtcattggacggcccaattgcgatcggagcagtgacaacagccgcctttaagaattaaataacaagcatttatatgatgcaaactaacgtaaggaggaggctgctgcggcatcgacgggtgccccatcaaattctccgggtaattgaatgcggtcgcagttgagttgagttgttcacgaatctgacgtgccacctttttttcggtcaggtaaccatagcaacgccaaacaacagacagacaccaggcctggagcacagtgcgcaacagattagtgagaaattgcctgtaaaatgtgggcctaatcttaggaagaatttggtaaaagaaatcaaatagaagtaaacttacactttggcggctcgactctccgcctcattgtttttgtagacgctcgtgtccaaatacaccaaatcactcataacctcaaaagagtaatttgcatatagggaaaaggacacagctaaccttgatcgaaccagccaaaactgcgatcgcagcatacacaataaaaggaagcaacaaggacttcttctcagccttcacaccgtggaccataagtacgacgacaatcacttgcaaacagatggacatcattgcctgtgcttaaatggaccgatggaaagaaaagaaatactgataaaacttacacataaagcgagcagtcacttggttaatccaatggtcggaggacaattggccagtgacggcctagacgaacaaaagtgaattaatgttcaagcatcggtcaaacacccaccatcatgtattggtacgcaaaaaagagactggacactaaggagaccaacaaccgcatgtaaccaatgtacagagctgccttggaaacatgaatgcttcggcacagcactttgtacttttcattctctgagtcccaaagggggtcggcatcaccaaagccaatacgcacttgctaaaaccgtcgttttatttatgtaattaataacttatactaattttactcccaatggacgaccacggatatgcttcaccattgttgggaatgattcagcaaaaataaatctttggtagtttgacaattgaccttaaagaacagaaaaaaaattagttaatcttacaattaattctcgtttttgaaatatatatatttccaccgccggcaattaataaagaaaataactgagtggaattccctctaacccttccctacaccactatgggtcaagcccagtgtcactatgggtacgcgccagtgtcagacaaaattgctcataacgccaaatagcgcatttggcgtaaatttttgcgcgctatttcaaaatttacactggaaaatgccttttttgtattttttattttgatctgccataactcgcttcattcccaattaaactgaacaaatttggtatctaaaaaaagtttttgaaaaggagaatctttttctaagcgaatgctaagcaatttgacatctcagaaaaaagttgtgggaatttcaaacttttatcatgttataacgcaagtcctaggcagctctttctaaccaaaatgctaaatttattcttttttttattgattctaaatgttcaaagtgattttgtacccttataaccaaaattattataattttcgaatttatgttttttcatgtgttagagacatgaaaatagtacgccaaaacgagagaaaaaagaaatacgttattataattatttataacttttgagtttgagcacagacaataataattgagcatagaataatgcagaatttttttctctatcgctatgcaaaatttagcaaagatttaacataacgaaaaaaagctacacatagaaaagtaaaagttgttttttacattgttaaaaataaagagatagtacgccaaagtgagagaaattacaaagaaaaagagaaacgacgagatagtactaggcttttctctgcacagtgtgcttgacccatagtgc

SEQ ID NO: 17939 - DNA, 1698 bp, Heterodera glycines
ggtttattaaacttaagtttttaagaaaaatgaaggttttcggccttatggtattgtcgaaggattcatcgacggcgaaagttcgtttgttgaaaggggcttttgagttgaacagcttcagttttttcacaaggaaaaatgtgcaggtatttaaattctacacgagtaaaagattgcattttcacttacacttaaattaaggaatttatgcaatttactgccaaattaattgcggagagatcggcgacaccaagccgaagttcagtgaaagagggcgaatatttcatccactgtatggtgcgacaagacaatttagtcggtgtttgtataacggacgaacagtgcgtgaattggtttttaattgaaaatttaccattaattatattcattcaactttataccaacctaaaaacaagataatgagatagaaaatggttacaatcggagtcgaattttgcaaactgaaatttgccctggggcgggaaaggtgtcccaatcggaggggttatatcatttatattaagcctcaatctgtacaactccaggtatcaatctcgggtcgctttcactctgctcaacaaagtgttgtctgactttgccgaacgaattctcgaattggaatggaaacggatgagcggcgagtccgactgttcttatagcgaattgcctggatttctcacccggtggcagaacccacgtgaggcggacgcactcacccgagttcaggtgaaaacatttaaatagaggcggggcaaataattaaatcgaacgtataacaggacgaagtggaggagacgaaggcggtgctgcacacgacgatgcaagcggtgctggagagaggcgagaagttggacgatctgatcaaagccagcgaaaatctgtcggatcagagcaaaatgttctacacgcaagcgaggaaaatgaacaaatgttgcagctacacctagccaagacagagcattccgtgattttatacctatattcaggcctgtatagtgaacacaattgttggttgaggttgggcgccatcataattttttaaaatttgtaaaaaaaacggtgggcatttttaaaggcatcgaagtgtttattttgaagtcctcatttctccccggatatgggcctgtcaaaattcgaaccaacacaaatgtttccatgagattcctttccattatgtctcttctatttgctatttatattttctacctttggtcacattcccgggatttcttcaaattgaataagggcaaaacgtgtgaccctttcatatttatagaaatctccttgtaatttagtgacacatttttcccaattatcaataaagtagaaatatctttttgacttaaaatattattttaaaatttttcaacgaattttaggaaaatttttgaggaaaaaaacttaattccgagggaaacgatttaggggtaactgatccgtggggggggggggcacttgctccccttttgttctgtgtaaaaaaatatttcgggaaaaacattgtaccatatttgtattaaacgttaaacccttgccacttccctcctctaaattaacaaagagtctcttattcatcaacaaattctagcatagaaaattcatttgtcaacaagaaatatcagattcgcagtgttatttctgcagagaatattttaaatgtgctcgtcgtttgcatatcggaaattggaattgtacgat

SEQ ID NO: 17940 - DNA, 1598 bp, Heterodera glycines
agtcaaaaaaattgggacaattttctttttaaattttatcggtaacctaaacaaaatcctttaaatgattcgccggttggctatttctaacggcaccaacctttaatcgaaattctctcttctcgaagctttttcacaaaactttcaattatttccgtttattttattaatcgacgcttccaaaacgttcatcatttctaatctttcttcataaaattttataatcattattttttcggcatattaatttgatattttaaaaattaatatatttattttttatattctttaataaaattatatgtctaccattttaagtggattgatgatcgtgttgatctcgattttttatgagcgcttttttaattgggaaattgtgtccggcaattatttggttggcaattcattaattaattactcgctcgagtgggtcccttttttcgtgttgcaggtcaaaaatacgccatttcgcgcgaaaatttttcgatggattgggccaacacggaattttcaccgcccaaattttcaagcgcagataatggcgcattacaagtaattaattaagggaaaacgagatattgtggattctcatcttcttcatttaaccgagagtccacgtcgaatatgaaaaaaaaatccaggtccaacgttaggcacggaaaacgtggatttatttggaaatatctttaaaaaaatccaagctctgacaagctggaattccgggacctggatttttgtccaggaaaatcgaggtccaggtcctgaattcaagtccatgtttttttcaaaatgtcgagctctagtaattcagtaattaaatttaaatgattaaattttaaaaaatcaaaagaaaaacaaattctttaggaaaaaacttaaaacccaaaaaaaaaacaaaacaaaaaaacggtataattttatttattttttagctgcacattctgaaaactgttataccgaatgccaacatcgagattaatgtaaagaatatttcaatatatcgaatttcctataaaaaaaatatgcctcagaagatttatttttcaaatgtagtgagactgtatactgtattttaggaattactgtatatgtggcaatgtaataaaacaaaaatgcatattaaggcctgcacaaaatattggcaacgatcagaaaattatgacacactgatggcatatacgacttgtgttcgttcggcattgggtacagttgtaaatccgattttaaaaattccatcgcgaatgagataatatataatatttaattaaattatttgctaaattagccaattaactaataagaggaaattgatgaaaaaaaaattactaaaaaggcgctcaacgaatttgggcaccaaaattgcgcattttgagaagggcacatggcttttgccgcgattggttcatcacttcggacggatgggctgaaaatgatttcatgttacacggtaaaaaaaaattgaccatggaaattcggatttgtcaaatccaatttccccaggattaaccactttatttagcagattttgccaacttttgtagattttggcaagaatttttataagaatttctatgggaatcactaaaatatgggaccca

SEQ ID NO: 17941 - DNA, 1447 bp, Heterodera glycines
tttgtttttgtctacgagttgcctattattagctttgctttttgtctgagttgtcattccacctggccaaacgatgtcataacatgttgttcattttccatctctttcgcattgacgtattaatgctaactgtttgtggttgtacatggccatgcgaaagttgagaatttgctaatattattttatttttattttgagaatttgctaatattattttatttttattttgagaatttgctaatattattttatttttattttgagaatttgctaatattattttatttttattttgagaatttgctaatatcattttatttttattttgagaatttgctaatattattttatttttattttgagaatttgcaatttttgagaaaataaatatttgccaatttttttaaaaaatatgtagcaataaaaaattttctgaaaacaaaacccaaaaagaagaaattaaaattaaaaaaattcttcggattacgccctccgacatttttttctggctaagggcctgggtgacaccgataggcgcctgtcaccacaaaaaaatgttttagagaaattaaatattttcccagggcacaagaaggctcaaatttgtcaattttcctatttcaaggatggaaggcaatgaacataaattttaatggatggcaatcaccatttgataaagtgccgaatgcctccgaatgcactgacggctatttgggatggaattggcgggccgataaggtgcaaaattgaataaaggatttaaaaattaatttataattattcaaattgaatttataattatcaaattgaattataattattttcaaaattgcgtcaggaccaatcaactcaactagatgatgatgaaatccatttttcaataaaaatttttattttcgttgaaagctttttttgataatttaaaaaagggtttttaaagtttttcttttaaaaagtagattaaaaaaaatatatatttatttgtattttcttttgaattgcgaaaaacttagatttttgaaaaagctagcgttttttttagagaatttctatcgatgcagtccgaaagcaattagccgcaattgaaaagagttcggcaaacggttttccaaaaaaggcgcgaattcatgcacatttatcggagcctgaagtgggcgaatgctacccgaattgtgacgatcaaatttagcaaatttaaatctaaaaaatttttatttaatttttctaattaagacatgtacgaaccaggcatggatgtgacggaattttttttcttttcttggtactgagtcgacaatttaacatataaaccacaaatttccatggaaaaactctgaaaaaaatgactcagtaccaagaaccggaaaaaacccctcctggtacgaacgggtcccatgttgcactaaaacaattaaatgaatttttaattaattttttcttggaaatt

SEQ ID NO: 17942 - DNA, 3488 bp, Heterodera glycines
  unsure (1)..(3488): unsure at all n locations
acaccgccaaaatggcattccttaattataaattattatatattttttaattttaaacgctaaattttcattccaaatttccgttttcatttattttttctaacgaaaatttttggaattattatcaatggaattttgtgattgtcaaaaaaaaacaatttcttaaatttaattacgttaagaaattttccaaaaagcattaaatgtcggcaaaattgtcaattaaattgctacttttgaccatttgcctaattaatttgattattattaattgagtttaccaaatggcaagcagactttgaagtccaaacggttttcgtgagcccatgatcagtttgatggagaaaattgtgacaacataaaaaagcacacattttatcagaaaaggctcatagtcgatcagccattgttttgccgtctgatggttatacggagccaagaaaatgttcatattatgtcgaatttgacccgattatgatttttgtaattagcgctaaaatggaattttatgaaattttaatcagcaaacaacatttttgagttctaaaagataaataatttgatttatatttatttaaaaacaaaaatacgaatttgaatcttaaaaatattgaaaacataatttattaatgtaagcattaattattaaatgggaaatttattttaatttttatcaaattaattaatatgctttgtcagtgcaaatggtgtgattttttttggaatgataaaatttttgggactgcacaactgagtgacaaaatgatcgtaatagggcaattataaatattgtgactcctcattaattttatcagccaaaatttctttccacaattaacgattttttttctcttttaataaaacggtaaaataaaaaatgaaaatgaatcgcatgtgaattatttaatgaattgttatttattttatttttttaactttcatattttaaatgcaagatatatattaataaaataataatgttaaaatatttaattgattttaaataataaaatgttaaattacnnataaaaggatatcttaatataaaaataataaaaaatgaatttaaaatataatattaagttttatttttgttattattataaaagtttactgcagtagaactaaaccagcgcattttgttcatttaatgaattactgaaagtgaatttatctaaaaaaaccaattaattagtccgcaacgtttggttccaccttttcaccccatcaaatgtcatcatcatcccatcaaccaaataattgaccatggccaaaaatcacaccacccaaaaattcatttattttaacctttctgtggttgaaggaatttgatggattaatttatagcaaatgagaaaaaagaaatcaaaaattgttggaaagtaaaatctaattttatagacaatattggtattaaatatatattatatttgaatttatatacatgcataaaaatattcaaaaatgagaaaaaacattgatttattgtaaaaaatgaaaacaaaaaacaaaaaaaagctttttttaaatttttacattattattaatgaaaaaaacattataaaaaattttggcatttttttctcctattttaataaatttttggggtttaaacaaattcaaattcagagggcgggcataaattataatgatgctattgtaataaaagtcttttcagaattataaatgcaattcccattttcttaacaattcttttttgtcacaaacacttttattctgaaatattatttcgtaattctttatttatcatcatagccaaatagtattttaatttttgcatagaaataatattaaaaaaaaaaataaaataaatttcatactttggcagccctacttttgtttaaaattatgctttttaaaagatgtttaaaaatactcaaaatgagaaaaaacctttggtttctaacagaaaagaaaaaaagcagataattttaggaattacaataataaatcgaccgaaagaatccacaaaaaaaaaaaaaatcatttttccataattaaagcagctgtctttttcaaagttttcagagttgtaattccaatttccaatttcttagcaattttttcatcgctaattttcgggttttcttctttaatttcgaaataatgcttcaactttttaaatttgtcttcattgctatatttattgcatgctaaataaaaatttttatttttattctctcacttttataatataagtattttataacttaaaaatcgcttacttttgttgtattttggcggtgaaatgttctttcagaaatgcccaattccattacaaattctttctgtttgccttggccatataaatttttgaattcatcaattctttcaatgaattcattctttttctcatcataataactctttttatataaatttaattcttttttccatttatatatttttttacgcgcctaataattttccaattttgtctcaatttttgtttgattttttcgttgaaattttcacttttccttaagcttttctttaattgcttcaaatttgattatttctcttttttgttgatcatttgggttggttcccatttcttcatccatttgatcaactgccgcagagttatcattttggtcaatttgttcagtttttataaaaacttcatctcttttttattgtccattcgttgccgaatatttcgtcaaaatttggtcgaattttgccagataaataactctttttatataaatttaattcttttttccatttatatatttttttacgatttgcgcctaataattttccaatttttgtctcaatttttgtttgattttttcgttcatatttacctttttctcttaacttttctttaattgtttcatatttttgaattaattctctttttctttgatcatttcatttgagtgtgttccattttctgcgccatttcgaacaaaagaatgaataaattccgattgttcgatttgttcaatttttattactttttgttcactttcatttttgtcccatccgttgccgaatatttcgtcaaaatttgttcgaatcttggcggtttcaattttataagcgaagaaaaatataataaatacattcattttacgatttgggtgataattgtaaagtgaattaatatgattttattgaatcgttatcgcttattttgtcctcatcgaaagtaattaattagaaaatgtcctgatcatttttaatgaattttataatttatatagccaaggcaaatagaaaaatttgttgggcatttctgaatttcatatttcgtgaataaaaaaaaattgtggcaaaataacctaaaggtaaaagaattactattattttttttattatttagctcaatatttcaatgagaaaatgttaatgaaacaaattttagaaatattttgaaagggaagtaaagtttttggaccaaaatttaaaaaacatataaaaggaaatttccaaaaaaaattcgacgccaccttcttcat

SEQ ID NO: 17943 - DNA, 1269 bp, Heterodera glycines
caacagaatcaaagtgcactaggccatcaaatacctcgactggtactcccacatcaacaatgtcaacatccaaactgctcactcccggtacggcgaatatgtgtttaagcgtgaagggcaggtataccaagtggacggctacatcaaaggggaaaatgggaggcgggacaaaataatcgaggtgaatggttgtctgtggcacgggtgcgaggagtgttttgaggacttggacgacgaaacgaaaatgccgaccggaaagacgctgcgggagattagggaaagggaagagaagaaacatgaaatattgagccgctacgtcgacttggaggtgatctgggaacacgaaataaatgagaagctgaaaaaggacacagcaatgagggagtttttcgacaactggaaggaccattcgccaataaaaatcagagacgcgtttcacggaggacggacaggaccaatgaagctactccacacagcaaagccaggccaaaaaatcagctacaaggacttcacaagcctctacccgtttaccaactttacgaccgactatcccctcggccaccctaaaatcgtcagtatcccaccaaatgagcagacggttaactggcgttctccatccgacaacccctacaaaggtctgctcaaagtcttgcttctacctccaaacaacaacattaacgtcaccgttatgcccataaaatttgatcaacgcctcctcttccctctctgtgagaagtgcgccaaatacatcaccgcaaaatatcccaatggcctcaaagacaacgactactcctgcccacactacaacccaaatgaccgggccttcgtgtccacttgcacccatcttgagttaaacgcagcattggaggccggctacacagtccgcaaagtcttccacgtcctccaatacgaccaatggagcgacaatgtattcaagtcttacgtgagtgaaatgatggccctgaagatccacgcaaccggcttcccgtcatggtgtgagagcgaagaggagaagagtgaatacattgaggagtgctggatgaaatttggaattcatctggagaaggagaagatgaaagctgaaccggggaagcggtacatcgccaagctctgcctcaactcactttggggccgcttctccatgaggaatctactttcgaaggcggtaatcaacaatgacccttgtgttctccgccaatacaccgacgacaagaaaattgatattatggacattgagctgatggatgaggacaacgacgtattcatgct

SEQ ID NO: 17944 - DNA, 1581 bp, Heterodera glycines
ttgtcatttttaggtagaaaagtgcataattaaacacattaacatgtatgcagaattaagcaacggaagacacaatattgaaaattattaagcatttgggaacgtcgtttttaggtagaaatatgcagaattaagagaaagaagttacaatttgtaaattattaaggaatagaagatacaattttaaaaaatacacgaacttgtcatttttaggtagaaaagtgcataattaaacacattaacatgtatgcagaattaagcaacggaagacacaatttgaaaattattaagcatttgggaacgtcgtttttaggtagaaatatgcagaattaagagaaagaagacacaatttataaattattaaggaatagaagatacaatttaacaaaaattaagaaaaataatgattaaatgaaggaattactcaaaaatgtgtaaaaattacacacatggggtgtgtgtgtatgcgtatgtatgcatgtgcgtgtgtatgcgtatgtatgcatgtgcgcgtgtgtgcgtgtctatgcgtgtgcgtatgtgtgtgtattgtatgttttttcgagggtgaggataaagtgtgtttgaaagttctgcataatatttattaacttatataaaacttgttaattttaatcataaacacaaagaatgctccttgcctaattcaacgtaaaataattctaattataataatgaacatttacaattccattgaataagtaatattcaaaggaaacaagagaaatagacaattttgaatctaagattgaaccgagaatagaaagtaggtttgaaaaacagctgactgactgtatgtgacgagaaagggtagataagggctaaatgtatgcgtgaagcaggtcttgtaataggaataaatggaaatcatatgaggatattgtagtgcaccatagaatcaaggacaattaataatgggtgtaagagatagagatagagaactcagaaatgtggttgaagagagtcaatattaaatagtgagaatttaatatgagttagtaaggcaaacattaggtaatgtatagggaagagaatagtttgataaagaacaagaatacgaacacttggaagataacggttcgagaataaaacatagtgttggaagaaaagatattgaaaaatagctaatggaaacgattatttagacaatatgtaggtctgaaattaataaggaataacagtgaaagtaaacagatatagaagagtagagaatgtgtattacggagaaaaggaaaataattcaaataaacccgaaaccaaaatctctaaatataggattttgttaagaaaacagttggcgttagcctctttccatttgttccttttagaggaatcgatttacaggataagatgacgcagtgacctcacccccctctccttcacttatttggtttcctcaactctacccttcctctccaacacatattcggtcattattgctccttaccatcgcaaactcagttattggctaccagagagccgagccttgtgaggtattggttactggcgggccaagcttaattaggtattggctaccggagagccgaaccttacgaggta

SEQ ID NO: 17945 - DNA, 3120 bp, Heterodera glycines
  unsure (1)..(3120): unsure at all n locations
aaagtcctgaaaccaagtacacgggtgttttaaaggtcgctgatcacgaatatgacaattatttgggcctattaagcaaatttggcgctagttataaagtgatagattttgaattttatcaaaaaccataggggggacccttttgttttgtaaatttttttttggataaaaatcgtgaatatactttttattcaccataattgtgctgttaatacttaatattcatcattatgtgtaaaaaaacaaaaaaaaattttgaccaaaaaaaagttgaaaaaattttcaaaatagtgctctttgcaagtagcgccgaatttagtgtacaaagggcatctcagttagctattataaaaaatttaaaatggcttgaaaacagtaaaattggaaaaaagagaaccaattgagattttgcaaatttacgatctgtactttaattttaattgtctcggagaaaaataaaaattatatttagtcaatatttggaagttttaaaaaatcagtgacatttccgccgctttctttgtcaatccatccgtcaatttcattttctgtgacgaattctccccgtggaattggccgtcggtcgtccgtttggacaccacttcactacattttcaaaccaattctgctttctgatgagcaatacaaaagtgctttgataattaaacaaattgacttaatgatggtgtttcgatgttcacaacaaataaaattattgtcttacaagtattttgaagagtaaacattttcaaaataaatcacgatgaattttttcctcgaatgcattcattttgctttttaaaatgcttattactaatagcctcaagtggctctcatttaaaggccaaataaatgatttcccccctccaattttctctttctttccaaataaatgatgctccctcctccaattttgcttttccttttttgctgtcactttgactcattttcctcttttctcgttctcttcgacatttctgctgctatgaaatgcccaagagtgaatatttcgtaaccttgtctgacactttcatcgatttacttcaccattccatcctttccttctccatgcttcgttttccccgtccattgcctttaaatgcattctctggtctttgcttttgccttattcatttattgtagaaagttgggacggggatttgaagctatctcatttctgtgtttctaatttaaattttcggttgttattaagccaaaatcgggaagggtcattccccgcctctgccggccattttcgctgcccgatacattattaaattgttagtgcgagagcaacactccaaatattattaaaattaaattgctttttaattaaatatttttaaattatagcttggatttcgcatacaattctaatgcttccatgggttccattttttgtttgctctcaacagcagccatcacgaagggcgaaacatcagtcaaatttgttcgaacaaatgcttgaggtcagagcagtcggaacaattatcggaaaagagcaggatgggccgtcgtacgaaatgcttttccgtttaacaacggacaaatagaagcaaatctgctccttttctgggcaaaataccgacaaaaactttgaaaagggaagtcgcaaacgaagcaaaaacggttcggtcttttggggaacaaattgaaatatcaaaggaaattaacacattgaaagaataattcaacaaatgatgacgagaggaaggaggaggagcaattcgcatctctgaaaaaccgttgccatacaatcgcatcgacaagcgcaccttttgcttcgacaaaagtgcaacagaacggcgtggacagcaatcattctctgtctgcaaaacaggcattgtttggaattaacacaaaaatacatttttaacatttttactttttaatggtaattagcaaaattattttttgtgtatagaaatgcatttaatttaccattatgaaattcagtcttcgtcctcttctcccgttgcatccacaaaaacttttcgacggcggactgcctttgaaacttcggaagcaatgcgtgaaattttcggtgcatattctcctttctcatcacagaaaaaagagaattccggagaatttaatcggaaaaaaatggcattggaaaatgggaggacgatgaacggaactcagcaaaacaataaaacagcgattcgaccgtcggagtttgaggatgacacggagaacagagactttgaaaatttgtccatgtcagtgtcggaggcatcgtcagaagtgggaagtgtgtccatccaagacggagcaatgcaaaaccaaaatgaacggccaatgcttgaaaatggaatcacgaaaaggaacgtcagactgaaaagtggtgagatagaatatgaaaaaatttacgtacaggttaggtgaaaaaatttacgtacaggttaggcaagaaacctggattttctgggtaatattttagagtttgttcattcaagtggcaaatgttgaccaatattttatttcaatttatcaaaaagtgattgaattaaattaattaaatattccaatatttttcagatttaagaatttcgcccgcaagttccggaagttgggagagggcaattcgtcccgtagtgaacaaacatcacaatgccaatgctgcgtccgttggacggcgacctgcggcgaatacccaacgatcttcggtgtgttggtattgtggtgtgaaaggacatgccgcggcccattgtcaaaaaaagcgcagaaaaggccaatgagaattgcgagcacagacccaaaggaatgaatgtgcgagacaaatcggaattccagtgattgattatcgaatgtatttcacccatttttcactaattaaataagtggttcattttcttttttttcttgaagttgtttgaccaatattggcgtcataattcgtttttatttttctccgacaaccgaatttaaatttggtgtgaaaaaatgcttaaaattgagagggaaaagaaccaatatgtacatagtaagaaaaaatgagaaaaggaagcaagcaaaaggatatagtgggcattggattgtattggttttgttttgaggagagcgcgnngggagaatcgatgnaatgacagaccaaaggcagggcattcgcttattcct

SEQ ID NO: 17946 - DNA, 1645 bp, Heterodera glycines
aacttagccataatttgggtccaccgcggtacttaataaatcaagaacttttaaaatattataaatttaattcaaaaacgataaaataaaataactgtatttgcaataaattatttaaatcattaaataaaacaaaatattaatattttctcgaaattctcctttcaaatagccaattataaatcgacagatagagccgcatggacggtccttgaaaaacaaaaggcagaccacaacaagaaactttaaaatgcaagtaaatcaaggaaaaaacaacaataatttcaaaacactaaaaaaacaatgaatgcaaaactttaaaataaataaatatactcatagaaatattatatataaatatatcattaataaaaaaataccatcttttaaaaaaaaacgattttattttccgtttattcaataaattaaataacacatattttaaaataaatcccatgtgcaaacttttaataatcgatatatgattgatttaaatgtgaccaaaattttgttacatatttttaattgtaatctttattaaataattatttgaaatagaaattattttgtcctttgatatatttttttataaaatggcttttttataactgatattggtgaacacaaaacgaaatttttcaatttgaggcattagaatagaaaaatctaagtaaatgatatataaaactcttgttattttaaaaatttaaaggctacgaacttataaatcatttttatatctctcaaaaatatgaagaaatggtgcttttttgttttacaaattaattttaaaattgtcttcagtatcgcatttatctgtattaatatattttaaataatatatttatttttatgcaattttgaattatgttttctaaagtttgacttagattttgtaaaaaatatttattataagctctcctttattattattatctgtgcttttctatgtacaatatcttgagtaattgaaacttctgaaatgcttgtttgcttatcgtttacttattttgaaaagtttttaatcataaatatgcttacatttttttgagagatgaacaaaattttattttgcattggttgttttgaagttgaccattttagatgatggtattgtaaaggttttatttataatgtattgtattgcaagtgatttttagcttctcaatcttttttacaacaaaaatgttaattttaataaattcaaaccataaaaatcaactttcaaaattttgtttttaaaataaagatatgtttattatatttaaaaatataaaaagcaaaattttaaattgaataaaattcaaaacttgtaattgtcaatcttgaaattctctttaaatcgtcaatgcttaaacataatatatgtaatcattagggctgccaattttatataaatacatatttttttgctggcttctccttgctctaaatagcaggaaaaacactcttttttgtgtttgcgaacaaaaaccgggacttttatttacatatttttacatatttcgggattttcttacatatttgtacatattttggatttttttctatatagccattttgtgtctagttcatattttacgggggaatttctttcccaaaaaaaactataaaaaaaaaaaaattttatttacttatttggggg

SEQ ID NO: 17947 - DNA, 1399 bp, Heterodera glycines
aaaaataattcgatataacatgtcttacacgcattaaaataaaaatattaaaaatcaaatattagaaaattcgcaattaaaaaaacaaatatgcagttaatatattttactagatttagctgaatatttatgacgattaacatacaaaatcatcaaaaatataataattaaaaaattgaaagggaaaaattattgaaagtattataatccatagaatagaataaatattctcagcaagtaaatttaaataaatatgtatttttcatttaaataatatacaaatgtgaaatatataaaacttttttaattcgtaattgaattattttgtcaatcttcaatgtgaaacttatttcaaattcattaatctatctatagcaattaaatttaatgaatatttgatctacaaaaagcaaacaacattaacaatataaaaatacatattaaaataatggaattgattttcttttaacaaaaatttattttaaaagcctctccaactcgaaattttaaaaactaaatatatttaacgaaattaaaaaatcaataaatataaacacctatatcttgaaaaaacttccatttaggtattgtaagccgggactcgggtctcggctaccgattgggattgaaggggagaggctcctccccattggaacgcccaccgggattccccttttaagcgatggctctcccagccgtcgaggtcagtcagtcaattccccagtcatcactcccactactggccctccccctaagccgaccgatgggacggagcctttccgcgggggctacggcccagtccaacaatccgtcggtggacggaggagatcgatctccggggttggaattaagcaggccgtatcccgaaacccggcacggcttaactgtattttatgtcgattgcccattgaaacatatttttcaagaagatgttcaaagaactttaatataaaaccacaagaagagaataaaaaatcaaagtgcaaaaatgttttgtttatttaagcaaaagataatctgcatatagaataaataaaaattttaatttaaaattggctaaattgctttaataaacaatcataatattcatttgcacagtgtcaaattggcacacagcagaatttgagcggttgctgccgttattcttcaagatgaagctaaaaaatttatcaaatattgaattttttaacattttttaatgttttaatcttattttaaacttttcttatttattaataatagctgaaagaatttttattttttttattcgactttaaaatttaaattatcctaattacgatatacaaaaatacctatgaaccaaaataccaaaagaaggtccgacatatacatcatctaattacaccatcagagaatagaacgtgaaaaatgaatgaaa

SEQ ID NO: 17948 - DNA, 3171 bp, Heterodera glycines
  unsure (1)..(3171): unsure at all n locations
caggggtatggggcggaccctttttgacgcttntgtactctggtttcgcatttgttggcagtgtttctttgcttgttgtgtgtgctgttggcttacatacccttgatgtttgtgaccctcgtccagtgatgaggcgataaatgtcatatcacgcagtgccattggttggttaggccttcgtgacctttggtttggtgttctcggtgcttgtacaggtgctgctgagacgacttctgcttttggttggacgtagtgatggccatattctcccatcacttcttggacttctttccggactgcttcggttagcacatcccggaatttggttgtcgtccagtttgccggatcctctcctttctttgtgaggatgcttcgtaggaatggtggagtcagcttcttctccagcatgaggaacacctgcggtccctcgatgtcctctccggcattgttcagctcccttgtaaaccgctcaagttgaagcagaaagtctttggtctcacggaggcttcggcacggcttgagattggccagttcgaagtgaagacttctgatgtgttcctccggagctccgtacgtgtcctttaacggctgaaggaccgtctcgtagtttgcgtcttccaaccggaagcccgctatgagttctcgcgcttctccgcccagcagattgcggagcaagttcagcttctgcgctttgctgattgattggctgccgattgccgatttgaaggattcgtagaattcgggccatttttgcttttggccaaaaaatttatccagttgaattggttggaattggtagagcggtgctgtgaatgttggcactgtcattggtgctgccatcgctggtagcatgggcgcttgttgctgcggattggccaattgatccgcctttgcttctctgtcggctctgcctctgtgcagtttggctgcggcactgagcgttgcttcgagatctcgcaaatcccgaagtttggttgttgctgcgtcgtatcggtcggcgattttttcattcttgtcgaatttgacgtattctttttcgccgttgtctttgtcgtctccgatcagacgaccgagaagttcgatccaagcattggatgaatctcgtagactgtccatctgcatttccatcgagcgaatttccttgacgacgcgatcaaattgagcctccaagttgatggcattttcccagtttgacaggtccgggtcggggtgtagaaggagtgaggtggcgcttttggcattgtccagagctttgagtgcattgatgatccctttttgtattggcccagacattgtgctgtttgattgtgcgtgtgtgtgtgtgtgtgcttgttgttttgtgtctttttccgagatcagtctggccttggtcctggaccttctgtgactaaacacctgcctcggaggacaaggtgtttgccttttgccttatggctaaactaaagcctcggaggactgttagtttgccttttgccttatggctaaactaaagcctcggaggactgttagtttgccttttttccttatttgtcaatggcctagtgcgcgaaaacaccctttttgcacgaagtacttcctcgaagggcaagtacttcgtccactacacaacaccttccaaccctctgttcggacgaagtgcttcctcagagggtaaacacttagtccgctacgtccctcgtgaagttatgcctcggaggacaataactacacgaaactatgaacactagacaagcctcagagggtccttgtctaggctctctaatttgcttttcccttcccctgtgtcaccgggattcgttgagtcaatccgtggttcacagatccacccaggagcgccaatttgtcccgattgcgttcggggccaaaggtcgggcactggggtcggggtaggcagggacgagacacagaattaataaaaaatttattccgggaaatgacctcaaacttgggtaattaaaccaaaattttgaaatggtgaacgaattatcacaaattgatcacagaaatgccatcaccggggaattatcacaaatggaattgggcaccgggatgggacagaaatttcagaaatggggcaaatggaaagatcacaaaaatcaatgatagggaccgggaggaacagaatggaggataccagggggtccacaaaacgaagaccaacaaccggggatcaaagaatgatcacgaatgggggttatcacagttaaaggcaaatggaaggtaggggagagaaacggcaaaaatgcctaatgaattttggttgtgaaattgggggcatttttggccgcttaaataacaataaagttaaataaaaagtggcaaatgtgagcagaacaaaaatgggccgaaaattgggcacgaaatgaaaaacgggggacaaaatgaacagatgaacaaaatgggcggaaaacgggaaatttgggggttcatcgttctttggagtcgattcgccaaattggggacgggggcagaaaagttgcggtttgatgaattggtaattaatttgtgcgcggagtgggggaggaacacagaaaaacaattaacaatttgaaggaaaaaagggacagagggatggaacgccgaaaacacgtcgcgcggcggggggagttggtaaagggggcgccttccctcttaattcgccgatcattgattggcgatcggaattgaaattccgacagtcccaaatttaaacaaatttttttatttgtttaattcttctgaatttatccgagaaattggatggacttgtatatattgattggcacaatgtggatagcctttgggtagaggggtaattccggctagagaaacggaaggtatgtatatgtaaaagagtcaggtactaaaataggtgctaaaaaagtgcaaaataggcgctaaaaacgccaataaatattggaaaaatccagtgtatttatgcacaataattacaaaagtgaatcatttctgatcaatttcgcccgcacaattgcaacttctcatgaaaacaaataaattttggagacgaattttgggaaattttttcatagggaatattttatgaaaatttgttaaattttttgggagaaaatgaccttaacaggtttataatatctcattttaacattttaaaaattatttattggtattctaaggttcaaataaaaagttttaatttttcacaggaaattt

SEQ ID NO: 17949 - DNA, 1949 bp, Heterodera glycines
accgtttcggcgccgccaatttgaaaaaaaaccataacttttttcttggccagttcacattagcaaatctggcatcatttgaaagctctagtgtgctctatatttaagaatgtttcaaaaataaaaaagttatggcaaacggcggcgaaaaagtcaacaaaaaggcaacttttgagcttttttgcccattttttaaagttttgcgggctaatagagaatcctaagatctaccgaataatgaataaaaaaaataatttttattcattcgttgcaggtgaaaatgagttacatttccttaatatttccttacaaattagcaaatgttgacattttttaaatcaaaaattttgtcaagaaaaaaatttgggtatgaatttttgagaaaattttccaatccaggggtatatttattttttgaaaattttccgggtcattttggggagtattttttagaaattttttaggtcgattcttaggggttgtattttttttaatttattgaatttttgttgagagattttccaaaaatgttgaaatagtgacacaacgctaaaataggtagtaatagtgagttttaactattttagtgacgaatgcgtttcttgagctccaaattctgattttttttaaaggtatagataaaaaatttataaatatactctcttatttttgtagtgatttattaataatttaaataaattttaaaaaaacatcgacaatgtttggcattctgttggttttgtgatttcattgtccatttttcaatattttttgtacacaaatgtgccaaatgagctctgcgatgcgtcacccccgggcggtgtcgtcgtcggcggcggaatgccatgtctgctggagatggagtagtgctggtactggccgccagccaccacgggtgccagacttttgtacgcgtccgggccaagggcggagctctggaaaagtccttgaaaatcataatgctaattttcataatttaaaaaatttcatttaaatagcaaacagtatttgttttgagaatttcttttattttcttggcaggcgaaccaatttttgaatttttaaaattttttttttttttggaatttttaaattcttttagaaaatttttatgaatttagcgaattgttttttgcctgaacccatccgggcaaatatgcccgcaacgatatgccaccggctccatccccgtcagttgaccagcattttgccgtgatcagaagtgccaacacgctgagacagaacggcacagaagccagcgcgagaagctgaaaaaatgggaaatttaaaattttctttcgaaacgaattgctgaaatttggccaaaaagacggacggaccattgaactcagccacaacacgttgattggggccaactcagtacgacaattttccatgtttacagtaatccgttccgccttgaggtcggccaaaaattcgggcaacgcaattgatgccgccgccgcattattgtccaaatcatcagttccagcagatgttgatggtggcattttgccaaaattggcggacacatagtgggcaatggccaagtcttgggcctagcaaaattttgggcattttaaatattctgaaaatttaatcaattttaattaaaaatttattattgaaaaaataataaactgaaatttgtcacaaaaataacagtgccttgttgttagttaagcataatctcctcatccaaaccaagggcgtaggagggggggggggaggttatggaataatttcgggatcgtgctcttcgtctgagagaaggttcatatcgagggaaggtgtgtacagacgaatacatgcgccaggggtattcatcatacaaatttctttgtcagttattcgtgattgccccaagtcctgcgtgatccctcgcaatttgatcttgtactcgtccttaccggtggcgttgtcgcttagtcacaggtcgtacatttttg

SEQ ID NO: 17950 - DNA, 613 bp, Heterodera glycines
  unsure (1)..(613): unsure at all n locations
aaatagaggatacatagggctatcgaatgacaccaacaatgtaggaatttggttggcaaagaaaaaagttatagccaaaaacttgtgctcgtacgaaaacggcccgtacgaaaacgaccccgacccgatttgtttaaaccatcatgaccaatccgtcttactaatccaagattattaaatatcacaaaagtcaacccgtcttaaggaagatatcaaccgtccgattattccatttattatcatttattaaactgtttgctagatggtttaagcccgtccccttcgtttcccactttgcggagcagttcagctgctgcatcattgttgttgtctcgcccaaatcggccacccgtctcgctgtcctcctgctgcaactcatcgcctgcctgctctgctgctgctggtggtgcggcggcagcaacttgtccaactgttggcggactcgcaagctcgccaagtgcgcacgcatatactgtacgatagtagttaaaaattactgtataacacaggtaatgaagaaactatatatatagcccgaggaaaaattattattcttttattagaaatcttgatgatatgaaatttatgagatttataaaaaaanaaatttttg

SEQ ID NO: 17951 - DNA, 1573 bp, Heterodera glycines
gattgcagttgcaaatgagtaggactgggatttttaagaccaaaaaacccaaaatagttacctcaaaaaatttttttaattaaaaatttttgccaagaaagtaaatttttgagaaaattttttttcatttcataggagtatattttgaaaaattttagctcgattcttaggggtgtattttttgaaaaaatttttagatcgattcttaggggtgtattttttggttttattgcatttttgttaaggaattttccaaaaaatgtcgaaatagtgaaaaaatagtgacaaaacgccaaaatagtgatttttaactattttagtgacgaagtcgccaaaatagtgatttctagtgaccgatagtgacatcagaatcgaaaatttttaatgcagaaatgcgttttttgagctcctttcttcaaatcaatcgagcaaaaaatttagttaaaacctaaaattcacagccctagttattatagatttgaaaattaaaaaaaattgttattgtattaacttattaaaaacctctttttaaatggccatattggaatataaattaaattaattaaaaaaatattaaatatttttttatttataaaaaagaataaaataatcaactttgtccaagtgtatttcaactaaataataagactctaatggaaagacagactctttgagactctggaacatcaacatatttgaattgaaaagatctcctacatatttatttttaatttttgacatgaaagttaccctaaaatattttttcatttttcaacaatcgaattacgtaatcgtccagtagacgggtttttaaatatataaacacaaaaaatataatttaaagaatttaacaaattttgattaagtattctttccaaaattagaaaaaatgagtaaataatatgaaatgaggatgaagtcattactattataaatcttagttatatgttgaaataaataaatattaatgtaaaaaattacgataggtgcaaaaaagattgattctaaagcttgcaaaaacagaaaaacataataattttagcggttttataactcgctatgatttaaaatttggaatgagaaaatgttttcttgcttctctcgaatgaaaaataagaaactaaaaaaaatcaacggcccgttatcatcgataataaatttattataattaaaattttaaattaaagagatttatcaattattctaattgccaaaaaagaatacaaataatattgtggaaatttaatttctaataaaaagatattcatggaagttttgacaaaagaagaggaggaaagcgagataaaaaaagaaagttattttatttatattgaaataaatttaattatcattttataagcttgagaaatggcgtttaaactctgatagattatattttttcaaaatttgggcaatggtctcattaaataaaataccttgtactgtatacgcaccagaaacaataaaagaagtaatagaacaaacgaataaaattgtttcacttaataatgcaattaaaggaaaataaacaaaaatcttaaaataatcgaaataaggtgctaaaaagtaaata

SEQ ID NO: 17952 - DNA, 4059 bp, Heterodera glycines
  unsure (1)..(4059): unsure at all n locations
tttttttaaaataaatttttaaatttttttttcttggtttaaaattttttttttttcgattttcaaagaaaaaattttttttttattttcaattttttaaacaaattaaaaaaattattttgcacaattttctcgaggtatcgtctcatttttttcaaaaatattccacattaaaatttcggtacaccccaaaaacacagccgccgaaaacacagcgagacatanncacagccggaaataaactttaaaaaaaattttcaaacagaattttcaaagaaaaaaatcntatgaaaaagtttctttgaaaattctatgagaaaaaaaaatttttcaagaaatcttcggcgattttttttgaaaatttatttctcggctgtgttttgtcctgttccgttaaaatttttaaatccctccaggcaatggcgatgatgaagacgatgacgttatctttttggctgaaatgaatttgcgaaaggaatgcgacggcggtggcaatgcccaacggcgggaggacgacaatgttgagcagcagcagcaggagacggcggcatgcagcaacaacgtggcgcaacagcccgctaatgatggtaacattagggggtgcttttttgacaattttttggttgctgcatcatatatatgaaaaaaagggggggggggagtcgacccgccaacccttcctcgcttgggaaaatttgtttttactaaaaaaaaaatttcaacaaaaatcatagagttttttttgtaagaaatccaaaacaaaaattttttgtttgaattacttttcaaaaatgttccaataaatatttttggcactttgagtcggaaaatgcatataaatgataatataccattgaatagagcaggttcgatatgttcccttgttagaaatttgaaaaattgtaaatattttgttcctttttttcttttaaattaaaagtactatactagtatactgtaattatctgactgatcggcaacgatagtcactatttcggctgtgggtagggggtactgacaaactttttttttttgctttaaccactgcgccttcaccattttttcgctctgtttttaaacaagaatttcggtgaagagaagaggggaagatttatttttgcaaataaatgattttttttaatttacattttccccctattttcaggcaccgacggggatgatgaaattgtatttttgggcaaacagaaggatgaacgtcacaatggtcggcggcggcggcaatcgttgacacggctcattacggaattttaccgcccacggcagcagaggatgaggacgatgatgatgatggccaaaccaattttgtgtgcaaccggcaataatgccgtcgatgtaacatgatggattgtttaaatgcattaacttttgaagtaaataccgcatgaattaaaaattttttaacttaggaattaatgttttttatgcattatgaaaatgaatttttatatattaatctgtttttccattttgagcaattgctgtaccatcaagcgaacaatttcctcgagggaaaaaagcatcaatcgaatactattagacaaaaataatatttaaaatataatataatatgttaatagtgctagggggtgtcttgaaatttccaggccaattgaaaaaaacttatgatgaaattatgattgtcggcacgtatttgaattagcctagttggaaagcactgaatttaataaatttacaaaaatacaaaaaatcaaattgatgggaaatatttaatgaaactctgctcttgcttctcacagcagtttttttatttaactattttttagcctgcggttcccgcgcctgatcctgctcggccatttgttttccagctgcaacggggcaatgagctgtgcggcgtggcttttgccagcttgctctggcaacgcaccaaggcatcgtcaacaccgctgacgagcgcggttcgccctttcgttgcccgtaagcaaaaattatgaaaatccattaaaataaaacaatcattgagttttatattgttttttattcacttacgcattttccactggcaatttaggtcataataaatagagctatggaatatgtcgattctgtgcacaaaattgtgattatttgttttaaaaatacaaatttggcgatttttgccaaacaactaactcattcattgtcagcatgtatttgaattagcttagttgaaaggcactgaattttctaaatttacaaaaatacgaaaatcaattttgatagtgaaatatttaacaaaactgctcttgcttcgcacatcaaggtcctattttgaaagcattttttagccccctgctcatgcgcctgtggaccctgctaggccattcgtttgccaccttcaacggggcaatcagcggtgcggggccaattttggcaccgaacatgcgcttcaaacgcacgaaggcattgtgcacaccgcggacgagcgcggttccctgtttcgttgcccgtaagaaaaatttaaaggcaccggataatgcgtcagtggaaaattcttcttttgaatttgtcacattcaatttaaaagaaaactatagaattttgaaaatccattaaaatttaacaatcactaattggattattttaaatgtgttcctgtgtcaatttaggttaaaatttaaaaaaaattgatttaccaacgcattttttcagtgacaatgttttctttcggtcatcaaatttaatactatacatatgaaaaaatgaaataaaattatgttgaaaaattaattcatttttattttcatgattacagtatgctttaattggtacttttttaaaattaatttttttatcaaataaaaaaaaatatattaaataaatgtataaagaaatattatatgttatgaaaaatattaaaaaacagctttttagcaaattaagcgtgcctggctgtctctttggcacaaacagcgaaaggaattgtgatcgtcatgtgcgaacagtgcatggcggctacttcccgccggtgatttgtctgccgggagaggcgctgtgcatgtcggcggtgcaaggtaggattttgaaagtttttgaaaatttcaaaagcaaattttgggttttgatctttttcaaaatttccgttgttttcgtttcgtcctatcgccactttttgagtttctttttgtgtttcgttgttgtccgtcaaaaacttttcgtttcggatttaaaattttctttttgttttcttccaatgaaatttggacgaatatattcacactctaagaataacttttttgataaaaaaagataattgatctcattgaaatattgtagtctagtagtgcaaactgcagattgataatgtggtgttcattatgagttcggtcctatatccccgcactttttatttatttagaaaatttttgataaaaggacaaaaaattctgaaatataaatacatggaataaaaatgaatttttaattctttaaaattttttaattggttagaaggccaactttttgttcggggcacatttgtaatggaggcacaagtgtcgcgccgcaccaaaaacgttgaccggcttacactgctgagcaactttgaccaggaagcgacagtaagtaaatagcaaattttatcccaagtgctaaataaaatttataagaaaatcccaaaaaattcttttttataagttggtgaaaacttgttttacatcgatttttgaaaaattttagacggcaatccaaaatgcttgcgtcgcggccatcgggttctccgagcccgggagccggagaactcgtttttcgaccataataaggtcgttatgcgaacacgaccgggcgagggctgcaaaatgggctcctgtggatttgccgcctttgccgcatttttgtcgctggcgagggtcgtgccgctcccggagaaggccatgagcggggccatcgacggcgtcagtttgagggtgcgggcagttgtgcacatcggtctcccaagctggccggggtgttgtcagctggctttcaccaagcgatcctgccagccgtcaacagcagggatgtaggtatggatgatgaaggtgtgccactgccggaaat

SEQ ID NO: 17953 - DNA, 2203 bp, Heterodera glycines
  unsure (1)..(2203): unsure at all n locations
aaaatgaaattaccgttaccggtttgtctagtaccggtaccgccggtaaaaatttgcactggtaagaatgggggtctggtcgagaaaagagtaggaaattggtgaagaaggagaaattttttgagaaaaaaaaaataaattatttattttcatttaaagcatttgttcatatgcacatgtggtgtagtggttaaactttctacctttcataatttttcgcctgggttcaattccccacttggatagaatattcctcacattttctttaccattattttaattaaaattttaattttaaaaaatattccaacttttttctttcatgttaagcatcctaaaaacccaaaacttaatcaattggtcattttttttacaaattctgttaacaaatcgcattaaaaattacaaaatttttcccggcggcgcctatcggcaccgccggccctccttgttccccaaaagtcttgagaaaaacgtgccgcgaaaaaagcggtgttgaaagcaaaaaaaggtcattgatttacattaatttacatggccggagaccccttcgcaaaattggaaaattggctgctgaccccttgttttgcaataatctgaattttagtgttctttatcctgaatttgaaaaaaaaacttggtcaccctcaatatacatatacttctaaacaattctaatgctaaaaaacaggcactcgcgcgaaaactgaataaaaattttgtatttggaaaattttgtccaaaaatttaaacgttggaaaattaccggtttttaccggtaccggtaccggtaccggttgaaaaagttggtaccggtaccggtaccggtttttgcagtaccggtcagtaccggtaccggtttttttgcaattaccgattaccgctcaactctagtttttgggatgtcgaaaaaatattcaaatatatatattaattaatttgttttttatttagcgcatataaatttataataataatctttctgaacatttaaattttaaatatatttaaataaatttaatttaattaaaaaatataaattttatatttgattttctcaccatatttttgttgaatctccatcaatgttatcatatgttttccaccgcctttgacaaaacaaaaatttttattgccgccaatttttcgcctcgaaaattgccaatagaaaatatttttatcaccaatttgaccatttctcggcaaattttgcctcctcctgaagtcattgaaaataaattagaaaaatatttaaaagcaaatgttttctacaacaaaatataaaaaaacgaactttatttatcgttattttttatttggataattattcttaaaatttaataaatatatttgttaatttaccaaaattctattagaaatcaaacgaacaattaaaaaaaaagtttaatttttgaaaattttgtcgagcgatacagctgctcaaatatgggagataaggtcggaccaattcgtaagacacacaaaaaccgaagttactgaggccaggaaacggtcggtggtttggattccaaaaaatttaaaaaaatgggaatatttgtattatataaatcaaattataagaaaaatattaaacttattctaaaaaatgggaatttagggtcaggaaatttaatttatattataaaaatccaaatttaataaaaattaaattaaaaaatggacctctttttgtaccgctttaaactcccgcacgttgaactgctttgatgttcctcatcagtgctgctgaattgtgagcaggaggaggaaaattcatctgaacagcttgaacttgacgatgttgacgaacggcagagcagcgaatgttgccgaaaagtcatttcttcgatttgaagtttgacaataaatttttggtatttaacaaatagtaatattgtttgggactaaatgaattagccaggggtaggtaaagcgatattttaaatatttttattaatcctaaattaacgattaaaaaaaatgaatttaaatggtaaaaacgatgctagaacgaattccgaatggagaaaataattaaatttaatgcaaaaaatgattttaaatgtgccagccctatttagattttttttaaaaattangtaatanaaattttccttaagcatcaaacattaaaaatatattacgcattaagaannataaaattatttgcccacgcgtaaaatgttttaataataaaatgaaa

SEQ ID NO: 17954 - DNA, 1963 bp, Heterodera glycines
ttaaacagtcccaaaaatggcacatatccaatttgccatttagctttccactacaagacaattaatttacccaaaaccaattttcacacgccattcttttgactttctaaatgggttttgttgtgtgagcacagcaaaacagtaaacatccaaaaaaaaaaaaaattttagcagcccaaaaaaaatgaaaatttttaatgggccgagcctttgtccacaaaaataagaaaaacccgaacccaaaatcaaatgttagccacactctgaaattaacattttcattttgcgaagtgttggcacacacctcaagccacgagggtggcaatccggtgaacttttggccatcatagccaacatggattcgatggaccacgtcgctgggtgccgaaatttcgttgatgctctgctggtgccatcccttttcagtggactgttgctgttgcgttgtgccatcatcggagttggtggtgttgttggccactcctccgctgctgaaaattcggccaagaatgtgccgtagtcggacctttgagcttttgtcacgcgacggtgtgccaatgttgctgctgttgtccattaataaaagttcttagagaagatatgtcaattggacattttgcaaactcttaaaaaggagcgaaaagttcgtttagtaaaaaaagagagtaattttcttcccgatttttgagttattttcattactaaaaaatttttcttgtaaataatggaaattaaaaaaaaaggaatccggcaaatttttcctcaaaaccagcatcggcagcgagaggatcttcgtttttttttgtaatttttaaaagtacgcattctggcatgatgcccatttaaataattaaatttaaaaagaaaaaatccaaacgctgacccacaaaatgtccagcccacgaaatgtccaagtctcgaattttagttttttattattcagatgggcctaaggttaggcaaggggtaatataaagggtatattcgtattcagcgaccccgaaaaccctaaaaatcctaaattagactcattttgtttttataaattttgaaaaattttggacatttcgtgggtttttactcttttggacatttcgtggcttggacactttgtgggggtgccaatccaaaaaataaagaagagactaggcaaacatgccatacaaaagctagcaaattcgctgaccaaatcacatcccccaattcaagctacataaacaaatacatgtttaatcatttaatgacaattagcgcacaattcagaaagattctatacagtgaaaagccaattttacgcgtaaatatgcaaaaattaattagaaaatgtaaaagaattaattaggcaaaatgaaatcaaagcattatcattgcccaatttgcttctggcaatataaaatggattagtgataggtatgtgtgtatgtttatgtaataaaagagcgagcataatcactttttgttttacgagtgagtcatccatcccctcccctttttcacccccccccgttaattttgtctcgccctcgtgtgaaagaaaagtattcaatttattgacgtgtttatgaattcgttcgccatttagcccccctccccatctctgttccgtaacaaattaattgaaatggtcagttgaagcatgggtacactttcctgttttgaaggcacactccatttttaaaaaatacaacaaagtttcaaatttaaattctataggaaaataatgttcggcgagttttgttaacccaatggatttttggtggcatatgcagagaaagccgcgtgtcaaacatcatctttgtgaaattttcacattttagctcattttactctgaatatatctgtataaatgttagggatgtgcgagagtctcggttcccgactcgggaaatttctcgggtttttcgcttcccggtctcgggtttttagtctcggaagccgagaaatttttacaatgttaaggatg

SEQ ID NO: 17955 - DNA, 1058 bp, Heterodera glycines
tccgtttccgtcccgttatttgtgcatccatttccaattgactttttgacttttgtttgctctctttctcttcccgccctccctctctcaattttgtttactctctcacgccctctctgtcacatttttttttgacttttgtttgcactatctaactgccatttctctttttttaacttttatatcttatctcttttatctttgtttgctttgtctcactctctttttccctctcccttcccccactctctcatcccttgctacctactcttttatctctcgtccctcattttctcccaattcccacttcctttccccttctatctctattgtccttcttttctctctcactctctctctctctccctctcttcccccccccccaatttccctcttctttgcccctctttctctctctttttcctctttctctcctctctcttccctcatctttccccaatttttgctttcccctctttctctattttccttcttcccctctccccactgctctactatctttttgctcttttgtgtgtgttgcaattaatggtacaccacagttgtgggttggttgtactatttccatcccatcttctcctatcacccgtccaattttcccacaaacatttccactacatcgcttggagcaccacccaacaaaatccacccttgccccaatgaccaaaaatggactcttttaccttaatttttcgtttttctaattttaaaaaaataataaaacttaattttcgttttttcatttgtttctgccaactttgttcgttcattcattttgtcccttttacttaattcgtataatttttcagcgactttatccgccgaaagtgcgtattttttcccatttttcaaatcaaagatatgcacatgatgccaatctgtcacatgcacatattcttttgtccaaacgcttgcctaaaaatttaaatgcctttttaatattagtattagtgtggatgaagaatttttcgttacgacacttatgattgaattctcattattttaaagactgagtaatcgataagatttacgtgatc

SEQ ID NO: 17956 - DNA, 1336 bp, Heterodera glycines
tgtgtatgtgtaacggacaaatttggcccattttaaattccgaaaaatttcaaaatgccgtccaacagcagctcattttctttcttcctttctattttattgcaattttatgttcatgccaatatggtttaaaggtggttttaaaatttgtattaaaattatttggcatttaaaaattttaatttatgatggaaaatttaacgtaaattaattttcaaaaaattgaaattcattttttacacttaagtggtcggccgctatagaaattgtcaatttgcaatgttctgtcctatgctttatgtctgcttaattagtgcttctccttctctatttatccgatccgtggacacaatcatccatcatcaattacactcgattttatgaggccaaatcgctacttacgtctggcccataaatcactttcttttctctctctctctctctctctctccttctttaccctaccctctgcctctctctctatcttaatacactctctctcctctgtacctttctcgctttcctcacactatctcttaaaattaatgtttcttacatcagcagcttgtttctgctgatcaatggtgatcgctgaaagacagctttctgtgattttaatcactttgataatcaggtaaggcgccaatcgttaattaaggcccattttcggctaaaacagtttcataatttatgtactcacaaatcaggccagtatctcagtcctccctttaatgaaaaaaattggcaaattttttaaaaatttcacaattttcttaacaaatttcccccggcggcgctttcgcacagcttctgactccattattttacaaaaaaattttttgttgttgaaaatttaaccacaaaatgacaaaatttctcatttttgtcgcaaaaaaacagctacaattgtatattgtccatttgtacaattacaaaaagttcgcattgagtgctgctgctacaagagcagtagcataatgctgtttattaatccacatgcacatattatgcaccaataatcccttccctcatcatcataattaataaataatacccccgggggaaaattgcgggcggacacagtcaattagcggtagaggggaacacttctaaaaatttcatagctgggcgcgcatgttcaatacctacacaattaaaaatgtaatcaattttagaggtgacgcgggcggagtgcggaaaaaaattggaattttagatttcgcaaaaatttgaaattttcaatgcttttttcgtcgctaaacgccttttttgtaaatttatcgattttttcaaaatttcgatttaaaattaaaaaaatgactctctagaatagaaa

SEQ ID NO: 17957 - DNA, 2366 bp, Heterodera glycines
agtgagaagaaaaatgaaacacaatttatcaaaatatttatgtatattttatgcacttgagttcgctaagctttatcaaacggttggacgtgaaaaccgacatattatgaaaacagggaaaaacaacacgaattgggatggtttaaaatctgttactcaatttttcgccgtcaaaaatctttttgtgaaagctgtgaggtgacattttggaccaaagaccgtcaccaaatggaatgtagggagcgctgcaaaaagtgttgccggatggggttcgggttcccctgtttggatgtttgtgaggcgatacactgtggagaatgcaatcggaatttctacaacaatgattgtttcgagtctcacaaaaagacagcttgtagggagtacaagaaatgcaacaaatgtgtggaaacacacaatacgcgaaacaaacacacgtgcggggagaaattctgtagaatttgcaaagtctatcatccgggtcggcaatgtttcattaaaaaaatcaaactccgacagcagaaagcataccgaattgtggcttatgacctcgagacgacgcttgaagggggcgaacacaaaccaaatcttgttagtgccgcgcatacttgtagtgtttgtgtgggagaagagatggaatgcgaaatttgtaatggtccgcggatgatcacttggtctgtagcagctgggtttgaaccgatgagcgaatttgttgattggattttgggatttaaacaatttgaaacggttgcttttgctcattatgctggaaggttcgactcgcattttgtgttaaaagagctgactgaaagaggggtcgaaaccgagttgatgatggcagacctgaagatttatcaaatgaaagcgcgtggtatgtattttcgggatttctggctgctcagccaaaacaagttggcagatcttccaaagactttgggtttgaaaaccttagcaaagttgtacttccctcataagtacaacaaaaatgtgaactttggaaaaaaattgacacacctaccaccccttgaagattattgtccggacaatatgaaggaggaggaatgtgctaaattggtaaaatggcacaatgaaaattatagaatggaatttgagctaggttagagaaaatctgttttccttttaaaattgaattttaggagagcagctcaaggtttattgcgaaaatgacgtcgaaattttgatggaggcaattttgaaattccggcaattgtttttggagattactgatgggatggatgtgttgaaggacagtgtaacaattgcgggggttgtgatgagaatttttcgaacaaaatttttgagagaaaatcatctcccaattattccggaaggcggttatgagagagccgagaatcagagcaaaattgccgtgaagtattttgaatggttggctcaaagcaaaagagtgagacttagacacgcatgcaatgggggtgaagtggaaataggggattaaaagtggattgtatcatcggagctgagaaaaaaatcattcaggtaggcagaatttccttccctattttattttttgctaaagggatgtgcgtttcatggatgtccaaaatgttttttgccctggaccataggacccaatgggcgttgtatggaagtaaatttccgacgaactgagacacgaatggagtttttgagggaaaaatgtattaaactcctcggtgggggaagtttgcgtgtgttcttttctaatgtttggagcattcgggccattcgtgggtctacgacgggcgcgtcgccctcgttttttttagggatagggggacgtttctccgcttcgcggcctcaggacgggcgcttcgcgcccgttgtttaattttgtggggaacatttggccgcttcgcggcctccggacgggcgcttcgcggcctcaggacgggcgcgtcgcgcccgttttttaattttgttgagaacattcggccgcttcgcggcctcaggacgggcgcttcgcgcccgttttttcttagtcggccgcttcgcgcccgttttttagcttgttatgccgttcgcggcctcagtcaggcgcttcgcgcccgtttttcaaaatttgttgaccttacagggattataagaggtgcaataaatggtagaagaggtaaaatagtgattagaagaggtacaccagtgatcagaagaggtacaaatgtgattaaaaaaggtacaaatgtgattagaagaggtacaacaacggggaagaggtacaaccacgggggaagaggtacaacattattgaaactggacaacattattcaaaattaaataaaataaggaaatgtatttattaaaaaataaggttaaaaatcaaatgctggagagttacaaccaagggaggtaca

SEQ ID NO: 17958 - DNA, 1734 bp, Heterodera glycines
ccacatcttttcacacgcttccgtgaaaatgaagacactttagtggctctgcgatctgtccaagcattcgcaatgttcccctgtaaactctggaatgtagttgatcgagttgctgaagggttgggaagaaccaataactcagttgaggtgaatgattggcaattgcagagatgccatttgtatttatttctaagtttttgtttatttggaggagctaaatcatagaaatttaaaaaattcacatttcaaaacattcatattttgtgcattttttatcagtgcggtacttttgaaatttttaatggcatctctgttctattgcaagtgtggtttaggcttggcattgcatctggaatgttcatctgaaaggaaaccagcgcttgagctcattcattcgaaaaatgattgaagaggataatatgtgggcggacagaattgctgattttcaggcagctccagcggatggcataaggggtccatatgagcgacggaaggcaaaatacataaggcaagacaacaacctgcaagctttagtcgctgattttgatcaacgtgatccgcttgaatacctacgcgcatgtgcctaccacttacacttttaaattaagaaagatcattcaaacatacattcaatttgaactaagaaatttaagaaagttaatccatgtatttgtgcgataatatgcgataaataaacatgaaaattaaatggaattcggttaaaagaaaactaaatcaatgataaaatgttttgtaaaattaataataaaaattcttaattttatatggttaaatttgtccatgggttgaattttgccttatctggggaaaacaatcaccggcgagttcaattactggcgaaatcaaatacagacggcgagaaaaagagaaatagttcactggcgaaatcactcactggcgaaatcacacactggcgaaatcccactggcgaaatcactcactggcgaaatcactcactggcgaaatcactcactggcgaaatcaactgacatacttcactggcgaaatcactcactggcgaaatcacacactggcgaaatcactcaatggcgaaatcactcactggcgaaatcacctggcgcggttggaaacaaatttgcagacatttttttggtttaaaaaatgtgagcaataactgattagaaagttcttttcgagctctacaaaaaatggatattttatctcttatgaaccatttgctgaaaattccgaaaaattagtaattttttgaaaactttttgctttaaatcctagaaacaccacaaatggaatgattttttattttaagtgagaagcaacaaaaatcaacagatcataaatgcaaaattaatcctggtctcatttcttgttcaataggtcctcaacgccatgtgctgtctttgttaatggtacgactgacgaagacgacgaggttccttcttcgtccagtcccttcttacttttgtcctagtttttaaaacaattaacggttggagagtgataattatgaataagtcggggatcgtaaagaaaattcccgacaaaagaaatttaaatcaaggtctagaggaaatttcataaaaaaagttgaaaaaatcattgtcacaagaaattaatgttgtttagttagtttgtatctatgcttttttaaataaaatgtgtataggtatccagaaaacacaattaataatcccacaaaatttctcaaaaccatgaaaactaaaagccccccct

SEQ ID NO: 17959 - DNA, 3475 bp, Heterodera glycines
ttgttacgtcttatttactgttataataaattaagtgaaccttccctggtatagctgccagaggaacccgaatttttacaagcttaaatgaacaatattaaattatttccctattgattgaaaagcccaacaaatttgctctttatgcttcaactgacagaaaaggcaaaatggtggcggttaaataacagtcaatttggcctccgtcctcgctttatgattagtcatttctttctttctttttccgtgcttcgtcatcgctctgcgaagcgatgacactccggccgcgcgaattaaagttggggaagtgatggccccggctcgccttcgttcactacaaatgccaaaagagtactgtagaaagcttccattgacagcaacaaaagggccattggtggattccattggcgcatgactccagcaagaccaaaggcatgatcccgctcctgtgctaatcggtgcaagaggacacgacgaacttcgactggaatttgaattcggggaaggggattccatggccaattgatagggagttgtgtttcctgttgttccctaatgaatggaagcgaagcagttgttcggcctccataaggatgagagcgattcgggccaaaacgccgcggtgtgaatcggctttccccttcaattgccctttggcgttgattctgatgcatttggtggtgttgctgttgaatttggtgttgtggctgttgctgatgattttggtgttgtggttggctttgatgttgcggctgctgctgttggcatggagttacgatcatttctccattggttggcatcaattgtacaccattaagtgaactgctcgaacaactctgctggttaaagggcaccgccaccgcagtacgcaatatctgtggattggggtacaagacagtgggcgggggtatgagttgatgcatctgggcccatttaagggcatcaaatcgaaacccattttgaggcaaacccgtttgtgcctttgcctttggctgcaaatcagtgtgtgacctttttactgcctttgctgatcctgaatcattttcacctcgaattttaaccaaacccactctctgatctaccgtaccattctcctttggtgccacagtttccacaccaattactgtacctccaaagctcttttctgaacccgaattttgagtgttcaaacatattatttgctgacccgccggtgtggaatgtgccgtcgaagttgatgaatttgcttccaactctaattggcatgccctttcactgttttgagtattgttggccctctactcattagcatcgacccccacaggtacaataccaaaagaaaaatgcttccctttattgtgccgcgacctttaaccttaatcacagcctttccttcctcattttgtgaacccaatttgctttcataatttaattttaaacccccgtccttttccgttataatcaaacccaaattttggctcagaatttcaattcttttacccgttccgcttacatttctatttatcagcccactgctatcatttgcaccgcgctcgcccgcactctcaattccattacccgccttttcttccttctctttcataaatcccgcaaaaaagtcgccaaaatcatcgaattcgtcccggtaatgatcaaaaaaaactccgcccagaggataaaagaattcaccggctaacaacattggtccaagggcacttccctgcgtccgtttgattcttaaaatttgaaaggcaaattggcgatgggagactcggggtcttaacccaagaaagggcctgtccggagtcaccgtcaaattcaagccgtttaaattttcgatgtatccttcatccaatcgataccaaagggaagacccgcgattcaatgcctcggtgatccgtttcttcagacttcttcgctccgtggcactcaataatacggttccgaggtcccgtttattgcactcgagctgctccgcagcaaagtcgatcaattcttttgttgttttagttttggaggacatttttgaattttttaaaatattggaacaatggtgcctttcccgaatttcggtccatttaaatactctcctttgttccttctcgttttggataatatgaactgattcatcaaattttatcattccattttgatctttgatgctccgcatccctcccgtggacaaagaacaagaaatgcttacaaatttgcacaataaaattcctatgacaaatcggtaacccataaaatagggcagaaatcgtaagaaaatgtaaatggcacccattgctaataatagcattaaaatgagaaatgtcatatttttaaaattattaaacgggttgaataaattttttaaatcgatttctaataaatcctcccatttaataccatctccatcctttattttaagtttctcagaatttcgcactttaaattttctttcacttattggtacatagataagtctgcctttgattttaaatgaactttttcctcctgggcacacgacttgacaattcctattaactttagctttagcaaatggaagaacatcaatttggttttcgccttttttattacattttgccaaaaaaataagaccccctggacatttaacttccgcgatactttcaccccaatcagtccagcaagtatagttgagagttccccctgttcggcactcataacaacccgtcaattttccgatttgctttgccctgcatgtatttccttcaatttcagccacaatttttaaattttaaactctcactaataattgtataggactataatttgtctcacttaaaattttgtttccttctcttctcaagtttaatttatcattggtaaatggtagtttaggttcaagatttccaattatcagatcttcacagtcacattgaataagttgcccttcctttaatgtactatttatccaacattctctacacacttgcttttttaaaatacattcaaagttcatagcactgttttcatctttacaaaataatttagtttttatatcttttcccggtatattatttctttttctgatatgtgaaaatagtcgtcgagaatcggtgaaattggcggagttactcctaagggcgtaaaggaaaattcgcgccaatcttctgtgactcccgggtacagatttaattcattctttaccgaatttttcccaatttttaattcaatcccgatttttatttcgtaatcccaatttagacatctcacttgtctccacacttttccagtaatgggaaccgctattattttatagaaaaagcattcattaataccaaatgaaggtaaggcacattttgacccccatactgtctctccttccatacagtaagaatttcctgggtaatcccagtagttttttaattcttcaatgttttcactaggtcttatatttaaacattttccgtttttacatgatcccattgtcggacaccttctttcagatttaactcgtataccgtaatct

SEQ ID NO: 17960 - DNA, 1021 bp, Heterodera glycines
tattgtattttattgactttctttttgttgggattataagtttataattttacaaattttctcgtctgttgtttatttgcattcattacattacctatttcacattttctctctaattcccactccagtatatttttaagcgttttttaagccaaaatgtcaaacgagttttattattcgaacaaatacgaagacgacgaatacgagtgagcgaattggagttcacaaactcattctttgacatttgctcctttgcaggtatcgacatgtccacgtcaccaaggaggtcgccaagcaggtgcctcacaatcggctcatgtccgagtctgagtggcgaagccttggcatccaacagagtccgggttggttctggagtcacctttgactccatttgttctgcttcaggatgggttcactatttgatttggccagctgagcgtcacattttgctctttcgccgtcccaagccgaaggtgaacggcgctcagaagacgatgatgaagacgactgccaatccgagtcaagtccgagttggctgattttgggatgccgatcgatcgagagcagatgaaaaagtaccgcaatcaattccaatactcccactcatcacaccattcctacgtatcgccgtcgacagtctttctatccgatcaaacaccaaccaatgtgctcttaattacctgctgctgacttaaaataaattattttgcttttttttttttactttttttgtctctctggaagagcgctttgcagtaattgagggcaatcaaaatttttatttggaaaaatatgctgcgaaattttgtgaattaccctcccttcccccgctcacctttgctttgtatttgcgccaggagtaaaaagatggaaaaggaatttgtgatttcgtcagccatcccaaagtgtttgcctctgtttgctcattggcaaatacttcctcaaatttgttccgtttttggcaaaagaaacatttcctaaggcacaagaagaagaggaaatggtgggatggtaacctttt

SEQ ID NO: 17961 - DNA, 1904 bp, Heterodera glycines
  unsure (1)..(1904): unsure at all n locations
gttctgtccaattcattgaacagctcgaaatttctccattttttactgagttttattggctaaaaatggcaaaaagcatttggcattgccaaaacaaaattgttttttttccactcgtcttgcacaaacggtcgcttaatcggacaatgccccgcccctttggtcatccaaatgacagctgattttgtcattctcataattatttgtctttacatagcacacattttaaggtcctaaatacgtctatggcatttgaatgctcaaatcatttctttgcccccccgttggccattttcagttccttggcccaaataagcggacattccgtatccccagaggattataaacgagtcttccgttaagtttgtgaaacggaagaacacattaggccatcatctttgccatttgtctctctttcgccaaagatcgatggcaccgataaaatttggtgcgagtgaaaagcaaacggccgaaaatggagagaatttttgtgacatttattgggtaatgactggattaaaaaaggctttgtccgatgcggtttcgttctgctccgactgttttgcccactgaattcccctcaaaatgccccccccccaaaaatttgcattgattcgcttttcccgcccatgccaatatttttccggtgcatttcccctgcttaaagaaagggactttgttgtatgctaaaggcacaacgaccccgaaatgccaaatgaatgaatgaatgactatgtaaatcccccccccccgtgggtcaacataaaatgaagaaaatcctttgcaatttcagcgggaaatgcccttgaattagttggccgcttcccttgcnncagggcaatgctttgctccgtccgtcgactgtttctccctcttctgtttctgctcgtacttttcttccaaaaggcaatcgcccgacgacgaaaatgtccaggtgggggagaaaaatacgaattaacaataagggtaattaatgaattattgttattaattaggggataatccatcattgattaagggacactttctgaggacaaaattgtgcgggaaatgtttcgaaattacaccaaaaaactgccggacagtgaacacaaagacgagagtgttcatgtcgagattgaaatgcatgttcaggtggtcatttggctgagatggcatctgccaaaccattgagacaaattggcaccgattggggaattaatgaaaagcataaaaagggaatttaaaaaggtgccatccctccaaaaaaattactattgctttatgaacaggacatgggttcgctgaacgaaatctcggccgacttcgaaattgacattttgttcacccaactttggcacgacccgtcgctgtccttcgtcaatttgagttccgaatgtgtgcgcaacatcacaatggagtcacgttttttgaagggtatttgttccaaaatacattaaaattaattttgtcggaatttcaatttgcagacatttggacaccgaacacggtcagtacgaggcaaaatttacagaaaaaattgaaaggaaattaattggctatcacagtgcattatcaacgcaaaacggacatcagtgcacgcatctccggcggacaacataatgttcattctgtacgagaacggcactgtttggacaaaccatcgattgtcagtgaaagcgccgtggcgcattgngtgggccaaaaggacacaaaattaatgggaaaatcaaaaaagataatgggaaaaaatgaaaatgctaagtatttctaatccatactttaatcaggatttaattcagaaaaaatgccaaaaaatggccatggggatttgaatcatccatccatcaggaaaaaacagaataataaaatttaaaattgggaaaaccaattgaaaatggaaaataaaattaaaacaaaaaagg

SEQ ID NO: 17962 - DNA, 1064 bp, Heterodera glycines
taccgaagtagtgacgtgaagaacgttggtaaagactgtccgatttgagcacatccaccgcacacattgaagtgaccgaaggtttgctgtgacgaaaagcaatggaagggatttgaaagtcggccaaagggtcgaggaaaagcgaatggtcttcactaagaagagaaaggggtgggaaaggacgaaagggacgaacgcacagaacggagctgaagaagcagcaggtgaacagggaggaggagggcacggccaaagagacggcgagggaagcggacaattcggcacggagagggaaacggtgggcgaagggccagcgacggtcgcgcaacagttctaaacaggcacagcgatttttggattggcaaataacgcaactgcacagacttttccaactcaaaaattaattaattaattaaaaaacatacccagagggtatttattttttatttaaaaatgaaaggtaaacatacaaaaaacatgaaaattaattttagatgtattgaaaaataggacaatttaaatttacactttaataaaaaagaccctttgttacatgcaaaagcaaccccaaagagttttcgtattgttttggcttactgtgaaggaccagcgaatggcaattgtccggcattccccgcaggcgctgcctttcgatgccaaaggcgtcgccgccgatcagcacccaattcagtccgatcagtcctgaattaagcaaagttttccaatttctcattggtgtcgcacactttcgacctcgttccattccgttttccaccataaattctcccaaattaaacatttcgctctcttttttgtcgtcattttggccatattttacacgcattttgtcaattgtcgcattaatttcgccttttaatggctcaaaaatgagcacggccaacggagtgggctgctggggacgaaaattgtcaattgggcgaataggacggacaatctgagcaaattgtgacagaataaaatggaaggacacagaataaagaagtaattctgtaaaacttagcaaaagagctaaacaagaatagaaaaaataatagtttaaatta

SEQ ID NO: 17963 - DNA, 2152 bp, Heterodera glycines
  unsure (1)..(2152): unsure at all n locations
caaaggacgtgcgaggggatggccgatcaacaaattagttttnggcattggagacacttcgaaattgtggccacaggcacggtaatggcctttagtagaaggaaagcttgtatgacactgtagcaagcggaagagatacggtaccggattgaggacgaaagaggaggcgaggaaacacgcgaagagtggccaggtaagcgttggtaaaagtgtggacgcggaaaaggcgcgagccgaggctggcaaaaggggaaagtgccggagggttggcacaaacgatggcattctgatcgggggggggataaatattttattaaaattataatataacttcgatgggtgcttctcactcatcctcggttttcattttattcatttggccaaatgaaagtgccaatttgacaaatggccaagcaaaaggtcaccccttttaattgattgacatttggccatccctcgtcctcctaagaaaggtcaattgttttggagtgatcggtcaatttaattgtccttctgctgctgttgacagtgcacactttggtgccttttctcatccatcttcccaaatttccctcacctccccccttttttgccctttggcattccgtccccctcttggccatcttttctttttttgcccacccctctggcattccgttcccgtctcttttgctgcaaatgccatcctccgcaattcatcgtccattggtctccgaaccaaaatcggttcgtttcccgtgccatccgtcgtattttgtccacacagtccaaactctcttcacaaaacggttgttggtgttgctgctgatttaaattataatcataattttttgttactttttcattttttatatttttttcgtttgaagttggaaaatggccaataaaaagaattaaaagggcggggcaaaacattgaaaggctgaaaatgaaaacgaaatgccacaaaataacaaaatgccatgccattggcaaagccttaaattaaaagtctctcatccccgatttgcgcttttctatcgcttcgattgatcgattcgcttcgttttaagccttagccgatgaattggcatctaaacagcgcttaacagttccgtgcttttctgcgcagaaacaaacaaaagaattaattgggggaacgatcagcagcaaatggaggaaaagcggagaagggggaggagtaaagatgagcaaataaagagggagagagagagagaaagaagtggaggacggagggatggggaaatggggggggggggaattaaattcagtggcattgagaaaagggcaaataaaacgaatggtcactctctcctccccccccccccccccattctcttcgcttttcaaattccattataatatttattttcctttgcttccttcggcttttcgcttaataaactttgatgggcttagcatattttttgagttaaggaggcaaaggacggcaaattcaaaggggaaaatgagaaggataagaacgaggagaaaggacggatgagaaaagcattggagggggggggggggagaaaaagaacggatcaaccgaagccaaagggaggggacatttaacggaaggaaagtcgcggttttactttcaccatcactcattaaatcaattccccaggcattttctttttttctgatcacatcgacaatttagtaaacaaacgtcgatggagtgatcgtagccaattgtcaaaggatgggaaaacggggggggggggttaagagaatttctatggattgttattgtgcatgagtccttcgcttcaattcccagtttatcttataatggcagataagattaattaccccgatttgctgtacaagtggtccaaccacgcttgctaatagctttatctttacgaagagagaggcgagtaaaaataaaaggtgcatccatatggaatttttttttacattgaagcatttggatgggttgctgcttacagttggctaacttttctttgctggaaatagcacaacttttgtttgggccagcgaccccaaaccattcgaatagcaatcgattgggctgactagactccatatttgcaggaatagcaatggcaggtctatgttagaggactgacgagttgtgtttcgacaaaccatcctgtacacccataaatcgattagcaaattt

SEQ ID NO: 17964 - DNA, 4108 bp, Heterodera glycines
aaaagcctcaaagcctcacttagaaaatttagcctcatcgacctatcaaaaaaccacaaaatcgagagctaaagcctcagatctgcgaaccccggatcaacccctatttttggtatcattcgaaagcacaaagtctcaagaagctaaaaaataaaatctcagcgtttaggcaatcgccaaaaaagatttcattaattaaaatgactgataatttttgtttgtaacttctttaaatgtttagattttcttgttttctcgtattattacattattcagactatattcttttgaatgcttccaaaaagataagatttgttcgaatatgaacaaagttattgtacagaaagcaggtattgtcaattggttggactcataaaagtcgattgggactcataaagtgcactagagccattcggcttttctgggaaaatgaaataattttaaattgactatatttcaaattgcaattctcggaaactgaattatttttagctcaaaattttgaatcgcatttgtaggcaccagcaccataaaatcatcaatttactcaatgaacgagttcccatttgttttcatatttctattttgttaaagctttttattttgcatatcattttattcgcaggtatcttggcctatagcagtgaaactactccaaacttggagaatttaatagttttggcgaatgtctgtaattcaaactgccagcccctaaaaattgacacaaaatcgcaaaactttgtcatttttggcaaaatctgttaacaaatcacactcaattttcaaattttccatggcgacgcctatcggatccgctgtgccctcggcgccgctataccgtgcttttcccccaaaaattatgccgtaaaaaaagtgtcttgaaaagcaaaaaaaaggccgagttacatggccgcccaggcaaaattttggatctgggcccaggccgaccgataaataagctttttttttggtcgtgccgcccgtgcccatccattatcaaagccggactgcgggccggtgttttcaaaattccagtcccaagttgattatttaaatttggtaatatgtttatcaaaattacctaattttagatttcgccgtggccctctatatttaaatctgtttcatcaattattgtactgctctttaaactttcagcgattattaattattttcttttaccattttatttaaatgcttaattttattcttaaaagataatttctacagttcatcaatattataactgatctttgaacttttcaacgattaattattttttaccattttatttaaatgcctaatctttttcttaaaatttcgcttcgacacttgcgcctcccatttaaaattgacatttgcgccgtcctacaaaataccccgttcaaaataatccaaaaaatttatttaaacaaaattcttcatatattaatgcggtttattattttgttttccttggcattaaatttgtctttgctgctgagtttgacatttaaaacaatgcaaaaaagaataataaaacattggcataacatttcaccttaattattacagcattttttcaaatatactgtaattagataattagaaatacttattaacaaataaagcaaatttttgatattaaataaaatattaaaagcaagcacatatttcggagttttcattctcgccaattcaattcgtttttttttcaatcatacattatttctcccacaattgttcggtctacgtcagttgggccccagcacgtttgggccccagcatgtttttggactataactgttttcattgacatccaaatcaaacataattggtatcattcgaaagcccttcagatgctctattagcctgcaaaattccaaacaatttcgtccattttgaacaaatttatggccataaaagttggaaaatctggttttttgagttgttctggccataatttttttgaacctttacataatttttcaaaatttgaaggctaatagaggacatttacagctttcaaatgataccaacaatttttgatttagatgtcaaagaaaaaagttatagcccaaaaaccgctggggcccagctgacgggttccgcaattgttgcttccatttgaaaaggcacaatcgatcagttttcaatgtttttcgcgatttctttgtcactcatttttggattttctttttttattccccaataaatgatcattcaattattttactgttaataacaaattttcttttccaattgtcaattgttccattgcttactccaattttcttacaaatttcgtcataattttggctccattcttttcttgatgcttaaattcatttttcatttcaatgaatttttgtacaatttcaaatttttgttagtcggtttttgattaataaaatttcttttgattaagccccaattctttgctccatttttaaatataattaccatccctaagatttttgctatttttatttcattctttttttaaatattttcttccattttgtttaattttttcttttattttattatattgtctagagtccggaccgggccgggccgggtaccgggttttcccgggcccggcaacccggcccggcgatttttgggaaaatccgggttgaccgggttttgagaggccgggcccggaacccggttgcttctgaaaaagtcagcccggccctgcccggcaaatttgagaattccgatctctaatattttctaattttttctcttttattctcctcatactttctttttctcctttttctttccatttttctccaaatattcatcaaatgtttttttgttgctgctttttctttcatggcccaattcatgctctacttataataagaaaagggtattaaaataaaaactgatttaattacaatttcttctctcctgatcacttttatttaaaataaaaattttggcgctatttaaaatgagtaaacttttgaaattttttcactttttttttggtcaattttttttgtttatttttaatgcagaatttgtttttttaaagatggtacgcatttcacgggccaggacgttttcgtaccgggtcgttttcgcgccagcctagtttttgaactataagttttttcattgccaaccaaatccaactttcttggcatcattcaatagccctaagtatcctctattagcctacaaaatatcaaaaaatttcgttaattttcaacaaacttatgaccaaaagtacatcagaaaccgggtttttcagcttttttggccttaacttttttgaaccttaacgaaatttttcgaaattttgcaggttaatagagcatgtgaagggctttcaaatgatatcaagaaaattagatttggttgacaatggaaaaagttatagttcaaaaactaggctggcgcgaaaacgaccccgacccacctatttacctatttgtttttgtcggataaatctcaaaaaaaaaaaattgtattagctaaatttttgtaaaattttatttttttcaaattttaatatttttcacccgcaatgcctataattctgaaaaattatgccgttaaaaactttctttgaagggccgaagggcaaaaaggtcttcgaattttcccttccaaattttctagttacaggtctgatttttcgcttacttaactcgtttatcttgattttaaatttaagtatcactgatcacacttttccaaaaccgtttagtcacccatccgaaaatgccaaaatagctaaaataaaaattcgttttaaataataaatataattttaattaatttgtctcccccactttcgctgttgtgcaccgccgcaatgtccagccgattgcgtacagccggcccggggatcattcgcagctgttcccgcgcattggcactgatctgatcaaaaatggttgattgacgcgcaaatttggatgaacacggcgcatccgtgagctcgacaagtgtgatcggcagcagacggttggggtcggcttgcagcggtgcaaatgcgggaagatttagcggaatgcgcgactcaaagctgccactgtacaactggcatagcgatttgttctaaattaaattttaaaaattattttagtttacctaattaggataatta

SEQ ID NO: 17965 - DNA, 2930 bp, Heterodera glycines
  unsure (1)..(2930): unsure at all n locations
tttatgaagaaaatgttccaaaaaatctttcttataaaacnncagcaaattcaggaaaanantatcannagcnaaccttgttnncttagaatggactgggaattttattactaaaaccctcgctgcaattttcaaggaaatctgctaaatacgaatacattcaacacgcatatttaaaaaatcatataataatctattttattatttttagagaaagagggtgtaaaaataaattttatagtaatgtttgaattttctacagaaaaaagttaagaaaacacaattgttcataaaagccaggccaaattaaaaaatagcaaacctttgtaaacctttacttctcttttctcgtttcacaagttattgccagaatcctcttgaggttgccaaggaaatgcatttgatttaccaaaatacgaccgtgttttctcaaaatgtatttcgtatttttttatttctttcttcagaacagaagtttaaatgataaatttcttaaattttctgctagttattaaacataaaatattttaataaaaagaattatttaatgcaaaccctacttttcaacaagttctcttctaaaagtgtttcgtcctgtctgggattgagaaattataaccgaaattctgcaatgacttttttaactattctttgtttttccgaaaaccatgacgggctacagccaacgtgttgttgcggaatgctgaaaagtttaaaataatttttttattgttggccgtctgatcctgataaaaagtatttcttattattcgttgtcgcctgaatatcgtttttcttgtaaaagcatgctaatgaacgaaatttgttcgcttttattaatttaatgaagagattcatgttgtttaaggttcaaataacggctccgaaataaattttgtaataggactgtttttctcagaaagaaaaatgtgagaaaaaatgatttcgttagaaaggatcggctaatttagaaataaactactcaacgcaaacattcttttctcaattatgaattcgaattttattgccagaattctcgctgaaactatcaagaaaacgcattcaaaaaccataatttatgtaggagtattcctttgagtaaaaaggtttcttacattgttagcttaaaaaataaaccaaagaaaatcacttcatatgggtgctgtaattttatgaagaaaaatgttccaaaaaaaatctttctttataaaaacccagcaaattcaggaaaaaattattcaaagcaaacctttgtttcttagaatggaactggaattttattactaaaaccctcgctgcaattttcaaggaaatctgctaaatacgaatacattcaacacgcatatttaaaaaatcatataataatctattttattatctttagagaaagagggtgtaaaaataaattttatagtaatgtttgaattttctacagaaaaaagttaagaaaacacaattgttcataaaagccaggccaaattaataaatagcaaacctttgtaaacctttacttctcttttctcgtttcacaagttattgccagaatcctcctgaggttgccaaggaaatgcatttgatttaccaaaatacgaccgtgttttctcaaaatgtatttcgtattttttatttctttcttcagaacagaagtttaaatgataaattttttaaattttctgctagttattaaacataaaatattttaataaaaagaattatttaatgcaaaccctacttttcaacaagttctcttctaaaagtgtttcgtcctgtctgggattgagaaattataaccgaaattctgcaatgtcttttttaactattctttgtttttccgaaaaccatgacgggctacagccaacgtgttgttgcggaatgctgaaaagtttaaaataatttttttttattgttggccgtctgatcctgataaaaagtatttcttattattcgttgtcgcctgaatatcgtttttcttgtaaaagcatgctaatgaacgaaatttgttcgcttttattaatttaatgaagagattcatgttgtttaaggttcaaagttcaaataacggctccgaaataaattttgtaataggactgtttttctcagaaagaaaaatgtgagaaaaaatgatttcgttagaaaggatcggctaatttagaaataaactactcaacgcaaacattcttttctcaattatgaattcgaattttattgccagaattctcgctgaaactatcaagaaaacgcattcaaaaaccataatttatgtaggagtattcctttgagtaaaaaggtttcttacattgttagcttaaaaaataaaccaaagaaaatcactccatatgggtgctgtaattttatgaagaaaaatgttccaaaaaaaatctttctttataaaaacccagcaaattcaggaaaaaattattcaaagcaaacctttgtttcttagaatggaactggaattttattactaaaaccctcgctgcaattttcaaggaaatctgctaaatacgaatacattcaacacgcatatttaaaaaatcatataataatctattttattatctttagagaaagagggtgtaaaaataaattttatagtaatgtttgaattttctacagaaaaaagttaagaaaacacaattgttcataaaagccaggccaaattaataaatagcaaacctttgtaaacctttacttctcttttctcgtttcacaagttattgccagaatcctcttgaggttgccaaggaaatgcatttgatttaccaaaatacgaccgtgttttctcaaaatgtatttcgtatttttttatttctttcttcagaacagaagtttaaatgataaattttttaaattttctgctagttattaaacataaaatattttaataaaaagaattatttaatgcaaaccctactttcaacaagttctct

SEQ ID NO: 17966 - DNA, 2288 bp, Heterodera glycines
cacaataattaaatggagacttaaaataagacaaaaaaaaatattcaaacgttaaacgaagaacactttaactgatcatttttgaataaataattgttaaaaaattattaacgaaacaaaaataaataaaaattcagaaattatatgaaaaattaaagttgcgcttcaaaatcgtatgtttaggaaatttgaaaactctattctaataacaatttaaaaaataaatgtatttgtaagtttagctcagcaaaaaacaatgtaaacgaaaatttaatattaaaatattactaacatttttaaaataacaatcaaaaggctgacattaaatgaaataagaataatatttaaaaaaatcttctattcaatttcttaccgaaaataaggaaatgataaattaattaaaaaaatacaagtaagacgaaattaaattagcaaaaatatttcgggataaaagatcaatggttgaaattgattaaaatcacgtttcgtaattttaactcctttctgataagtgatttaatcttttgaaacaatttactgtttattaatgtctgcgttattgtcacgtgagttgtcgtaacttacaaacctaattatttttaaaagctaggcagatttatataataataatttgtaaaagattctcaatacacaaaagtaaaaataaaaaatatttattaaataataaatatatagaaaatctgtcttttcgtaaatttcggacaccctatggcttgtcaagacaaatatttggtatgcaaattttgataaaataattataataaaaatagtttcaaaatgtaatatgaaaattaagtacaatcaaaatgtgtctttaattaatttaatttcataaaaatagttaaaaaatgaaaatcttagaccgaaagcttccagggtaagccctccaagcttgttataaaatatcaaataaatccatttaaaaatataaaaatcttatccaataatttgtaaaaataaatcatttattcggtggcaattttttctttaattttcagtccaccccccccccccccctagcctcccctttccctcttcattttagcacttaacgcacaaattgattttcctttttacactttaagatcccattttttagcttttgacaattgaaatggagtcttcaaaaataataacgcattctaataattataaagttttttgtggtttcctttattttctccaaatttattctcctttaagtttcctgttataattacgggtactttcgggttttgtgtcaacaaaatttttctctttgttaaattgatttgaaattaataaaaagtcgtttctatgggttttcggggtcgtagaacccgaatatgatgtccatttcgacccatttcgccggattcgaacaattatctaaattcaattttttttttcattttttctcctaaaaattattatcatcgaaagaaatcatattaatttggtggcatataagcaacgatgttttgcaaatggtcttcgaatgcatcacatctcttcgtttgacggaatgacgccataaaaactcgcagaagtaactttccagcatctgccgatgcgtgccactctgctccttgtttcgacgttttgcggaacgccacagacgctcaatgttttgggtatgcgctcctgtttggggatccacaaagttcagccgatgattaacacgcaagaggttgaattggcctccagcagcgatctgcacaattaatcatatacccgaacaattgaactaacacctgattgtacgctgcccaacaatccgagtggatagtgcttcatggtgcaatgcgctgcgcaataataggaagaagtgttgctgcagtgcggtccgggacagccaccaaaaaacactcgcgtttctctgcaaaatgcccccaaaaacccattgttcaggaagttgtcggccttggtgatttttgtgtttggtgaatagcgcttcgtctatttccaccgtctggttgggtccacctatctgattctgctgctgttggatgacataattggcacaaacttcgcgcatgtacatactccattctgtcacagcattgtcccaatccccaattcctttgcacaaaactttacagatgtcaattcttgtgaccaccagtagatgaacttcaaaattgtgtggaacggcagtgtggacggatcaaaccaggtgtctgtgacgggagtgtcgtaggagtttcgcgcactaaccaaagggtatggggggtaattaattaacgggaccgtcgtagggggggggggtaattaattaatgggaccgt

SEQ ID NO: 17967 - DNA, 1745 bp, Heterodera glycines
  unsure (1)..(1745): unsure at all n locations
taaattcaatttttttttcattttttctcctaaaaattattatcatcgaaagaaatcatattaatttggtggcatataagcaacgatgtttttcaaatggtcttcgaatgcatcacatctcttcgtttgacggaatgacgccataaaaactcgcagaagtaactttccagcatctgccgatgcgtgccactctgctccttgtttcgacgttttgcggaacgccacagacgctcaatgttttgggtatgcgctcctgtttggggatccacaaagttcagccgatgattaacacgcaagaggttgaattggcctccagcagcgatctgcacaattaatcatatacccgaacaattgaactaacacctgattgtacgctgcccaacaatccgagtggatagtgcttgcttcgtctatttccaccgtctggttgggtccacctatctgattctgctgctgttggatgacataattggcacaaacttcgcgcatgtacatactccagtctgtcacagcattgtcacaatccccaattcctttgcacaaaactttagagatgtcaattcttgtgaccaccagtagatgaacttcaaaattgtgtggaacggcagtgtggacggattaaccaggtgtctttgcgaatccctttcgaagagttgtagaccttttctctactctctctatctctctctcttctctctctctcctctctcttcgtggttccgtccttttaggacgttaacctatggaattttcttcatccaattttgaaatcttttttaaaaaagtacattttacaaattttcaatctctctctcttctctctttcatggttccgtcatttcgggacgtgaaccgtacggtttcgtccttttaggacgagacctgtacggttccgtcctaaaaggacgtgaacctatggaattttcctcgtccaaatttgaaatctttttcaaaaattgcagtttaaaaatttgctctctctctctctctctctctcctctctttcatggttccgtcctttcgggacgtgaatcgtacggttccgtccttttaggacgagtactgtacggttccgtccttttaggacgtgaacctatggaattgaattttctctctctctctctctctctcctctctttcatggttccgtcctttcgggacgtgaaccgtacggttcncgtccttttaggacaagaacctatgaaattctttctccatataattttgaaaaattacttattgttttttttaattttcatattctgaaaacttttttaccgacaaattttgaaaaaattttgcattttcatttattttaaacaaatattcatttttataattaaaaattctgtgtatccccccccnccttccataggttacgtcctgaaaggacggaactgtacagttccgtccttttaggacgagaacctatggaatactttctcttttttttgttagccatgaatcaactggactgcttctgcttggagcctttgtacccgccggcaaatgcacctccagatgagcgctttcaagccgttgttttgccgtgttgcaccggcgtgtcacattttgcatgcattgcccgccagcttcgtcaaaccggttagaaaaaaaaattaaaaaatatttttttcaaaaattaaaaaattttcagcagctcggacggcagccggagttcggcttggtggaacatgcccttactgccgtcggagggcatttgcggaggatgcggtggcgactga

SEQ ID NO: 17968 - DNA, 3745 bp, Heterodera glycines
  unsure (1)..(3745): unsure at all n locations
ctcaatgctggtcacgtcgaacacaacgataacaccatgagtgccccggtaataagtggaagtgattgttcggaatcgctcttgaccggctgtgtcccaaatctaaagttanagctaacttaattgttataaacgagggatgggatgggccgcttatggattttttaaattttttgctcatcgggccaaaaatttttttagtgatatttttaaaaatgttcagcagcgccagggcttaaaaggattctcggagaaattcgacaactataattgagattagttgtatttattttttgtgatttagattggtgatagttttaaataaaaataatgtgcttaaaatttgatttaattaattggaaaagattgggcttataaaaaattgatttgactcataaggtgccattggactcataaatgtcgatggactcaaagtgcagagtcgtgttattttgtgattgttaaattttttatgaccgtgtaacggcaatagagccaatatatgtacccatttagcccccctccccgcccacaaaacaaatgtcgatactccacctgaagtttaatctttttgcccatcacggtaatcgtccgtattttgaaatccacaccaattgttgtgatgtaactggctaaaaattaaaattatcaatttaataaagaaaaaggttataaactcactggagaaagtgttgtccgaaaagcgaaggagcaaactgcttttgcccactccactatcgccaattatgagcaactattaaaattaagggattccgagaaacaatgccattgtacaccttgaacaaatggtcatagtcacgaactggagctgcagcatgtcgcatcacgtagttttggatgataaaatttttgtactaatcgaacttgtgtgtaagatgggtctaaaaaaagagataataacagcaatagttagggcttcttttttttaggcaaatgcctaaaatttttgcgcactttatacgcacaattaagacgaaaaacgagttttccggttggtttggcgtgtctacgatggcttttataatgcctatttttgcctatttcggggtttttgtgcttaatgcctatttttgtgcctatttcgccctttttggcgcctttttcaggattttcggaaaaatccttaacaaaaatgtagtaaaaaaaatacaccccctaagaatcgacccgaaaaaatttcgaaaatatacccataagaatttaaaaattttctcaaaaattgatcgccaaaattcgatatttttttccttgaaagttttggtttaaatttgtccttactcaaaaaaaaacttctaaaaaagaagccctagcaatagtaaatctcacaaatcagaatcacttaaataaaaaaattattatttaatattggctaaatatatttcttctattttaaattcaaaaatcatcaaatatattgggcgagaatgagggtcccgttctctcgcttttgcttgaatgtacagttttgttcggaaacgaataatgcgggatttccgcaggggatccccttaccgcgatttcttaattccattttccgcttctgcatacgtttttaatttattccagcttcttttcttgaaaagcagtcaatgaatttgcgcaagaagcctaaggtttaaggatgttctttttatttaaatagcttacaatttgttatccaatttttaggtcgaaccaatagaagatgagattcctgagaatgagcagcaaataaacatctctacccgttcacataactcttcttataacgcaagttacatctttttaactttacgatttaatatttacagtctgatcgtgtcaatgaaaatgatttggttaaatcgctgtctcaatgtcttctggcaaagtatgagttgcttaaacgcacttcatttaaaaaagaattcagcgtttctaaacgagggtttgttcgtgatgccgacattggagaaatgttctcagaccgaagagaacgcgagttgcgagcgaatgttctgaagaagagtgagaaattgctgatggatgttcttggataccgagtcagaggaggaatttctgaccgttttttattcttttttagttagatcgagatgaggaagggaagcgtttttacctctcgacaaatttatgtaaaggcattgcaatggctatggtgagtgattcttttataatcatgtggtgacgccagtttttccattttaaaaaaatggaaattataaaattgtaaatcagaaaaagcactcaaaatattttgaaaatatatgatactaatttaaaaaaaaagaaacatttgaaaattgttttgcacgctcttttattacatttttaaattttgaggtcaaggcacaaaacaaaagtaccctattccgaattcctgacccaaaatccgaccaaaataaattctcttaattttagttgtgactttttgtttgggacatgttttcgactaattaagtagctcaaaaatatttaggagatatctgacgacacacaccgaggacttaacgaatttgcagatgaagatgcgtttgaggaagaatcaactgtaaattcagccggggaggagaactaatgaaacatttaatttacctaaatatttcagcaaactgaacaatttacaaattgtcttcttgaaatggcgttaatgttcattttcatgtcgaagcgacacatttcaaataaaactgaaacagaaaaaggagtggaccaaatgctcctaaagagtttcttggttaggtctttattttttaaaggatttctgctgacagtaatgggctattttttgattttaggatgatttattcgatgcttttgaacggagacctctgtcaagtaaacagttcggcgaattgtttggtcccgctaaatcagccgaatttattgctcacgttagcgctctaaaatttacatgttaattcgataatgaccaattaagggttggttgcgttgcgacattcaaagagacactgtaaccggaagtgaacaagttttgtatcactgggggcctcgatcagaaacggtcgtcagcaaaaaagtgaataacgattatatttacaattagacttgaaaaagatatttgcaaatccatttcccctaataaattcaaattaaaaataatttacaattaaatatatttgttgtgcccttttcttcaagatattgtttttaaaaattaagagaatgctcgaatctttctgtgacatctacggaacaaatccgaacaattttccaaaccatgcgaaagttgcaggacttcgagggaaatgaaactcgaatacatgaattgaagaatgatctctttggttactaaatttattgaaattttctttgactattaatttactgattaaccattctcaacgtgtttcaaaatgttttaattcgcttaattttctttacttttatgtgaaattaaattactgattatgtttaagaaacaaacaatgggttcgtctgcattaaaacaaaaaacaaatgggtctcaaccactccggaactctgtcttttggctgttcctggcattttgtatggttttagaggtttgttgtttttgggcggtagttccgcagaatttccattgctttcgttgccggggttcaaattccgatggcattaactggcaaaggtaaagattattggtcccgaaaaattttttttaaataagttttgagaaaattattttcaggggtaatccgaggcgcttagtacgaatctggcctttagcaggctcaatttcgaaccc

SEQ ID NO: 17969 - DNA, 2963 bp, Heterodera glycines
  unsure (1)..(2963): unsure at all n locations
tgtcgatcggtgggggagggagtgcgaagtgtgcacgttgcattcccttcatcccctgcttcacgccgcagtgtcgcctatgctactcctgcaagaaccccaaaaccaatctgtgccaaaaaatacggtttgagtcatttcattggcagcggagtttgaccgtttgttttccgtcagtgccacccaagggaaaggactgatgccggacggaaccagccgtttcacgtgccgtggccaacaaatcgcccactttatgggctgcagcactttcagcgaattcaccgtctgtgccgagatttcccttgccaaggcattcatttgtccccctcccccccccccccctaatttgccacccttttccatgttgacaaatcggctctccttgacaaagtgtgtctgctcggctgcggcgtctccaccggttacggcgccgtgttgaacaattgtcgggttgagcctggcagcaccgtcgccgtgtgggggttgggcaccgtcggattggccgtagtaatgggcgccaaaaaggcgggcgcctctaaaattgtcggcattgacttggaaaccgccaaattcgagaaaggtgttgcggtcgtctgcttggttttgtccaacagcgtcattcatttcaagcgaagcatttcggagccacagaatttgtgaatcccaaagaagtgccagcggaacagactttgcaggcatttctgatggacaaattcgacggaggtttcgactacactttcggtgggcactttcttttccattttccaatttacctctccgtcactttgcagaatgttgtggaaatgtacaaacaatggtggacattcccttggtttttgtttctttcatttttctgacttttagcgccaagccctcgaggcagcccacaaagggtggggtgtttcgtgtgttatcggagttgcgggggccggggaagagatcaaaacgcggcccttccaattggtgacgggtcgaacatggaagggcagctcattcggaggttttgtatcagtgatacgtgaaatcacttatgaaaaagtttttgtaatttttattgaataggtttcttaagggtggaaaagtcgcgaccaaattccatcgctcgtcaaggaacatttggacgggaaattggaccttgacaagtttatcacgcacaaattcgccttttccgacattaacaaagcattcgaatgcatgacaaagggcgaaaggtaatcagaaatgaccaaaaaggaaaaggcgggaagttttggagtttagcctccgttgtgtcattgaaatctgagggccgactaaactgtgaaagaaagggttcttcgatttcgtagggaataaatgatttatatcttatcacattcgacaagaaatattttttgcattttatcactgcctttttatctaattacaaattcactttaataaataagtacccgaaaatgtcacaatgtgcataaaacaaagcagggaattggatgatctaaccaaattcgaagtgaaaagtttttccaattgtatgaactgagaaaattaatttttttggttacgaaaaatgaatttttgtaccccaacatcaccaacaattgtcagtcggtttgcttctgttggtggcggagctgaagcacgaaaagtgaagtcgcaaacgggcgctccgtcgacgaaaacctcaaaagagagaggcaattaattgtcaatggaatgggagtgaaatgaatgccttaaacccttgcgcaacagcagcaattttgaggtccgaagtggcgcccaaagtgaacggaaaacggcccaattgtctctcttcgctttgccaaactccgtccgttgtgctgtttctgacgatggctccctgcaagagggcggtgtttctccaaaattaacaaatggaaaaatttgatcgatttacgcgttttcgatcgatttgatttggcagatcgactcgcatgtgaaaantgtactcggtgccacgcaaaaccattgatggcganataggaagcgttgagcagaggggtcaaaatgacaacacttcgcgagacggcgcaaagccatcgaagggaagcgaaaaaatgaacggaatttcctaaaacaaaaagggacaaagtcaatccatggaggaaaaaatactggtttcgaaatttcgatgggttcatttaaattcgaagaatcagtggacggatcggaaagcattggggaagaaggacggggacactgaaaatggaagcgaatgatgggaaaaggggagaaaaaagacggaacagaccgtcccttggtattcgatgagctcaatggcgacacatccctgcacataaatgcatttgatcctaataattggacaaaaaagggacgttttgtaagaaaaatttgcaaaaaaaagaaccgatcaatcggaattcgatggataaaatcactcaaatgtttcccatttaacgaaacctaaaaagggaagaaaagaaccaagcgttatttcctactttcgtcgaatttcactttgaaatagtcgcgtaaaatcagaattcgaacggcgaatggtcggcccttctcgagagggttggcacagcgctgctcggccccccaaacgttgtttatcagcgaattgagcacaatgtctctgtcgggtttcgaaaatctaaaaaattcgaatagggaataaaagaaggaacggcggaagaacagcgaaatggcggaggagtcaaagcgaggattgaagtgaagagcctaaaaagggaaggaatggaaaacaatcgcaaagggaattaaaaataaaagccaaacgaaggcttggtgcggcgaaaaaagcaatttgtaaagcaaaatcggaccttatcgtcgcgatggtcgccattgacgagaattccacagcacaaatcaattgcaaagcgctgatcaggaacagatgcgagaacagtgcccttgacgaggatggccttacccggaaaaacaccgtcgagaatgtccgatgcgaacggaac

SEQ ID NO: 17970 - DNA, 3912 bp, Heterodera glycines
ccattactaataaggacaaacattttttgtcatttctgtcacgttatgatcacatcaaagcctgatcatttctttcaacattgaataatgttgacaatcatgcggaaaataccttctacgatcaaccgagcatttgccatgggtttttggaaattacaaaaatttatttgtttttaattatttttagtttgtgaagtttgtttctttgaacatttattaacagggcttccttttttatgtaagaaaaatcgcgaaatatgtaaataaaatatgtataaaaaatgataaaatatgtttaaaatatgtacaaaaagcagaaattttttgggatacattttcaaacaaaaataaattctcaaaaatcctctaaatatgtaaaaaaaatgaaaatatgtacgaaaaatgcgaaatatgtataaaaatatatacatatgtaatatgtataaaaaccccgaaatatgtaaaatacgtaaataaaagtcccaacgtttgttcacaaacacacaaaaaaaattctttttcctactattcagagcatggagaagccaggaaaaagaaaaacatgtatttacataaaaaaggaagcccgatcagacaaattttagggcattttaatatttctaaaaaattgatcaatgcgcgtaaaaattggacaaagttccttaggggcatggtgatgtaatgacttttgcttgagagcacattcttcccttctgcagctgattgtgagaccgttccatcacattaatttaattactttcgttgattgatcactctgtcattcgttgtcccccggcgggcgatggcgagaagcccacacggaaaatacggcgctgaaaaattgggtgctaatcattcattcattcattgatcatgttatgctaattatcataattttgttgcaaaattttattgtaatttttgcgtattttaatcaatgccttttgtggtgatcaaaagctgatcaaattcttgcactgattctaatatttcgcgatgaggaactatgctaatcataatacctttttgctgataaaattatcgtaaaatggtcaaaaaaactgatcaaataatttcaattatcgtataattcacaaatgatcaatagtaaactcaatagtacacatttttgtgaaagccgaacaattcaggattaaaaaataacatcactttcttttgatttccattttcaattaaggaattgcgggcattttgcatttttatttaccgatttcctgttttcaaaataatctgactgatcagtttgcaatttttagcatttttcgggcatagagaaggccgccaaaatggtttcggaatattccgccagcaccaaaagtgacggaagcggtggtgcaacagcggcagcaacagaaaaccaaaatggaacggcacaacgccaacaacaacagcagcagcaacagcagcgtcgccaatcagtaaccacgctgaactgctcggcaaacggcggaggaagtgccaatggcggcaacaataaaatgccaaacggagggcggcaagtgtgccaaaatgggacaatgccaaagttgacggacaacaaccacaatggcatcatcaagaataatggcaacagaaactcacacagcagttgcggcacaacaatttcggcactttccggactgcaagataccggggcgtcgaagctgtacagcattaatcagcagcaggagatgaacatcggcagcaccgtggcgacgatgaagcataacggggagaagcagccaaacggcaatacaattcgtgtcggcagaggaccaccaaatgcagcaacaattgagacaagcggaggaaaagtaagcgaaattaaaattaattatagaaacaaaaaattttttaatgttactgggcaattcctcaaatttaaagcaaattctcattttttttgtaaactaataaatttctaagcaatgaacaatttcaaagaatttacacaaaattgtgtaaaattttttgtttcaacttcgtagtgaactgtttctgtaattaggtggttcagggagcagtaaaaatacaaacactaaactgcccaatttagtccaataattatatttaaaattatttgatcagtgaaaaatagaataacaaaacggggatcataaccaatacaccttcatgaggatttaatttttattctatttacatttttcaaaccacaattcctaaagaggggaatgaattatttgtcattggatggcaaactttgttcctgggggggggggggattatgatcgaaattttattttacaagaatacccttaggtttgaccaagattcaaagacaggaggcggtaattggtccaaaaagtgaggttgagaccaaaaccaagaaatttctcgactcgagaatctcgagcagccctaataataatgtccaatctttacccgcgccgaaacgatttgaaatgattatgtattgtgaatgaaataatagggccaatcctgggaatatttgccaacatttttcaggctactactttttattttatttgtccgttcttcatgtattttttgaattctaccaatattctaatttttttatgcggcaactattgccaaatttggtttatttttttaaatttaaaattttttaaatcactcaaaaactgcaattttttaacaaaaaaaagaaccattgtcatgacaactccgctttatgcagaagctatcgaagaagcgaaggaacagcaaaagctcacacaattacctactttttaagtttgtatttttttttaatttggcgttttgttagcactcttttaaaaataagttgccattatgctacgtggaggaaaagacaaaacgtagaaaagcgagaatgaacaattagctgtttggtctggctgatgctcgcatataaatttagctcccgactctacaatttgggagtaaacccacggaattattttttttttgaccgtgattgttattaatgttaatggaatgcaatttttaaaatttttgataacaaacaaatatgtacattttttagtttaaaaattgctaatccgcttaacatttttctattctatgttccgttccgataacttgtgataactgattaaatgatatatttgtttttggccctttccttttctaaatcgccttaatcctatgcttaatgtttgctctcatgtttaaaatcaattcattcaaaaaaaacaataaacaatcaaatcatagatcggataaagaatatgcttttcaaatctatgattgttaagtgatatattctgggcatggaatcacttgactcctattctaataattgtttcaattaggtacctcattttatttccttctaccattctctgtccgtaaaattgcgttcattcaatctcctaccattttttttgattgtttctctctttgcttccagtttttgtgccgtccaaaaatattctttgctttcatctccctcctccccatcatcccaattcgtcgtcgttcgtttgcattatttaccgagtcatcctgatcattatttactatcacctccaccaacaaccactttcgtcgcctatcaccaacaaattggtcgttatcagcaatcatccgccaccgccgctccgcttctgttgctgcggttaagacgcgtgttctgtggtcgttcttccgctcgctgctccgccccctccgcgctcgctttatcttttcgtctccgcctcgcccctcctcctccccaatatgtcctcgtcaccgccgctgctccgttccgcgagcagacgacgccatccccagcaaccaccgccgcacagtagcggctcaacgaatgctaatcggcacaacagcgacgagaacgacgacgacgaggaagaggcagcaccgttgttacaacaacgaaaacaacaagcaaagaagcatcgaaaaacgtcgcaaaatttgatgaaatgg

SEQ ID NO: 17971 - DNA, 2458 bp, Heterodera glycines
cccccccccccggggggtaaacactgcccaatgaatgcgatggaatgaccaatcccttccatttgcgtgccttctttgactttgtttctcctcttcttctaattacccaaaacttcttcattcagtggaaagtctttcgtcagcggaaaatgcctttggctacgaatttcgcgtttggacagtttcgctggtgaacggtaagcaaatttaggcaatttaacgcgagtttggcattccgtcttatttgtaggtctgcgctcggccgtcccttctgcggtttctgagccgatccgacttcactccgattggccaatttctgctgatcagattcatactgcggcaagcagacggcccccggaaagaccatcggcccctgaatatcttggtaaatcagggattagtagggattgtcgactcatttctttgagtttcgacaacatcaccttaccttacgcatttttcagaatacaacggtggcaccagtctgaccctctgttggttgccggccaaaagtgttcttcctgtccaggggtacgaagtcgaattccgtgacattatgcaggacgccacgcattggtaccgtatgactgatcagttggtgcgcgcgtgcaaaaccaccgtcggctatttgctcaacggacatcaataccaattccgaatcatcacaaaaaacgcggccggcctttctgagccgagcgatccgtcgccactgatcacaatcgacgtggaggacagcggcgtccggtcggctgagcaacaaatgtcgacattggacagacaaattggggtgccattggcagacgaaatggtcagagagtcgccgccactcccggacagagacggtgagtgccggaaggcatttccaagtgatttgcatatggacaattcccgatcagattcaccgccaccgatctatcgccaaaccgagtccagcctccagtggagagacccgacactgaaggaagtgattgactacctgaagagtcctgaccagacactggtgctggacgcttccggctatcttcagcatttgaccttcaataacgatttgatcaaggaggagacgcggaattacggtaggtcgggatacagtggtcttttccaaactcgggttacggtagagtgggacccgtctcttcctcagaatgcccttttctgactcattcttcaccatttgaggtggcattgaatgtctcgtttctctgctgcacttcccaaaccccgaaatccttcgcaatgtttgtggctgcctcaaaaatttggcttttgggcgtgccaacgacgtgaacaaacggctgatcaacacaaagggcggcgtcaaagcactgacccaactgctcagacaaacgaatgtgcctttgacggtgcaggaggaagcgactgggggtcggttttggcattttgcttttcctctgccactgtttttgggaacgaacttttaagggaatgtaaaatgaaaataattatatcattattataaattatgtgattgccttttgttaaattgcagcactttggaacatttcttcggctgacgaactgaaggaatcggtgctgaaccaagctgccgaaactgtggtcacgcacattgtgtgagcattgtaaaatagctaaacacatttttagcatgccttattttacttacataccacctaccttctgcttatagtacaatatgatttaccgtaccttgctcgtttttcagaccttaccattgttagcttaccgtaccaatttttaaattaccataccatttgctaggttaccgtccgccgcccatttgtgccaatcccatcaacatcaacaacagctgaatcctgcattgttgcactcttccggcccttcctcttccaatgctcgtaaatccacgctgactgtattccgcaacggagttggcattctccgcaacatttccgccgtcaatgattccgcgcggcgtttccttcgctccgcgcccggtttggtggacgcactgctcgacttcctcgacggatcggttctccgggctcaattggacaaccgatcggtggaaaatgtagtgtgtctgttgaggaatttgagctatcggtgagcggagtttctctgaattcaatacattttccgttcatttggacagagttcaagaagtggtcgacccgaagtacgacccgaaccggcacaaataccaaatgcatggcggagacggcacgtggggccacgccccgccccagcagaacggacagggacagcagcagggaaagaagtcgccggcagtcacatcggcacggcacgaacggagccgttcagcccctgcgggcagcccaaagacggcgtccggcaagaagggtcggctgttccgcaaggggaagaagaacacggcagaagcgatggactcagccaccggcgcaattccgccggcaaaagtcagtgccgagaacaatcgaagaaaattcgaaatttggaacttagcccgagaaat

SEQ ID NO: 17972 - DNA, 2316 bp, Heterodera glycines
  unsure (1)..(2316): unsure at all n locations
tttgaggggggagattttccgtggccaattacccgggggatttgatgggcgaatacggccttgccaatgtcttgtccgctggggttggagggggagggggagaagcgcccgtcctttcgctccccgtcccttcgccttcctcttcgtcgctttgttcttccccctcttcctcgtcctcctcttccgagttcatttcctcctcttcctcccctctccccggttcatcttcagttctattctcatcttcttttctgccactttcttccggctcccgcttgacctccttcagcggctgcgtttcatccgttttcggttcgttttgcggagaatcctcgacaatttcgaacatcgttttgtccccaaatgacagtgtgtacacgtccgagtcgtcctcctcctctatgcctcccttttcaatttcctcccctcgcgttgctttttccgtccatttgtccatgtccaaagtcaccgcctttgatgccatgccaacattcagctgactgtgcgtggcactcgtcagttcttttcccgccgcctctttggtggccgtttcctccttgttctgctcgtccacttcgatcacctcctgtttcaccgccttttccgttttgttcttccgctgttccgtttcgtcttcggtccgtctcttttttgactgttcattttcacaccgtttttcttccctcttcaatgtccaatttagcattttcggcgtgcatccgccaaccgatccgacaaaaagcaccgaagaattcggcgactgttgtgcttctaccgaacgccttttgcgcaatgctgtcaatgacttgggctcgtcatcgaccaggtcaggactcgcgatggtaaccagaacggggggactcgcgtttttagtctgagaaattccgtttttagtccggtaaaattaagtgacggacaatggattgaataactcacctcctgaaatgctcgacgaataaagaagtcctttttcgattgctgctgtcgctctaaaaacgaattggaaatttgttttgttttattgaaagttcacctctccacgcgccaatctcttcaacgaactccttcacaaatggccaaatcaaagtgacgtcctgaatcccgcgccggtcattccgcttcagttcctccaattttgcccacatttcgtcaattatgcttctgtacagcatttcatcacatttaactaaaagaaaaatcatttttatcccataaaatggcaactgttgaagctaaacctgtcttttcgtttgccttcactaaaatcgccaagacgagttcagaaaaattttcgagtgcctcgaactcaaaaaatgtttttgagtcttttcgcaatgctttgcattttgcggcaatccaaccgagaaaatcagctaaaattaaattggaaatttgtgcttacgtttgttttactcgtataccttttgaaagttcgccttgctcgctaatcttacgattccctgaaatgtcttcgtcgctgcaagacgaagtgatgctctttgacataaatttgaatgaacgcagtcagaaataatatgtaagctaaaaggtttgctttcagtcagtttcaatgttcaatggagttaatttgaagcgtaacactttcgagaatgaacaatttctcggcgttaaggcaaaattcatcatttttcgtgtatattcaacaataactttttgtctgttgcctttatcccagaatatttctatataaaaacttctgtggactttaagctctcaattgataccaagaatataagttttgagcaagaatgaaaaaagttatgacataagaaaccgaagatagtcattgattggacgcgtaaaagtcgattggacgcgtaaactgcattagagccggataggaatacggcaggaaggacaaagtttacaaaaaaaaagtatggcgtaataaagcgctattttcaaatataaaaaacgaatatctttgtgatcaccggttaatttctaatctcaagtaaagactccaatccgcttcaaaccacttaaaacacggcgatttccaattttggggctccaagtacaaatanagtttattatttatttagtaatcagaacgccaaaactttgcaaaacttaaaatttattggggattttcccttgtaaaaatggaagagccgatctcgagttagaaaatatattttcaaaaaacaaaatagatttcgatagagtgggtcaaaatactggcctatganaatttcaagaagattggtcataggaaaaatttttttcagggacaagttttttcttttctctcatttgacgcactatttcatgtctctacatataaataacaca

SEQ ID NO: 17973 - DNA, 1338 bp, Heterodera glycines
aagtttttctttttctctcatttgacgcactatttccatgtctctaacatataaaataacacatggttcatttttttgtcaataaacaatttttttaaacttttgactaattaagaaatattcttcagaattttccctccaaaatgagcataaaatggttttatttggtctattattgaaaaagttataagctaaaaaaaattcataaaatcaagggtaaaataaaatgtttaccttttattgtttgtatttgttcttttggcgttctgtttttattatttttttatttatttgctttaaaaaaatgaaatttatacacaaacacaaagaggatttgaatctgagacccactttttggtgactaactcacagaccactaagacgaaaaaatcaacttaattgtacttggaccccaaaattgaatcgccgtgtaaatcagatttttagaaattataaaaaagtgaggcactgactgattgagtacattaaaagatatttagggcgaaaattttccgaaactttttctcttcaaaatatcgaggaatttattcattaaatacaatttcaaaaataatttcataatggctggcttggcatgtgccaccggtgcttcggctgatcacctctttctgtctgatcactttccttttcctctttctgatcacttttcttttctttcgttctttcctcctccgcttttccgtcgccttttcactttttccccgcgtctccgagtcggttcagtgaggcaaagttcttcaaaatgtggttgaccaattcggcattttttctcttcgccattacaattctttctttcgctccttcttctcctcctttctcattttccattcgcttaattaattaattttaattttttccccatttttccttttccttttcttacaatttcttttggtggctgtgccgcgagaaaaattcgaaatgggcgaatgttctgcttacttttggcgtcatatccgagcaatgatcggagcattgtgtcactgatcgggtcataagcatactgtaaaaggaggggggcggcaatttgttacggtagacaaaaaagaaagatgtttactgtacttgttccatgggccaaacgaatgaatcgtccgccggtgccgacgaattggcgaattgtgcagtgaacagaaaaacatcgagaacagttaagagaatggcggaggaggagcagaaggaacggaaaattggcatctttaatcgggtcaaattctgaaagaatttcagaaaaaggcaatacagaaacagaaaagcggagagagcaaacgccgaagtgtagaggatagccacgcctcagcaaaaaaaagtgacgaa

SEQ ID NO: 17974 - DNA, 883 bp, Heterodera glycines
ttcgcacactctgtttttttatgtttgaatgcattggccttttgttttttacgccaacgatttattgacgattttttccctttcatcttccatgcatatgttctgtctggggattttcgagctctcaaaacacggatatgatgtttgaatttttccgttttttctactttccggcttcctaattggtcgagtgatttagtggccccgaaaagccatgaaagccaattcaaaattaatttaaatttaatcaaaaataaattctatacaaaaaaattttagattattatttttttaattaaaaaagctttggaatggaacttagcattttggaaaatttcagaaagttgctcaatttaggaatgttctattgtgttgtatccaaagtttattacctgagccagtgattgaatgtatttaccgtattatgaatgttgcatgcttgtttttagcgaaaatggagcgtaaatgtttaaagaaaaatttgcaaaaaatattaaaagtaattttaaaaaataaaatttaattaaaaaacgaaaaaaatttggttttgtaatattagagaaaatcgccaccaaataaatcatgtgttttttaaattactattttctggtgcaaatctgctgttatgtttcccccgcctccttcgtttcccaccgaaaaattaaaaaaaattcttttttcaaacttagaaatttccaaaaaaaaaaattctatgaaattttttaataatcctcagcagcatcgtttgtcggcatcgccggtaagaaacatccatttctccatgtgaacaaatcctaccaaaaaagcaagtattttgaaaaacaattagtgtggctaatgagccattaaagcgcattcgttttttttaattgcttcggcttgg

SEQ ID NO: 17975 - DNA, 1665 bp, Heterodera glycines
ttttatattcaccgatctgttgaaaaatgcggtggtgctaccttgttcattcattaccggttaaccaccatcaccaacacctccaccatcatcgttatcatcagcagcgtgttggcggtgctggtcagcaagttgcagtgttgccaccccgaaggagcaggaggttggcaaaaaattaaaaaaattttgaaattttcctctagggttgggtagaccgcctccggcaggcccccgtcctgacgacaaatactgtcaattaagataggaccgaatttttcctgatttttgatactgagttggcagtttaactataactcaacaaattctcaaggaaaaattttgaaaaaactcaaaattttctttttaatataatacatacttgtaaaaaattctgactgtgctgaactaatacaaaattccgttttccgacacggcgcttaaatggaacaatcggcaaaaaatcgagtttatatccctggtaccctccctccacatcccccgtcttcaccaatgaagatattcgtcaaaattatgttctgacaagggcgtagcgaggggggggggcggggggctgaatttttttaatgaaaaatggtaaaattttgaaaaagtataccattttcttaagaaaatttaatcgaatccctaaatttacccggcgacgcctatcgggatcgcgtagcccaaaattcccttaaaattttcaaaacttgacccaaaaatcgctaaggagtagcctcccccccaaagccaagggtctggctacgcgcttgcattccgagcccgtaattcaattttttcgttttcttttgaattttatttaatttttagccgccggcacaccgggcgcagccgctccgggagctggtggaaccggcacagggggagctggagcaggaacaggcattcagactcaggggagggatagggtgggacggaattgggcgccaataaaaattccaagactaactttttttttcaaatttgttgcccagtacaacaacaaaatctcatagcatgtttggtaaaaaaaaagcagttctgaagctttttgcacgaaattttgcctgaatttcggaaattttttttcgtgccaccgtaaattgttaattaattattattaaaataaaagttttccaggcatcggacacatttttatccatattttattgactttgaatatattttcaattgctccaggtggtggtgctcttgtgaacacgattgcaccgtcaacgcaaattgcgactgtgccgcccggcggtgctgcgccgggcggcacatgcggcaccgcctgcacgtccgattccatcgccacactgaccacccatgatgccatcaatgcccagctatccacagcaatccaggtcacaacaccaacaaatgcggtggcggtgaatgcgggcggctgcacaacactgacgcccagctgccccgctggacaagttgtaagtgtatgtgtgtgtgtgtgtgtgtgtgtaagcgggtgggtgattgttggtacggtacatggaatgtttccggaagtctaataaaaaaattttcccggatctgtccgaaattacgactctagcggcagagaaaggcattggaattctggagcagcagccccctattaggtactaccgcttctactattattgtatgtgtggtattgtttgtttg

SEQ ID NO: 17976 - DNA, 1356 bp, Heterodera glycines
  unsure (1)..(1356): unsure at all n locations
taaatattggtccgtttctgaacactttctgaataaaataattatgaaataattttgcaaaaaataacaaataattaaataaaaaagaaagcctttgatttttgaaaaactttttaatcccagctagctcggcgctcatttcagtgtaagttactcctttcccggggagtttccctgcaaagtttggtgcgcttctgatcagtttctgaaaaaaaaagttaagcctaaactttttggcctgtttaaaaaggaattaaaaatttttaaaaatttattcatctccctttttgatagaaaaagcatcagagtgcctaaaatagcttgtaaataaaatttggtgcgtttcagagcactttctgaaaaaataattatgaattaattttgcaaaaaataataaataattaaataaaaacgaaagactttgatttttgaaaaaatttttaaacccagctagctcggcgctcatttcagtgtaagttagtcctttaccggggagtttccctgcaaagtttggtgcgcttctgatcagtttctgaaaaaaaaagttaagcctaaactttttggcctgtttaaaaaggaattaaaaatttttaaaaatttattcatctccctttttgatagaaaaagcatcagagtgcctaaaatagcttgtaaataaaatttggtgcgtttcagagcactttctgaaaaaataattatgaattaattttgcaaaaaataataaataattaaataaaaacgaaagactttgatttttgaaaaaatttttaaacccagctagctcggcgctcatttcagtgtaagttagtcctttaccggggagtttccctgcaaagtttggtgcgcttctgatcagtttctgaaaaaaaaagttaagcctaaactttttggcctgtttaaaaaggaattaaaaatttttagattttttattcatctccctttttgatagagaaagcatctgagtgcctaaaataacttgtaaataaaatttggtgcgtttaaaatttgatcgtccataaataatttgtaattgatcaggggctcaccaaattttgcagggatacgtatcggaacactacaaatgcttactaatttttctagattttttaaacccggtgaaaattttttgcagacacccaccactttttcacttaaaaaaatttcaaaaaatttgatcgtccataaataatttgtaattgatcaggggctcaccaaattttgcagggatacgtatcggaacactacaaatgcttactaatttttctagattttttaaacccggtgaaaattttttgcagacacccaccactttttcacttaaaaaaatttcaaaaaatttgatcgtccantaaataa

SEQ ID NO: 17977 - DNA, 279 bp, Heterodera glycines
cggtgtcatctatgttactagatcggggatcgatccccgggcggccgctcgagcaggacctgcagaagctagcttgatggggatcagattgtcgtttcccgccttcagtttaaactatcaagagagggaggagagggttggagaaggaaaggaaaaaaaaaatgaaggaggagaaagggtggggggagtatgagtatgatggtcaatatggagaaaaagaaagagtaattaccaattttttttcaattcaaaaatgtagatgtccgcagcgttattata

SEQ ID NO: 17978 - DNA, 902 bp, Heterodera glycines
  unsure (1)..(902): unsure at all n locations
ttggcgctacttgcaaagagcgctcttttgaaaattttttcacctttttttgggaaaaatttttttttgtttatttacacataataattaatattaagcattaacaaaactattatggcgaatttaagtataattatggcgaagaagatcacagaaagcattaataatagtttttcctttagccctagcattaagtcgaaaaatttgttcacacatgtatgaattcgttagatttgtgctggttccatgtattcttttcgtcttttgcttcaattgagcccagagtccttcacatttattcgtgttgacgttgaattcggtgccgtccgggagcatgacaatttttgagaagccaccaccagtcgattttttgtgtctgatgagcatgtgttcgtactgtggcaagtgaagagccagtttcaggtatgccggccattcgtcgctgatgatcactgagcctggacggatccatttctttatcaatttgtacaacgtaactgttttttatttttatttttttttacctttcttacgctcgatggctccaaaaaaccacttgctgcagcctgcttttttcggctttccacgattgtgtttttgcttcacccaacatgtctaatccatctccaccacgacgttaacaccgccaattttttgttgttgaacacattgtgtgcgtcaataattgaaccaattgacgcaagttgattctgcgattcccatttctttgatgacatttttgtttctgaagtcctccgttcacatgtatattagtgtccacttctgtgcaacatttaanatactgttgtggaanaattgccatcacgaatggatttcctgaccgagctatctgagcaatccactaaaaaaactttaaaaatcttaaacttgtgtttaccaaa

SEQ ID NO: 17979 - DNA, 975 bp, Heterodera glycines
tggatgcattataattatcaaataaaaaaaatccttttacttattaaaaataaagttagaaatttataatatagtatatttatgaaattgaaaggaattaatttctcgaaaattcaaattaaataaaacagttattcatcagaaaataatttaaaataaattaataaacaatattaaattaaataaaaaaaaattaaataatttaaaataccccttgtgatttttcaaatattcgcccaaattctcgagggccaaaaaatttgaaaatattttcgaatttttaaaaaattttaaaatgtacaatgattgattatttattgtatattaatttttggacaaattctaaataaaaaaacaaataaattcttgttgaaaaattaattttattttgaataaatataaataataatatgcttcaagttatttttaataaataaaaggtttaatttattttaaaaattattaaaagttattaatgcattcaatttttaatcttttcttataaatcatttccttattgatttcattttaaccatggttctacatttctatttttacatgtaaatatagagcacacatagagctttcaaatgatgctagattggctaaagctaactgacaaataaaaaagttatagcatttcaaaatttgcggcgccgaaatggtccgcgccgaagtgaccccgacccttcacgcacccgctagttattgtagttacattgatacttttttattagagtcccagcagagtttggcattccattttcggcactttgagtttggggcctatgataatattttccgcaaaaacttttaagaaaaattaaaaaataaataatacatattttttcaaaaaataataaaacttgttaaaatgtattgcattaaatccaaaagtacaaaaagcataaataaagaatcacagtcaacttgcaaaaaactatgcatatacgctggaaatcaatatgagaaaat

SEQ ID NO: 17980 - DNA, 3364 bp, Heterodera glycines
  unsure (1)..(3364): unsure at all n locations
ctcgattggtttaattgcgccaatttttgaaagacgatcaatttcggcattgacttcatccaatgctccatgaggaacaggccgagccttgcagtagaccggcttcgcctcctttttcaggatcagatgagctctgaatttggtgcaatggccaagttcaggtccaaaagtgttggcgtaattggtttgaagtgccgaaatgagtaacttttcatcactgatttgtgatgaaattggcttcgttggcagtgaattgacgatttgcgacgaatttggaaacatcaattccttcgggattatttccaattcttcaatccaaggcatgccgagcaaatcctgatggatttcgtcgctgacgtaagcaatcaggcttgccgtccgtgatttgggcagcggtgtcgacattcattgggtgatccatcccattgatttggatgatcacttcccaccatttgttgctgcttccttcaatagccatacattttggcttaattgagacggtgtgaatgtgcgtgtccttcacggaatcagtggccactgcacgaacacgtcggatctctgtgccgcttttgcatgctttcgcaatgtgaccgttccgtccgcatttttcacacgtcgagtttttgaaccagcagtctttttgccagtgacttttgcctccgcatgaatggcagggctgatcaggcaggtccacttccttttcaattgccgttgagttattcggctggaaatgtcctttgtggctttgctgtggcttcgttttggacttcggtttgtcccggatttgctgcggtttggctcggatggcactggtgctgcagggatttgagccgagggagagcgcgctttcctttagaatttggtatttgcggcactcttctcctagctcttgcagtgaggttgaccgtccgctcgttcgactgtcttccaaacgctgaaggcatttttgcctcagatctgtgaattcgttgcaatgatcagtatcatgcatttgagctcctctttgctcagcgaaagatcggcattttcgcaggacgagttgatcaatgcgatcaaactttgtacgtcctgatgcgcgtcttgacgaatttggaagcagtcgaaacggcggagaaacaatgatcgggtttctccgaacaaatgtttcaattttgcagtcgtctcgtcccagttgaagtcgttttgcgacttaggtgcgatgctgtcgatgtaccgcttgtactccgcttcgcccaatttgccaatcaatagctgcactttggactggtcgctgagtgcgtgtccgtcctgggcgatggtctgcccatagcgcttgagccaaacgtcgtatgtatgccctaactcagggtcatactcaaatgtcgaaaggcgcgcatcgattgatgtcgccaatgccgcagaattgttgacttgtcccgccgatgccttcaaaacagcctccaaaatcagtttaagctgattggggtccatcaaatttgtttagccaaccggcttttgaagaacttgtcgagccgacccggcttttgttgaattttgtcgagccgacccggctttagaagaataagcagttcttttgcctgtttttttttgacaaaattgacgagccaacccggcttttgtcgaatttttgctgagccgacccggcttttgacgaattttgatgagccgactcggctttagacgctaacagtttcttttactgctttttgaaaaatggccgactcggctttaacaaaactcagagccaatcccggctttttgatgagttgttttgccgtctcggcttttggtccttaaaacaaaatttgatgccttttctcacccgaagatgtagagcaggtcctttgtttgtgactgcgccaaattgttgtgtatttgctacaacaataaaaatgtttggtttttaaccaaaacaaatgttgtccaataaataaataaataatttattaaacaaataaatgaggaggaggacagcaggaaataaataataataaaataaaataatgaaatggtggaatgaatgggagaatgccctgagtgggggaaagggagacatatttatggagctggtcaaggggcggggcgagagacaatgagagagggagagaaagggaaaacataatcaataatgggttgttcccttatccaacacctcccttctttggaaaaatccctctgcgcgagatcatggccggaatacatcgtacttccgcttcgacgggtccatgttcagctgctgaggtgccctcttggcgcgtgctgatcttcgcggcgcattttgattttggccaattggagatttggctttttcaatctccttaatgggggtccgatttggttggttcccagccaaaatatttccatttgcttggccaatttgcgatgtctccatttccattgggaaacgacggcgaatttggttgcatggcgatgtactgcgcgacggagcgtcggaacgtcgactcgataagtcggagagttgccaactctctcgataatcgtcgcggcaaccaatttgccttattgcctttcaaattccaaatgaaaactggctctccattttggaaagtgatgggcttggcgccgtatttgtcgttgaattgcctttccatattttggtgtttctgttgcaatttaccaaaatttttgaaattgactggcggcattttctgatgcttcattggcaccgaattggtgatttgcgaagaatttggaaacataagttccttcggaatgatttccaactcttcgatccaaggcatgccgagcaaatcctgatggatttcgtcgctgacgtacgcaatcagtttcgctgttcgtccgttgtacgaaacttggcaattgaattttcctttaattgcgaatgccttttcgttgcagtttttgattgcgatggtggtcttgcccagctttggcttgccaagcttttgccacgaatcagttgtgatcaccgtgatttgtgcagcggtgtcgacattcattggtttatccattccattgatttaccatttgttactatttccttcaatagccatacatgttggctgaagtgaaacggtgtgaatgtgcatgtcattcccagaatttgtggccacggcacgaacacgtcgggtttctgtgacgtttttgcatctttttgcgatatggccaattcgtccgcacttttcgcacgtcgaatttttgaaccagcagtctttttgccaatgatttttgcctccacatgaatagcagggctgatcaggcaggtccacttccctttcaattgccgttgaattatttggctggaaattgtggcctttctggctttgctgtggccttgatttggacttctgcttgtcccgngatttgctgcggtttggctcgg

SEQ ID NO: 17981 - DNA, 1135 bp, Heterodera glycines
agaaagaaagaaatgcaaatgccaagagagaaagaaagaaatgccaatgccaagagagaaagaaagaaatgccaatgccaagagagaaagaaagaaatgccaatgccaagagagaaagaaagaaatgccaatgccaagagagaaagaaagaaatgccaatgccaagagagaaagaaagaaatgccaagagagaaagaaagaaatgccaatgccaagagagaaagaaagaaatgcccatgccaagggatcgaaaagaggggccgattttcaaaagaccattttgactctatcaaaaccctgaaaatagcaacaaaagttaagcaataggcgcaaaaaaatccaaaaaaaatcatcgaaagatcaaaccaagcgaaatacatcaatttccagttttaatttgattcatttaggtgcattatttattttcactgctcgacttggaaagggcatatgtcaccgaaaggggccgtcttgtcggagtcgtggcactgagagacgtaagtcggcattttaataggctttttgatgataaatccttcgctattttttgtttagcttcgcatggcaattcaaagtgcacaaaatggcatttcccttcggcataatttgtacgattccgctgattcgtcatcgactggcactgaaaatagcttagacgaattcctttccattgatgtggaaaaagggatggcacagaaaaacgacgaaatgccacaaatgacactgaccgaatgtgacgaaaagcgaacggcacaaaaattggcaaatcaaacggaccgaaacttcggcgcaaatgcttttactgtccaaaattcagtgccgcttcaaataatcgaggcggaaaataaattgcaccaacgaaacagaagccaatcgacgcgaaaccgatggaaggaaggggaagaaagcgaagcggcacgagcaatggcatatttaagacgcaaatcagtggcattggaggatttgaaagcgttggaggaaacgccacttccaacgacggcagcggagaaagaaagggaaaaataaacgaaagtgaagaccaacccaaagcacttttttgtttttacttactgaataagccaaaagtgtgtaaatttaaaatccttcccggtggcgtctgtcggcaccgccggag

SEQ ID NO: 17982 - DNA, 1379 bp, Heterodera glycines
taaagaatctgagttccaattttgagtaaatcacgataatttaatatagttaaaaaaacgaaaatttatcggaaaaatcttaatttttcggtgaatatctgttagaaataaatttaaaattcgtccctatcggcacgccggcccgcaaaaaaatctattttttcttaaaaaattacccaaaattccctaaatttggttattttttcgtcaaaatctgtgcatttatgtcaaaataaatagaatcgaggcgatcaacgaataaaggaatgtggagccaacgaagtcattcataaaaaaataatttttttgtgagattttttggagctaattcaaagcaaacccccgcccccgcgggggcggaattatcgtgcccccgccaccgcccccgcgaaaagccacccacgcccacggcgctcgaaccctaattaaaactcaccaaataaattatggcgtaaaatttgtattgtcgcaaaatcaattcgaaatttgtccacagcaaataataaacgtagaaagacaaaggccatccgccgaagaaaagcggcaatttggcgacctaaagccgacaaaactccgatggcattttcctttgttttagttggttttacgctcggaaggggaataatccgttgcagcaaaaagccgaagaaaagaacggacagagaaaggccgagcagaactccgaccaaataaaaggcggcgacactccgcacaaagcgacgcgcacttagaaaaacgaaaacagcgccaaaacaaaaggcatttggcagattcaaaaagccaatgggcaaagacatcgccgccacctcaaaagacctgtttttgagattacttaaaagactaattgactcaaaggttttcattcaatcaaatgaagcaacaattcgaatatcgtttagaggagatcaataagtcacatataaccgaaaaggacaaaacaaatggaatgacccgcgaaggatgagacaattaagagaagtgaggtcatcagaacaaaagtttgagttaattctcatgcattattacgttagttcgtgggtttatttatttgtgatcgtttttactcctcaattctccattttctccgcagccgccgatttcccctcagacctccgcaatttgtaaatgtacacgttgatgccatgcgcacacaagtgctgatccaacaattctcgaacttgtcgctcttcgatctcgtcaagatcgaaccaaatacgcgacaaatgaacactgcaggtgaaacgtcgcgcgaacaaacgaattcttaacagacactgctccagggcttccaattgcgtaccaactgcaagaagaaaagtcacatatcgaaaacagcaaacattaaaggcgattgaccccgtaaaatgcaaaaatgagga

SEQ ID NO: 17983 - DNA, 2890 bp, Heterodera glycines
cttagaaaatgcattataaatatcttctaacacatatacagctttctaatgataccaagtttgtttgatttggccaataaagaaaaaagttatggcttcataaagttgtctcagacgcagttgaaccctaccgtgcctatgcaccaatttttcactgcaaaattgacacgaaaattcctatttaaacttggcaaattgcattcttcgcctcattccttcgatcattcattcagctcgtttcacttttcccttcaattcttaaatcgccatgcttttccaatattaattttttttctaataaattttataacatccttccttccttttaagcctaaatgggtgaacaacgggatgaactcgtccaacgtgccaagctggcggagcaagccgaacgctacgacgacatggcaagggcgatgaagaaggtggggggggggggggggaaagaggtcgctggcacgcctaaccaaaatgtaattttttgtttttttcagctggtcgaaatggacgccaagttggacgaagaagagcgcaatttgttgtccattgcatacagaaaggcggtcggtgctcgtcggacttcacgacgtatcattacctcaacacaacagaggccgacactgacgaagaaacagaagcaaattgccaacgagttgaagaagaaggtggagcacgacatggaacagaagggccgcgaggcgttggtcggtggcattggcaaattgcgcactttggcaatctttcaaaaaatgaaatctccgtcattttgaacagttaaaaggatggtcaaagtgttcaattagttcgtgtggcattttctccgttcaccttaaaattgtttttgctgtttcaggacttgctggacaaaatcctcatcccgaaggttgacgagcccgtggcaaaagtgacctacttgcgaatgaaagccgacctccaccgctatatggctgagatcaaagaggccgaaaatgacggtaaaaagcgatcaaaccaaaacggtttttggatttgtaaggtcatctcccactttttcagatccccagaaggcaaagcagtcgtacgaggacgcgtggaatattgcgcagcagaaaatacggccatcgcatccgattcgccttggagtggcgctcaattttgccgttttcctccacgaattcatgaaaatgccagaagagggtcgcaaattggctcaaaaggtggtggacgcagccgaacaaatcgcattttaaccaccaatgtatttacatatcccaattttttgcaggctcatgacgacggaaatgctgatctgctggcggacacgagcggcggcgattcgtacttggagtccatcggaatcctcgagaagctggacgagaacatgcggatttgggcatcaacgcaagaacgggacggatcatcagaacgaggaaacttctaggatatgccgtcccttgtcacacatgtacaaatattgtaaagtaggcatttgtatcccatgtctgtatatattgtaataaagcggaagaatccctcctcatcacgttgatatgtaatgtaaatattcgttgtttggcggtgtgataaatgagaaagaaaattggtgtcattagagaagaccaaatgtaattataaaaagttaggtcagaaaaagacaattaaaaaaaacgattctgaaaactaatttcattttgaaggtttctgtcgaaaatcaaaattttcgaatttcagatttttactctaaaaatggttaaaatgatctttttagaatttgaattttcagtgagctagtatttgttttgtcttttttaaattttaaagattaatttttttgtttttttttaacttttttttatttgaaaaaatatttttggttttggtcaaattattcttattggaattgttgatgcgaggtcgaacctacatttgtttttgctggataattggtcgtaataatctgtaaacaacggataaaacatcaaaatgcgccaaaaaagcgcgcgcttttgcaaagtttcgaacggaatcccacgtagtgagaacaaaaaattggcgcaaaaaaagcgcgcgcttcttgaatttttgctatgaaaatactagaaatatttaaattatacgttcatacgaatagaaccaaaattttatctttttgtttgcttttttcacaaaaaaaacataaataaaaaattttatttaactattttttctacctgattttaatacctattcgcgatttttcttacctaaatttcccagccctaattatagccaataattaaaaaaaaataaaatgcttgtaatcagaataatctacagaaaacttttgtctcacattgtgccaaagccagtgtgtatggttctgcgacaaatattcctacggttttggtgataccgtaggaattggcgtcaattcggccagtcggcagatgatttttacaaagaatggagaacgattgggttggcaaatacatttattccagtacttaaaatttgtcaccaaaatttttcctcaaaaaaaaattttgttttctcttctgcaaccctaaaaaaaacaaacaaccacttttccctttgttggaggtctgtctgacttttctaatttctgcttctccattcaaaatcaaaaatttggaattttaaaaaattccttaccgtttgtttatttttgcggtattatgaatgaaaaattctgtttgacatctttatatacacataaaaaaaacaaaaaaaaataaaaattttcaattttcgactttgtcgttttaagcaacaaaatttaaaaagaaaatcaacaataaaagcacgccaattcacacaaccgcggcacaatattatttaaggggctcaaatggatcaatatacgggggtgggggaatcaaccgctccctgagtacctgaatttgcaataatg

SEQ ID NO: 17984 - DNA, 2993 bp, Heterodera glycines
  unsure (1)..(2993): unsure at all n locations
aaatctcgaaattttggatcgagactcttgaatcgcaatgtattnntacaaaattaggggaggccaatggacgctgcgattggactgatgcaaatgtcgtccttggaacggacacaaaacaaagcgtcgtcttctgcaccattaatgactgacccaattacaacaaccaaccaataccacaccacctgaaatcaacaacagttaccgtaccctcaactacagtaaccncagcagcagtggttacggtaacatcagcggaggaagaaactgtcatgaagcaacaacaaccacacaccaccagcagttgcatcggcgtgccaagcagcccgggctgctagggagagcgcagcagcaaccgcgcgcgtacgggccagccttgcgggcactacgggaacggcaccggaagcggctcgaggtaagcaatggattttggtatttttgcttagcgcttgagacggggtcgaattgaaatcaagactcattaggggctaattaatggatttagtactggattttattgggacgagataaagcccccattttggcacacaaaatcaaaatagtggaatggcattttcaggctgatggtaagcaacgccgtctgttgccaaaatcggtgttcagcgggcctttgttagccccaaatgacggcgatggcaaagacggcgcccttccggaacaccatgaacgccagtttggcttgcgcaccgcggagctggccggtccggaagggaatgcaaatcggctggagggtaatttgtgtcgatgaatagaacctgattttaactgttcaagagtctcgagcctcgactcgagtaaacgcgaggatttttattccttgtaatgatactcgagaccgagagccaaaaaaaaccccgagatctttctcgagtcgagaccaagattctcgagaatgactatttaggccttaatctgaagcgaggtgatgttggtagcagtcattgttataaaacattttgttgcatccactgcatttttgacgaaatccatcaatgggtttgcacgaaaaggtgggacccatttgtgagctaatgaaaaactgggaatatattttgaaccttttttgaaaccattttatgcagcgagctttgcagcttttggaatgctgctttggacgatcatatgttttttcacaacttagacaataaggtttgccaaacaagttgccgcttcgttgtacaccattgaaatgattagcatcaaagtaaagtataattggtacaacgtaatcctccggcccatatttgaaaaggggcttgtagtgtccagttgacccaaagatgaatgctttgaatttccatatccccatgaaatttgtgccattccaccaatcaatgatccttggcacgtaaaactcagcatcgtaattttgttgtccaaatgaaacattaagagcgttcatcatttcgaatgtttcttttttgagccttcctcccactcctcgaagataatcatgaaacctttgtcggttcaaaccgcctactgcgcggaccattgttgcttgcattgcataaaacaaacaatagttgtcggaattgataatcttaattgtctccataaattaatctttttacttaaaaaccttgataagacattgttcagcttcagtgacttgagcgacagatggtgttgcaattggcacgttatgtaaattttgttgattatttgcttcatcacaattattcgctgatgaagacgacatttttgatttgacaaataaaaaagctataaaaattttgtattttgagttatatgattatggtagttaacaaataaaaaattgaaatagtattatatttaaatatattatagataaattataatacacaaatttatatctttatactcattaaatatgattttgcacttaagcattcatatttaagaagcaccccgtcgtcgctggacttacgaaaaacgccaggacggggacccggtcaaaactgcatatgcacaaattaattcaatatgtgcacatacatttttgagcttagaactgcaagagcaagaaaataaatatgtgagtttgaatctgtgctgcctatttcttgttgacaaaagccccgtccaagcataacagcacagaccgcccttacagttcgcgggtcatactgactttttgttgtttaggtccaaaccaattaattaaacatttaattgtttttgcttgttaaacaatattaaacatatttttgttctaataatgtttttttattacatttaaaaattagaatgaaaatggttgttttttgcaaaatatattcttatccaaatatgtgtcgaaccgctgaagtggagttccacttaccacggtccgaacacattcattttaaaacaaatgttataatgagagtaatgcgaagaacagctgaagtggagttccactttaccacggcccaaacacatacacaaacaatgcagtcactacagattccttaaacaaaatgcgtgataatatttttgcataaataaattagagcaaaattctaagacatacgaattaattttcgtcagaatctgatgaaagctgcgatggaaaaacataatcaggactaaaataaaaaataaatttttggtttaataataaacattacataggtgaggaaagagcagtagttgaagatcctgttttgttatcgtttcttcgaacagcggtattctgacgttgaagtgaagctgaacagcatggaacagatgggtcttcatcaacctcttcttcatccaagacaaattcttgttgaagttcggcatcctcgggatttggctcctcattttcgttggtgtcagcaatatgcaatgcatcaaggtccggttgttctagtctgtagttcttcacccattttccgttcaagtcgcagaatatcacgtacttttttttgtgacgcctgataaaagcatntataattcttatagaattttaaaaagtaaatttaccgatttgcactcataccgcatgctttttggattgatgc

SEQ ID NO: 17985 - DNA, 2787 bp, Heterodera glycines
  unsure (1)..(2787): unsure at all n locations
ttaaaagaaatttaanntcctctgtaaaatcaaattcaactttttaaatttaaatgttttgatgacggaagcaaaaaatgcatatttaagggcaattaattgaatcctcaaatgtttatttgaacgaatttggcgcatttatacaaaaaatttggaaaatgaagcaaaaaataaactgaagtggagtcaatttgtcccattgaacaaaactttttgttaagcgggaaatgaaggaaaaatccgcgcttttaattgcctttgccacccgatcgcccgccagcagaaggaaattggcaaattaaggaggtaaataggagatgcattaaccccgaaaataagtggttttgatctttccgactcgaatttttgggcgaacaattatttgaacaaaaaaaatccaaatagttggccgaaaagaatttaaaaacaaaatacgttaagccagaccaaaaatttcagacctttccattatttcaaaatttgtaaaaaaaaattgcagaaaaactgaataccgtacacattcatttaggcaacaaatacaaaatattactgtacctgctcctcctccttcttcccctgttcatcctctgctgttgttttctgctcttcctgttgcttcgttttcttcagcttcttctttttctgtgccgatgccgttgttgtcgccttgccaatctctgccgatcccttggccaatttgaatggttgttgttggccattgccattgttgttcgttttcagccgttccatttgaaaccaatctttgccatatgtccaatggtggccaaaaatttgaaaaagttttattgaaattattacgctaattaattggaactaattaatttaattcgttaggcggaccaaccctttccaactttgccatgctcatcctttggcaatttgtagaaataatcttgcatggacaaattgtgacgcacagaatttttccagccgtcgtagggacctcgaaaaaattcgaacttctcgcggagaaaattgtactaaaatgaaaaaaaaagttgaagcaaatccaacggaatttaaccaacgattactgaggataattacttcttaactatagaaatttagataaaaatggaagccacccagtgggatttaaacccacggcttcccaatttttcaccactaagccacaaaaagtcatcgatcgattcaagtcccatcagttggctcatcagaaaatcacccacaatttcggtcagtgtggcacgcttcgactcttgtgcctcaatggccatgccgatcagttggatgtatgtctcgcgcggcttttccccccgacggtcatgcaatgcccgccggcggccccctttgccggatttgccgcgtgcccgccgcttctctgacgattttggcacttcgcttttttccgctgctgccgttggcacaggttcaacaaattcgctgctttcagccactgtcgacttcccctcatcctccttgttgtactgcttcatctcctcgtcattgccatccacttcatcctcctcttcaacctcaaattgtcccgggccactgacattgtctaagatcgttgccttaattggaaatgtcactattaattttaaagccattttgagaagggataaatgtcattagagcgtttggatttatatggcattttttggacttattttggcctaaaaaatcaaataaaaacatatttaaaaattctgtttaaaaagaatttttaacaaaaatttgatggtttctttatttttgttaattgaacccaatttttgaaatattttgctcatattttggtactttttatctatttagtttttccatcttgatttttggtaatgaaatttttgtcggtattttagcgttttatccatattttgggttttttttggtgttttggtcttgtcatctttgatggaatccccgttctcacatgacaattgtcccatagcattccattggttgccattggtgcggccgtcgatgtccaccaacatccaatagtgtcggcatcatggcccccatttaataggcatggcacgtagtcaaattgcacaggcacatcgggcggttgtgttgcgtgtacaggttgaaaaccgtgcacactttggaaaaatggttgttgtcctgttgttgttgttctttgccgtccccgctcaccatcagaaatttgttgtaggttgctgaaaaagaataaatgggcattaggattaaagatgattaaaatataaaaattatttatttccaaaaaatttatggcctgaaacttcaaaattttttcaaagggttagttttgaagcttttctgcataaataaactaattgttgattaaaaagcttttaggggaatggtcctaatgttttaaggttccaaattgtccggaattgagaagcttcaaggcacggatcacaatttaataaaaatattaacggaagcccttaacaaattgggacccgtaaacacagtaaccaggaatttccagccgaacaaactcattttataataattaaattgaaaggtgggcatgttttaaacattgaaaggaattcaaatattttgagttcatcaacgcaacaaatctagaatacaacgtcctagatatggtgagcagtatgagcgcggcgactattcttgttgctctgtttgtttaattattaatataacagtgctggcttaccacccaaanncnggaaaanngtactctatttgttgctttcannnaatgatacctaaaaaatnngtacaaataggtatgtggtaggaaaanaaatttttggttcaagaaactcagggcaatga

SEQ ID NO: 17986 - DNA, 745 bp, Heterodera glycines
aaagaaaaaggcgaagaattacctgagcttcggttgctttttagcttaaaagaaaatttcgataaaagtcggtacaatgtaccacatacctccccatacaaatgggcgtttctttcctcccccgtagggccatcccaaaaaagtttttgggggactttctcccctctgttgctagaatggttggtaatggagtggtgggccgggccgtgccttatgtgttacccctcccctactaaatacttcccttccctcattttacagtaacccagacatattagcacagtcaaaggaataattttgaattaatttaaatgtgatttaataccgtatacattgttcatagatttatgtactttttataaggcgccgatgaagctaaattttgtgaatttggaaattaatttttcatcaacttctggcttatgtgctaattgacaatgctcttagtatgctgataatgattccgtcatccactgatggtgtcccaattttccgtggtccatgatggcaaaacgtacctttgtggtggacagcatggaatcatgcggctgatataaatggagaaataaaaccaaaactattttcttatttgttttttttatttaaaagagatttttttctaattctttcaaaatatttattagatcttgagaaagccttttattttactttgtgcaaataaagctattgttaagcaaatgttaaaagattgaaatttttaaaaagctttaacataataaacttg

SEQ ID NO: 17987 - DNA, 2678 bp, Heterodera glycines
ttcaaacgtcaaacagaagcccaaactcagttccagctataagacagctaaagcatgttctactgtggaatttttttttacagtttttggcaataccaaaaagcgaaattggtcatttctaatcagtgatcacaatcaaaaagcgcgcgaattgaaaagaatggcgggtaatagtttaggtggtgccgtaacatttcaaaaaaatgaaattaaaaaaaagttataaaacacatttttaggggtatttgggttaattactgaacacgaatttggcataaccttaaagccgccaatattgaactaatttcatgcaaaagaatcattttgagtataaatggtagtttttcgtttaaatccgggttagggttgtagaattggcgaaactgaatgtcagattcgcgttcagcggccccgataaacgaaattttgtatttttcgaaaaaagggggggggcaccaattaaacaattagcgaatggcgtaatgggaaaagtgatggctaaaaggagccgagcattttgctggtggccaccatttgaatggcaccggcgctcgacgacggcgtcggtgccgcgatgcgttcgacgctttgcattgccggagaatgaatgaacagcaaatagccggccgttttgccgatcagagcggcgacgatcagcgaaaagttgaaagtggagcaggggacgagcacaaaggcgaagatgaacagggaccactgcaggggcaccggatgggagagggggaatatgtttatgaaaaattcctacaaatttttccaaaatccacaaatagcaaattttgagaaaaatgggctccgcaaaaaagaggcggaaaaaacgatcgtcgcctgggggcagacggtacccccaatagaaatcctgggaccgtccctggccatggccaaaaagacttcgtggggagggacgaattgcgcgacagtcggaggaggggagggacccattttgaggggcttggagccattgagagtctttcccacggttgctctttttctcccattatggtattgttgataatgccattctgcgggtctaattgctaatcattgcgggttccatgatttggtccgacccaaactctcaaataaacacttcaaaaatggatattcggttataaaaagcaatttttctgcactttaaagcactaatttgtaagtgcatgcggcacaattcacctgaataaggtaaagaagtgcctgaagcatccgagctcgggtgaaaattcgcctgtaaattaaaatggctttcaacggggaacagttttaaagtcttatagaacggatgcattcaaacagcagggggaacagcaaattaaaaacccaaaaaatttatagaattctcagtacaaacgtcgaaaattttgtcaattttaaaaagttttgccaaatttggaaaataatttttaaattttaactaaaactttagactaacaaaaaaacaaagacatatgaaaaaatcagccgcccgaaaacgtcgcgcacctcctccctcacaatttgtctttcgcttttcttcggccgccgctccccgtccccggtgacaccgccgttcacgtacgaatgccgacgacgtcgctgaactaagcggcaaaacaattttcagcaattgaaccaaatggaattctcagcagcagaggaccaaattagccaattttaattttatggattttaacccgcaaaaaaagcataaaacaagtgtccaataaattttccaacaaatcttaataactaattaaaattgtcatcttaaaataataaaggaggaacaattgtacgagttcaactcgtactgtcccaactcgtaatgatatttaaattttttttaaatggtaattacttttgaaatttgcacacaaatcgaaaattaagagcaaacaaataattccaagaatgttgtaattggttgactttgacaaaagctacgacgattttttgtcgaaaaactctataaatcaagggcactacgaatttggctagaacgagttgagtttttacggtcaattttattaaaattaaatccgtttcggtccccaaaaattgattcaaaacttttatcagacattttaagctcacagagtttcccccatgtttctttttgacagtcaatcaaatccattaattattatccaaaaattctaaaggcgcccgtgcccattcgctttcgggcccacttttctttggcatttaccttcgtatgcgttagtgttatgccggtcgtccgcagtagcgagcagcagcaactgctcgcgctccaaaaagaagcgcaggcccaacacggccaaaaattgggtgagagatttgttagatttgaaatttggattaaaatttttaaaaatgcctcgtgcagcacagcgatcaacgccaccaccagcatggaagcggccaaccatgaaatttgagtttcaattaacaaattgccgaattttaagcgatatcccggggaggggggggggggtgtaccgagtccgctgccaatcttccaaaagccgaccacaacatattccctttcgccaaagtgcagtgtcgggccggcgtagccgccatccgctgccgccggccctcccgccgacatttggacgaaacgatggacaaaatcgtcgggcccccagccgaacagagcttacagcagagaatggggcggcgattcggcatcagcagcagaa

SEQ ID NO: 17988 - DNA, 3199 bp, Heterodera glycines
  unsure (1)..(3199): unsure at all n locations
tcggaaaatgaatatttttttgagaatgtgtggttctccaccctggaatatttaaatttgattaggtaaagtgccaaatctttatttgctctaaattcaatttgtgtgacgagggcaaaaaaaaaatcaaaaattgtggcttgtgattacggtagctcgacagaggtttataaaggaaatgttacactatggtagggtgctaattccgtttttgattattataaaactgtaccaaacaataattttaattgcctccctcacccaccagtcattgtgaaaatgccgaccagcgtgccaatgttacggccagctaacatcacctgaaaatttcaaagaaaaaagtctaaacatatattaaatgagccaatttatttatatattatttcatttaaaaagcatattactgtattgcaataccgtaacgggatttaattaactatttgcttattgttagccaaattaaacttaaaaaacaactatgtttaattattacatacgctatttactgaaatagaacccctgggggctttatttttaaatccccccccccctcaaaagggtggctttatttcaagggggttctaattcaataaatactatgaatactgtaaaaatcccctaaatctgctggccaaaagtgggccaaccaattttgtgttaaaatgataatccgctaacccacctcttcggtttggtcaccaacgcccgtcttggtggaatccgtcttacgaccagcccaaatgccgacaattaagatcaacacatagaagaaaatgattgcgataatgccaagccaatcaaccatattttaagtacagtagaatttctattttaaatccaaaaaaaaacgattttaaaacgattttcacgggttaaaatggcacaaaaatttgactattgggggccaattttcccttttcacatgatgttccccagggaacaagacaatgccaaaaatgagcagcatggggagaaggaacaacgtcaagttttacggaagtttgtcccctcggggcgggtggaggatcgatttccggggatgggaaaatccatcgtcgtcgtcattttttggtatggcacgggggtggggtgttcatccgaattttgtccgtaaaaaaacattattggatacattttttttttgtttgaaaaatgctcattgtgccgaaatttgtggcataattaatgatgccagagggaataggatggaaatctcatggagaaaggattcaaattttatattgggcgatagtgggctttaagggctttaatttagggggatggagactgtaatttagaaaatacgatattaaaagaagaaatatacgataagaaagaagaagttcaaagataaattaaattgtataatctttagaaaaaatattcgggtgtatgaaatttataagtttaatctaagcctaatcatctaattatggttttcgattcttgcgattattattgctaatcaactaattacaaaacagtcaaaaccgagagttacagcccagtctcgacactcaactaagtctcggagtatagcatttaaaaattgccagattttccctatttttaaagagctacacaaaagaattgaaccaactaaatgggaaggcagccttggctcccatgggccaaacaaaaacaccacaccgccactctngagtatgtgtgtgccaatgatgatgatggcagagaggagaggatgagttgggccaatttgtgccaaaaaacgggtgccaaatcggcgggtacgganagcagcagatgaggagggggcggggaggtgatgacggttaagcgtcagccagtcaatgacgcggctctgggataaaaaaaatgttcgtccatcagcggtgaagatatgctcacggggcggggaggaatagtgccagacggaaggatgaaatgggccccgcgggaatggcacacacccacccactctcgacaacaattgggcaccaaatgaagggggacggaacgggggcggcggcggcacaaaaagaggggggaaggagaaagaaggagttcacaaagctttcctcgagaacggggcaagtcgagaacaagcagggaatgagaggggtatttgagaactgacatttgagaaaaaaaaagtatcaaattttccatccattgatgttgggttatgacaataaactcggcattggcacttccgctttaaaaattgaaaaaagaagaaaatatgtaggtcttggataccggggaaagtaagtacgtgctggaaactttaaatgaaaaaattggctaaaaatgaaggatgtgacacataaaaaattattgaaaaattttaatagggcagagagtgattaaatggagaagacaaacttacaaaaatcgtggcattttttagaattttttttacaaaaaaaatactgtgaaaacagtttttcgaaaaccaagcggttcatttttctttttgacgaaaattatgaatatatggacggtattaaagcggtgccccggccgggcatttcttttaagcaatgggcggcgtgcccagcaagagcacggcatcggcacgggatgaagcaaaatgcaaattgggccaattctttttgctttttttcatgaacgccgacaacgcaatgcggatgttatttgttaacattgaaattttaggatttttaaaattatgacgaaatatgggggtaattgcttttaaatcggcttggcgcatatattcgattttggggatttaaaatatatttattattaattatgtttcgagttttttattatcttaattgggtcaccccaccttaatgagaaattcaaatccaattatgatggtgggaaaatgctgttgatgtatgtacttagtaagtggaaaaaaggaagtaatttgaatcccggtaatatgtctgctaatggtaatatttcaaaaattcaaaatcatgataaaataaattgaaaaaatcaattataaaaatgtatttttggtttacaatatttttttattaaggttcggttaagtattgcgtttattaactttaattttcatcattttttttatttaaataattttttcttaattaaaatttgtcaagaattggaaccaaaacaaaaaaaaccttcagggtataaaaatcctaatttcgagtttccaaaatttttgcgttttttgtcaaatttcaaaacttaaaaaactaaataattggcgtgtcaaactataaaaaaa

SEQ ID NO: 17989 - DNA, 1103 bp, Heterodera glycines
acactttctcagatcgccatttccattgggccatttttgcttgtcatctcattttccctttgttttggcccctttttccccgccgattttgtacccattggcgtcgctttttcgcatcttaatctttgcccccccagggggaaattgtttttggtacttaagtattgtttatcgtctatttggggccattccattccattccattttttgacttcacattcacctctggctcttcactcgtttcactcctcaccatctttttctttttgctgaatcattcccaatttttgaccccctcaataatccttatcgcccttcccttcctccaattttcaccatataatccatcaacatctcgcatataatcatccaccaatttttgaccattttatcatcatcatcaccaataaacattttgtcggaaaagtgttgaaagggtcagagggcaaaaaggggggaaaaattcgctcgggaacgaagcgaccaaaggggagccaaagccccgagaatcgaagcgggggacaatcccttgcagagcagcagcaaaaagggacgggagccagttcctggcggttgacgcagttcgcggccggaagtccaactcttctcccgaacctcaaccgggagcgccgacagctcttcaaaaagtcggtggtgccgttacagcaacaaccgcaaaccccatcttgtttgtcctccccaccccctccccagttcactccattgggcacggacccgacggcagcagcaaatttggcaatttgagtgaattgggcccgagggacgggagagaaactcccgcgcacagaccccctagccgtcagcgccggccgagttttctttgccacaaggttatttgacctatagaaggaggagatgtgggattaattgctatgaaatatatcgataaaattgtaaaaattacaaaaaatttctgtcagttcttccattttttatatacccatgttttccatgaaaatagcatctgagaatccccagttggtcgatttattatcacttttcaataataacccaattacagtatgttcgttttttatgggttttggttttttgagatttcatcaagttttcagcatttttta

SEQ ID NO: 17990 - DNA, 899 bp, Heterodera glycines
aagagtaaaggaaaacaaaatacggaaaacgataaaataaagacattacgggaggtttcagtcggaaaatttgaaatttccgggctctaattttgtgcctattcaccttttcgagattttttttccaataaataaccatttaaaatttttacatattttgagtttttcttacatatttcgggatttcttttatatatttatttacctattttgaccacttttttatatatttttgacagccctattaattacatactttttaggggtcggggtcactttggcgcgaccactttggcgcgggtattttggcgcgaggtttttttggcgcgagcttttttggcgcgaccactttggcgcaggtattttggcgcgaggtttttttggcgcgagcttttttggcgcgggccattttggcgcggccattttggcgccctatataaaatggcttttttggcgccagagttgaaaccgaagatcgtctggagtcgacggtgcgctgcttccgcgatgttgtttgttcgctgctcttcgttaacagtccgttcgtgttcgttccaatagtccaccggaaaacgcggacgtgttcgggttccatttggcaaaggaacgccggtgtagttgataaggaacctattttataaaccaattgttggaaaatccctgctctaaacttaccagcctaaaattgggtctagttcttgccccacgatgtcgttcagtgcagtaattgcagcagttaaatgctgaattggcacaaaagcgagcgcggtgatcattcgagccgtttctgcgaaaacggggtcgcttcggtagcgctaaacggaagacaatttcttttttgagagggatacaatattttttgagaatagaacttacattttgaagtccttcggaaatta

SEQ ID NO: 17991 - DNA, 910 bp, Heterodera glycines
gttcccctctctattcctccctctctctctctccctctcccctccttctcccctccctcctcccctccctctcccctcccaatgacttcctctttgtacataatcacgatgctccaaaagaaggtccaaattaaatgctaattataaatttttaatttgcttttagacaaaaattggagttgtaaatgtttggcaactcttcgaattgtgtcgcaaaaaaacagaattacagattattggagagaattcagcgaagaaagaacttttagcagcaaatcgaactccagctggggatatgacaatttcatttcctttgtggtgagtgcatatcaccctatggaaaggaaacatattttaattgatttgacattgaaattaataaggacaaaaagcagattttacaattatttaataatttgggtttttaatagagcatcaaaacgaaaatttaatttaacccaaattttccaaaaaatattaattaatgaaaatctactaagacctcttgtattctgagaaaccaaaacctctcatatcctcatcatccattacgcattgcaaaaaaaataaaacaaatttataaatgccccgagatgcgtccctcttcttttctgctcttcggtggctccatttgccgacgcaatgtacgcgttgtactcatctcttgcacgctctggtagagtcatctttggaaacccaccgtgaacgagaatccagttcatcacaaggcgcccgttcccatcagcatacgggtgtataaaaacctttgtttgtttgtatttttattttaaattaaaataaacttgtaagaaagaaaaaattatttatttaaacggctctattccagtttacgcgtccaatcaatgtttacgcgtccaatgagtgaccaccctcacttttttaggtcata

SEQ ID NO: 17992 - DNA, 1307 bp, Heterodera glycines
tgatcattagtaggattatccaaatctattttttacttaatataatttgtttattatattaaataatgatgcaatatttaaaaattgggattgatcattagtaggattatccaaatctattttttacttaatttaatttgtttattatattaaataatgatgcaatatttaaaaattgggattgatcattagtaggattatccaaatctattttttacttaatttaatttgtttattatattaaataatgatgcaatatttaaaaattgggattgatcattagtaggattatccaaatctattttttacttaatataatttgtttattatattaaataatgatgcaatatttaaaaattgggattgatcattagtaggattatccaaatctattttttacttaatataatttgtttattatattaaataatgatgcaatatttaaaaattgggattgatcattagtaggattatccaaatctattttttacttaatataatttgtttattatattaaataatgatgcaatatttaaaaattgggattgatcattagtaggattatccaaatctattttttacttaatagaacttattattatttattaaatgacttattttattaattttaaataaggtcgacgacaaacttacttgcatttatgaatggactccaagaaattccattcaacgaatattcaaaacaaaaatatgaagcacaccttggcattttgtattttatgagaaagaattggcaatgtaacaaaattgataaaaaaaaattgaatgaatatgaacggacagaatataaataaaaataaaccaaactgaaaatgaaaaaagaaagaagcacatttaataaaaaaatttccttaaaaatccccataattgcgaaatatatttgtcgctgctagtccattgacaaagcccgaaaatatttcatcaacaaaatatttttaaatacgaattttggcttccctgttgggattccggcgtattctctatgcaaatattcgtacgtcaaaatactttcgatatttttggcattctgtccgttcatatttttcaaattcctgcgcaattttgtcacagtgccaattttttctcataaaatacacaaggctaaggtgaacttcgtatttttgctttgaatactcactaatttgaatatttgagtgacctttcataaatgcaataagtgctttatcatcgtcccttataaatagatggtgtaaataaaatgtttcattaattaactcaaatttaaactcaccgatggatttgcatgtgaaatcccagcgttccca

SEQ ID NO: 17993 - DNA, 1496 bp, Heterodera glycines
atttattaaaaaaattaatttactccatacatttcacaaaatttgttgtcgcagctcttttgtcctatttgcttgttgtagcatctgtaattgaaagattatatttaaaggtttataccaaaattgatgaaaatttatttttggttaatttaattgaaacttacccaaaaaatgattaaatttttcgctaattattttgagataattttataaaaattcatatttttatcaatcccttactcatctgcacgtaacaacaattgttcatccggtcttaatttaatttttaaaaacaattaactaatgcattaaaatacatttaataatttacttttccatgatggacaatccgtgtccaccgccgcttcggtgagtgtctgaattaactttgaaattcaaattttgattttaatttggccaattaattttttacatcggtaatgtcccatttgattgacacgccgggcttttcccattgccatttggtggcacatgaccatatatgttccattggctcatatttttcgcccgaagaatcgccaccataattgttgttgttgttgttgttgttgttgttgttgttgttgttgttgttgttgttgtgttgttgtcatgtgggtagccaccagggggaccagcaccatatttgccatatcgtatttgccagaaatgccaagcaaaaaattgccaaaattgtcagtaccatttttcaattttcttaaattatggacaatttattttaattgctcaattcaaaatgttccctatcatctgatgagtgatagattttgaaattgaaaattatcattttatttaaattgagtataatttcaattaagaaatattttttatatataaaggttattttgagtttaaataaatgagtgaattcatttgaattgttcatttctttaaatgcatttcttttctgcaattagtttgtaaactcaataacgctaatcattcattagttaatcaaagcatcatgaatggactaaaaaacaaaattgttcaacccaaaaaatctgaaaaaataattgaaataacaagttaggtgagcaaatattctcgacgtaactctcccctatctcaaaatgagtaattaatgaattaataaactaataaaataattaggaaaaattaattaattttaagagatttaaaaaacgaattaatgaaattatttgatataaggtcaaaaaacaataatgattagccatagcctaaatgatgagctaacaaataaattaagaatttttataaaaattatgtcgaattaaattaaaggtgcaatgactaagtacgaaaagtgcaagattgggcgaaaagtacgaaaaggtgcaaaataggcgaagtacgataaaagtggaagtgatcaaattaaaagcaaaataataaattattttaaaaattaaaacaaaaattattttatattaattacatttatccgttttagtttttagcaggtaagaattattagcgaaaaacgtgaaaaa

SEQ ID NO: 17994 - DNA, 1679 bp, Heterodera glycines
  unsure (1)..(1679): unsure at all n locations
aaagcattgtactgaataattaaaagctaaaataattttcgtatatttttcacaatttatttcaaaaagccaaaaagtccggaaccaattttaaaaactaaaatagtgcacaaaaggggagccgccgcacggcggggcttaaaagcattgtacagcataattaaaaccgaaaataattttcgtatatttttcacaatttatttcaaaagacaaaaaaaatgattcaattttgaaacgaaatagtgcacaaaagggagggatggttagacgaaaagaggaatttttagaaaagagcgcaccccatctgatattcccatttttccgttccacaactggccaaaggcgactgtgctcattgacacgtagttgtccaataaggtacttggactttccacagtaaaatgtggtacaaaattttggaactgtcccgcctcacggcggggcttaaaagcattgtacagcataattaaaaccgaaaataattttcgtatatttttcacaatttatttcaaaagacaaaaaaaaatgattcaattttgaaacgaaatagtgcacaaaagggagggatggttagacgaaaagaggaatttttagaaaagagcgcaccccatctgatattcccatttttccgttccacaactggccaaaggcgactgtgctcattgacacgtagttgtccaataaggtacttggactttccacagtaaaatgtggtacaaaattttggaactgtcccgcctcacggcggggcttaaaagcattgtactgcataattaaaagctaaaataattttcgtatatttttcacaatttatttcaaaaagccaaaaagtccggaaccaattttaaaaactaaaatagtgcacaaaaggggagccgccgcacggcggggcttaaaagcattgtacagcataattaaaaccgaaaataattttcgtatatttttcacaatttatttcaaaagacaaaaaaaatgattcaattttgaaacgaaatagtgcacaaaagggagggatggttagacgaaaagaggaatttttagaaaagagcgcaccccatctgatattcccatttttccgttccacaactggccaaaggcgactgtgctcattgacacgtcgttgtccaataaggtacttggactttccacagtaaaatgtggtacaaaattttggaactgtcccgcctcacggcggggcttaaaagcattgtactgaataattaaaagctaaaataattttcgtatatttttcacaatttatttcaaaaagccaaaaagtccggaaccaattttaaaaactaaaatagtgcacaaaaggggagccgccgcacggcggggcttaaaagcattgtacagcataattaaaaccgaaaataattttcgtatatttttcacaatttatttcaaaagacaaaaaaaatgattcaattttgaaacgaaatagtgcacaaaagggagggatggttagacgaaaagaggaatttttagaaaagagcgcaccccatctgatattcccatttttccgttccacaactggccaaaggcgactgtgctcattgacacgtagttgtccaataaggtacttggactttccacagtnaaatgtggtacaaaattttggaactgtcccgccctcacgcggggcttaaaagcattgtacagcataattaaaagctaaa

SEQ ID NO: 17995 - DNA, 934 bp, Heterodera glycines
ttcactattttattacattttctaattaattatttctttatcaattcatcatttttcaaaaaaaaaaaaattggccaaaaatcaaactttgtttaaaaatttttcaaaattatttttaattgattttggagtgaacaaaaaacaaattttgcttaaaatcacgcgagcaaatttatggaaataaatagaaaaaataaaatggcgggagagcgcacgcacattagtgcgatgattggcacatggacggacaaatggggagggggcaattaattaattacactaattacccccgctaattattgagcacactaattgccccggctatcacatttgttgaacgacgattaaaaaaaaaataaatgtgcagcattgcatttttgtgatgacactgacttttttcagttttttgtgcccccgttcccaacaatttctcgccaaacagtaccccggtttggtgttacgacgacgacgcccaagacaaggaggcggagcaggacagaaacgggtggtggtggggagcacggtggcgccggcgacgacggcggtcaaattgacgacgccaatcgcagcggaacatcgattggagggcgaagaggaagaagaggaggaaaatggggacgacggaggaggaggaatagcgacaaaattgactacagccgacgacgacaacgacgacgaggaggtggaggaggacattttcagcgaaattgtcatcgacgagttctcgttgctgctgtttcggtcgatggacgactacaatgtatggggcagggggaaaatgtactatataaatgagagatgaaacggtttgggggtgatttgaaatgggacggaaacgacgaacgccaaaaaggggcgaaaaaaagggggagggggcgttaaaaaaagttgtacaaattattttttattgctttgaatgtgagtgactgacgga

SEQ ID NO: 17996 - DNA, 2218 bp, Heterodera glycines
  unsure (1)..(2218): unsure at all n locations
ttttntgggaaaatttacaaaatttttttttttttttccctcactagggggctaattaatcccttctcccccttttgtttcctgatgctcaaagagtgcgaagagaacatcaaagcggcggaggaagcgatggaaaagcaacggttgtatgaggaaaatgtgcggctgggccgagtgaagaaaaagggcaggagaagcctggtgcgttttttaaaagcggcgagggtcacggcacaaaaattgatggcacttcctcatcaaaattcggcctttttcggcaaacccaaatttacaataatttttggtttgccaatttggcataaattcggaacgcatcaagctaaaggaagcaaatccccgaaaaaatccatttgaaacactcggtgggttgcagaaaaaaacggggatttgtggcttgctgtttgtttcccgctgagaggagaattcttcttaaaaaactaggaacttgaaaaaaaagttagaaaaattatttttacggttttttcaaaattatatatgatgtactaatattactaattaaaaaaaaatttcaaaaaggaaattttgtaaaaaatttttttttaaaaatctcctttaaatttcaacaacacccgatgaatcattttgaaaattggaaaaattgaacttgcttttaatttttagaaaaaatcttttaattttttccatttataaattcttcatttgtgcaaaacaatttttgccccattttaattttgcaattttatctcgcaaaatgcaaaattgaaaatatgtcaattgggaacaccaagaaaaaggccctcctccgtatctcggtgaacagtgaacacctcaaaattcatgttttttttttcttatttacaatttatgaccggagggaaggggggggggggcgaattcattccgtaattttccatttttccatcaaaaaattgcgattttgggcctcccaaaagcgttgtaatttctttgataaaatgccactttttttcttttttggtaatgaatgccatggtgccatttttgtttttggaaatgcagcaatttatcatccgtcattttgtcattgtgtttgattttttttggcaattgggccagaaaaaagcattagttggccgtcgctccccccgtcccccaaatttcatatttttgtgtttacaattagcgtaaaattggaaggaaattattattacatattgccattagcattactgtaccgtaaaatgatgaaaaacatgtacaaaaataactaacattccttccttcccacggcattttgcgcattcgatggcatttaagtggtgaccgtttccgaaataaaattatccatttttgggtttcacttcattcacagctcatgaagaagtgagaaattgctgcgcgcttttcttcatttacataaattagcattagtaataaagaataatttttttttgttgaaaaattcctaagatttcaaaattttttctcaaaaaacttagtaattcctcatcaaattctaaaaaaatcgcaaatttttaaatttcattataaattttttaagttttttgagaaatttccgcgtttgaaaatttttaaaaaatattttcggggtggggagcctagtgcacccatattccttcttcccctcttttccgtttccaacgcattttttaaattaaatttataaaattgaaatcgcttgcttcttcaaggcggagctgaagcgggacaagaaggaggccaagaagcgggcgcgccagcagcaaaaagagcagcggaaaagggagcgggaggagcggcgccagcagcgcaaattggcggcggcgacgacggcacaaaacggcgtcggcacaggcgcggaaacagaggaaatggcggagcgcagacggcagcgcaaggagcagcgccgggaggcaaagctggcggaaagggaggagcggcgacggcacaaaatgcagcagcagcaacaaaaacaacggcacaaggaggagaagcagcagcaccaacaacaacggaccaaggtgtgggaggggacatgggcttggcaaatggcatggcattggctgggtgtgaaatccgctttccggcggcactttttggcgcgccggaatttcgctttctggcaatttttttttttggcttgtggaggcacccctggaaaggacgaagaatgctccttttacgccccatttacatatttaaatttgggatcccgnataaatgatattttgttttt

SEQ ID NO: 17997 - DNA, 2248 bp, Heterodera glycines
  unsure (1)..(2248): unsure at all n locations
aaaatatatatgaaaaaattaaaaaaaaagtaaaagtaaaaattttaaatataaaaattctaaaataaaanttaaaatggaaaaatgtatgagcatattatacaaattgttttatcattttatgaagctgcacaagttttagcatctggaacaagaagtaaaaaattatcattatatcaaattaaaactttaattaaatttataccttgatggaactcgcgcatttatttttactgtacaatttatctttttcattttaatttaaatactaatcttaaataatatatctactattcgtttttataaataaatctaaataaaataataaattgcggctgagtcgttttataaaaacgatcaaatgaaaatttgattaacatgacattgaatattaatgaattaaactatgaatgatcattattaatcaaagaaatgaaattgaaacaaataataaatttattaagataattaaacgaatattatcaaatagattaaacttaactaataatacttttattaatttcccagaaaaaataattatttaagaataaaatattcgacggatataataaaaataaataaaattagaaacacaaataaaaattacttttacctacttctgtgtatgagatattaaattaaacttataacataccttcttaaaatgaaaattaaaatataaaattaaaacagattttcggcatcaaatttgtccaatttgacagaaatctactgaatattaaaaaagacacaaagcgattgcgaaagaattgtgtcattcgggatttcgcggaagaagtacagaaaaataagaaaaatgtaaaaaaaataaagtggtagaactatataactatcaatagtttattaatgtttaatgtaagccggctttctgtaactcgcaaaaatttaaaattaatctacatttaaataaataaactcgcaaaattaatggttataataaagtgcaactcaaataactgatatttgattaaaagacaaattttgaatttataaaagtatttaaatgctatacatatttagccaattcatattctgggcgactcgtaacaatttataacgtaaataaagaagaggaagaatcatagattcaaaataatacaatacaattttaaataatactactttgatatttttaattataaaatttttgtttaaattaaacatgctttggtataataagtatgatatgaattaacatgcttttaaatcggaattagtgataaacaactaataaaatgaatatatatcaaaatggattaattaaataaatatgcatatattttaataaagcaattctatacaaatattttgtattacttagtacaaataaatttattataaaatttcaaaaaacattttttcttactaaataaagataaaaatttaccattatttataacttaattattttaactagtttttaaaatttgcaaattaaatttaacgagctcttcttcaatttgatgaaaaaatgcaaaagttgcgcacggactgtgacgaattgatcgcagacagagacaaaaagaaagacaaaaacagcaagtagctgttaatatcagtgtcttatcaaatattttatatgtataatacctacatcgtaatttctaaataaattaaatttctaaaaaaatcagatttatcaaacacttttttggaaatcctcaaaaaaaatccaaatttacgaaagtttttgtacatattttattttttctatattatttttgagaatttttgaaaacttatagtgaaaaaatttttaaaaatgttccccagaaaaatacaaaaggtaatttttaaaatactacaatatgtagaaggtgattctaagcctatttaggtcttttttatgtcattttgtgcttgattcatcctttacgaggataaccatttaaaaaattttatttacatattgggcttttttgtacatcgagattttaatttcatatttgtatatattttgaccattttttgtacttattcttggcagccctagctgtaattaggaatgggaattttatgtaataaaatttacaaaattcctaaataaatctcaaaacatgtaggaaaatgtactaaaattcaaacatatgtatatagaaaacgagtgtttttatgacctttgaaaacataaaaaaaatttcagaaaaagggagggggacaaactgaactattaccattttttgttttttgtaaggctaatagagcttgtgaagggttttcgaatgat

SEQ ID NO: 17998 - DNA, 2583 bp, Heterodera glycines
  unsure (1)..(2583): unsure at all n locations
atattgaataataaaataaaataaataattaaaatgacatttacacggaaaatgaattaactgtttaacatataaaattaattaacaaattaaacaatttcacgattgttatttaataattttagttgctctagttaatagcaattttataaatatatttaagctaaaatttatgcaataaaaagtcaacacagtattctctaactgccgtacattaagtagcgcaagttgaatttattataaattatttcagattaaaatcgcaattaaaattaaataaaatttaaaatattaattgaatttaattcgactattaaaaaataaaaatattatacaagaaaattaagagcaaaaaatttaaagtaatttaaaaagaccataaaaacaaaatgaattttttttcataatgtgaatgaatcaaaaaacaaaactcttacttatactaaagttaattcctaaaaatataaacaaatttatttatttatcgtaataaaatcagtatttactggcacaaagttgatcgaataatgcggtgtatcaacaagaaatagaaattaaaaagcaacaaagtttcgattgacaaaaaaatagtcatgacttttgtcaagccatgattaaaaaaaaccaaaaataaataaatctagtaattttataatgccattaaatgaaaatgaattatcaaactggaaagcaagagacgaagaagaactggaaaatgcctaaaaaggaaaaaaatagcaagaaaaacggcgaaggaaagtgatcacattgtggtcgaagtagctgaaaattagatatggtcaggaaacccttacaaatttaattcaatttttacgtgatcaaaaagtaattgaatgccatgattttgttcggcaacgatttttgagggattgtaaaagtttttcattgtaattgataattttcattcccttgacgccattctttccaattttgcttagagtttcaatttggtccaatgtccatttgctcgttttgaaatgtaaatccactcgacagtcaaatcggcggctgatcagtgcaatttaaggtcaagctgagcggggtgcaccaaatcgaacacgccagccaacagtcggcagagatgagctgaaaatagaaaaaacaaaatgattagaaattaaattgagatttaattagcacatcgctttttccatttttcgctcagcttctttcgggttgtccgacattgttttttgaattggttaataaaattcaaataaaaaaatgactgaaaaataattatccatcttcaaagttaacgatcgaattaaaaatttaaatttagcacgtcaaaaaggatgaatgtgttgtagtaaaaataacggtgtcctctcgaaggacccacagacaaagaaccccagcctattgctattggcggatccttccactactgcgcagtgcgttgccaattttttgggtccaaaaaatcaattaacataggaattaattgatttgatataaaattattcaatgcgcaaataaattatggatcaattaaaaaaataaatattttagggaaaacaatttgaggcaaaactccctctctcttgaaataaattgaaatttaaggacaaaacctaatgtagcgaaaaataatggaaaaataaggacaaaaaaatatatataaattttaagagaaaaaataaatctaattaaaaaatttggtagaaattacattgcttaaatatttcaattaagaatgtgaaaaaaatgaaatatttgcaaaaattgtttttgttatttttttctttttggccgcatatttttgattttaataaataatcaaactttttaaaaattgtattcaaatattacgattttaattttttttattattatttaagttcgtttaaattattttttttattttaatttgaattatttaaattatgtttagaaattcaattttcttaaaatattttcaatcttggagtcttccttccacctctgccgatgcatcttcgcggtattgtcaaaaccaacactaatttcttttttagtacactcaaaagcaaagttttaattttaaacttaatctttcatgttgtaattattaacttgaatttttattaataaattatttttaaatgataaaaaataattttctattctgattacaaataaatattcatttacatacagataaatttatttaatggtgtaaaataattttgaagtattcattttattgaataattttgatttagctcattaattttaatgtaatattattactccaattcttgtaaaaataattgatgtttaaatattttcaaatatttttttcataggaattaaatcatttttagttacctcactttttaaagtttttttaaaccatttgttaggaatattcgattttctacagtaaatttaatggttgatttaactcgtaaataacacttaatcttttaatagataattaatanattccaaaaaaatctgtctaaatttttaaaatatcttcgcgttattgtaggtctcaagtttnaagaaagtagtttatacaattttataatatttgtggtaaatagctttgacgagtaaaaatatacaattttg

SEQ ID NO: 17999 - DNA, 1149 bp, Heterodera glycines
gttttttgggtttttttattttttttaaattttttttcattaatattccaattttaacctcaaaatttttgcatttaaaaataattaataaaaattatttttaaatattttaaataaattatatacataagtatcaagagagtatgagaatattattgtacaaatttccaaaaataccttaagttgtcttaaatcttttaactaaagacatttgtcaaaaatttattaatttttttcaaattcggggtaatttcatggtgaaatttagtttagttttcgggcccaaatggccgggaccgggatttggaaaatggacttgggcgggacccccggctccgggactccgtttttccgggactcccggtcccggtggtttgcttaaaaaaccgggaccggggaccaggcaaaatcacggctgtgtcccggtcccgttcgggctctaataataacattaaaataattaaattgtttaaaatgaaattattttaaaaatattttggcaaagaactcttttaaattttctttcattaaaataatcttcctttattataacaaaataaaattaaagaaaaagctaactttcgtaatataataatccaagcaattaaagcgacgcaatcatttcatcttttcccaacattttaaattaaaaaataatggaatataaaaaatattcaaaaaatctcaagacaagaagcctaaaattaatgaaaaaaaataattaaatacgtacaattaaaaacaaatgcataaaaagagattaaaaggattattattttatgaattctttttttataatttattttctcatttttcttcataattttccaaaaaggctaaaaaaagaaagaaattatttgaaaagaatttacaattaaaagaattcatttgaaaattaatataacatttattgaaaaaacaaattaatgcaaaaattaaatgagaatttaatgataaaataataaatacatttttaacaaaatcaaaaaaaaattacaaatttaatgtccatgagaagaattgtttttgaatatacagtcatggtcatatgtttatgcagtaaaatatttttcaaagaaaaatgtcgataacttttttaaaaccaaacaaaaatttattttgtttacccaatttttgtagctatttttc

SEQ ID NO: 18000 - DNA, 2651 bp, Heterodera glycines
gtcatgtcaggggttagtgtgcacccactgctctattaataaaaaattaaacatattgaacattaaaggcataatgaataccccttaattctccgctgactgtaaaaaatggctgcatattggagcaatgttcttgaaaaatattttgtatttaaaaaaaatttaaatatacccaatgccgttgagtctgcattcgtagtatttaattgtagggaaatatacccaatgccgttgcatctgcattcgtagtatttaattgtagggaaatatacccaatgccgttgaatctgcattcgtagtatttaattgtagggaaatatacccaatgccgttgcatctgcattcgtagtatttaattgtagggaaatatacccaatgccgttgcatctgcattcgtagtatttaattgtagggaaatatacccaatgccgttgaatctgcattcggagtattgtagggaattattgttcggcagaagtcggtcgacacattgagaaggaacaaatttcaataaatttatttaattaattttattaaaattctactcaaaaccattggttgaaaaaattaaaaacgcaacaattcgtctcttctcaaacatgtttttatggtaattaatataaaatttttggtctttcaggtgtacgtccttcaattttttatttttgcgaatttagccttggggcatatttttataacctttgatggaaacgcggaatcgtttttttgtattaaactttagtctggtatttattatgtgacacaacaaacatattattttttgtttttatacgcgtcaaacgtccttgagacattgcatgttccttaaaaattgttcatcaaattatttactaagttatcctaatgcaaaggtatgagaattaatactataacaaatatgataattattttgattagaataattatggaatttatattaaaacacaattgaaacgtaataaatcgaaaaaatatgaaaaatttgtttttctggaggttctaacatatggactgtaaaaactttcgctttttctttccgtacgatatggggtaaaaaatatttcattttcatggcggaacaaatgcttagtagctgtcaatcgtattttattttataacattttcatgtcaaatcgatcattttgcacttgttttaggaatttatttatcttcgaaaaattggtatatgaataattctctgctttttgacacttaaatatatttatttctttgataccaatttctaatttttgcatagctaaggcctgtcttttatattcatgcataataagactgggtaatttttgaattttttcgagcatttctaggaatgaaaagtataaattttcgatttcagatgcacttaatgctaaaatataaaaatttttgcgtgtttaaaaagtttatttgctaaaatttctaacaaatgtgaatgtttaacaatctttcctgcaaagttccaatttcttgtaattttgttttttataaaattaatttttcttgaatcactgtagtcatctgggattatagttacttctaatgttatggcatcatccaaaggatagaaaagcgaatatagttcttcttttaataagacgtgttggaacaaagcctcgaacggcacaatccaatgctaacaaagggaggtggccaagtgtccgtgggatttccaaatgaaacttggtttgatggatagagcacccatgggttcttaagaaaaatgtttttattttctgccgaatgggcacgagtgccgagttatgacgtgccaaagtttttagtttttataattaaagaaaaggaataattatttctttgtccacaacaagttgttggtgtagaggaaatgcgttagtccaaatttttttgggttacaagttcgaatcccctatatgtaaatccatttggtaatttttatttttgctttttatgagcaattaaattatcaaattttatttcattaacaaaatatttattttaattttattccattaaaaataaaaaattgcaataaatataaagatgtaataatatatcctgtcgaattaaaaaatattttttgtctaatatttttactgaatattttaagcattaaataatataaaaaaattaaaaataaaaattttttataaaataaacttttgataattgacggtataaaagacaaaaataaaaaaacaaaatttacgtgaaggggatcccaaccctgggctagaagatgctgactagcgtactacccgctacaccactggacaccgtgtcggaatgctgatcagctgaaactacttttgaaccaagagccaatggtaaagaccaatggggaagaacatggtaaaacagaggaaaattatgacccaatcgcagagtttgctaacctaatgaaaaagggtttgtttttaaaaatttcctttataaaataaattttaaattatttttaatgaagcatatagaatgtcaaaagtctggaattttataaaagtcctagaactcatttaaagactatttattctcataaatggagtgaagtgcgaccaacagaacgcatgaaatttggcagcgaattttggcagagagacattttgacaaaattggcatcaaattttggcattcaaaaatgaattttgaagagaaatggacagaaatgaaaataa

SEQ ID NO: 18001 - DNA, 1840 bp, Heterodera glycines
  unsure (1)..(1840): unsure at all n locations
tttttgtttttttaataatagtaaaaaataaatctttcagatncatattttttcgaaaacaaaatattatgcttattatacaaattttttattatattttcaaattttgtaattaaacattgttttattttataattttttcataagaaatactttattagtttattatttttatatttcatcttttaaactcatgttgcgtgtgctgtagaatgattgaattgccaaggtgttttgttcatcaatttcttatatttataattatgtttattagtgtaataaaataaaatatttttgtaaatataaaatttttatgtaattttttacataagattttgattaattcatttttcaaatgaaaaaattatttaaataaaagcgttttattttatttttagaaaataaaaaactaaaacaaaatatgatcaacttaatagcccaaaggtaggtgtcctttattgagatcctgcagatgaactgccttatgatcaaataaatgcaaacattagccaaaacaggcttgatctattcttttttccttaaatacagattttaaaagtttttttagcacatataaatccaatccatgttaataagtcattaatataatcaatttccggatagtagaaaggtgatttggtttagattaattattaattttattatgcttttatttatctaaatataattttattttagcaagaagcatgcaaatttttatttttggaagaatatagaaatatagaaagaaaacttagattttacagaaaaatttcttgaatattgaatattattcatcaaaattcattaaaaaattgatttaaaaaatttaaaatatatgaaaaatttttaaatagacatatttttattattgtccagaccatctttaattcttctcttttataataatttttttaatttataaaattatttttccaaataaaataattaaagtattacttattttcattgatacttttaaattcgacatgacatcggaatgattgaagttcaaaaatttgattttttaaacttatttttaaaatataagaataaatcatatctttttaaatttacttactttttaatgaattctttttgtctttgctttcgaataaaaaatataattttaatcgaattattgtttaattatatattttaatttatttttttttataaatccagtgtatttttttttgtcaccgagtttagcgctattataaaaattgtttaattcataaagtaattttaaaagaatagtttaaatgtatttaattctacaattatttaacccattattttgtgtttggttttagcatcagataattaaatttttatgaattatttcgatacaaatatatttaaattttttattgtgctcctccatgaataatttctgaagatataaagttgtttaattatgataaatatttttaaatttttgtcagtttgaccacacaaaggtaaaatgatgttatacggggtgtaatattttgacttttcacctctgattttagttttaaattaagaaaagaagaatagaaaattgtgaggcggagtgaggaggggtatattaaagcgtagaaaaacttacaataaaaaattatacacgaaaaggaaggaagacaaaaaattatctataattaattacaaattacaaatattcgaatttcatgcacatgtcactgaaaaaagtaggattaattatataaaattattacttatattgaccgggacgggaatttccgggttttcaggtctcggtctcggtctcagtcccgtcccggtttttgaaaaaactgaaattcaggtcccggttttgccagtcccggtcccggcg

SEQ ID NO: 18002 - DNA, 1789 bp, Heterodera glycines
tttcgtaaacggcccccatgaatactattacccatgcgcgtttcgtaaaagggccaatggttcgaaacaaaaattcatgctatgttttttgcaattatcatgcaaatataattataatcatttaaaatttaaagcctttaaaatgcaacgagccaagattaattttatattcgatagctctaagaattctctatttacctttaaaatttcagaaaatttcattgagtttcaaaaagttctggacaaaaattcctgacttcatattttttgaaattttatcacaataacttttttatacttaagtaaaaaatttaaaaaaataatattatgatagagaacacttaaagatattgaatgataatatgaaattttaatttggttcaatttgagccaaaatataaatttttatttgttactcatttcgaacccttaaactgacaaaaactcaaattataattttttctttgtaaaatattttgttttggcgcaaaatctgttaacaaatcttataaaattctaaaaacttttcggtgttgcacatgggcaccgccggacccgacaatttttagttggacaaagcaaaaattttgaatgaattttcataaattaatagatataactacatttaaatactgtcattagcaaaataaaaaaattattattaagaaaaattgttaataaaaaacaaatagttatgtcaattaatgaaacagaataaaataaactaatggaaagtttttaacatattatgatgaaacttattaataagttgaaaattaattttttaaattgattcaatagcttttaaacagttattttttcagaaagaattataaacaatatataaaagtaagtatattttcatcaataataggcagtcaaataaatctgattgttaattacaaatgcttgaagaaacagagattaaaagataaaagagttaaaaagataataatttaatttacaaaaaataataagtttaaaataggaaaataaataattattaaacaaatataatttttaaattttattattaattacgcatttaaaacaattgaaaagcaaatattgtaatagttttaaaaaataaatgatttgaacttgatggcggataaacagtgaaaaacttccgtctgatagtcatgagattaatggaaaagcacaaaaatattctgttgttgaacaaaaatataaacaaaatcaaacgacaaattaaaaaaatcatttgataatttgtgtacagatttatctttgaaaatatataaacaaaatccaatctttattataaatttaataaaattaatttacttttatttttttaatttatgcaaaacatttaaaataatattttcaaattaaaatgaaatacaataataatctttagtcaatattataatcaaattagtaaaataattttaaaaaagaaaattaatattacataatgatttaatagcaaaaaaacattaaaatactatcggattaaaataaaagattatttgaaattcaacaatatttgtacatataagaaaaatctttactgttgaagataaacgttggtaaaataaaataatattctctaattagatattaaaatgcaatataatatttagaaataattatagataaattttttatttaaagaaaagtttattgaaaaaataatataaaaactattctttagaaaagcaagaattttatttaaatattaaggtcaaaattaggtggtgtaaaatgacaaaatttcttgtgtggggtaaaataaattagggcaaatcattatgagaagaag

SEQ ID NO: 18003 - DNA, 2577 bp, Heterodera glycines
  unsure (1)..(2577): unsure at all n locations
ttataatgntcaaatttcacttataattgctactttttgccaccgttatccaacttatctctgtccatcatcatatttttagctattcttaatgtattagccatccattcatttatggttcacgtgattcatggccactcaatgctctgtggcaggagctaatgctttctcttaaacgagattgttccgccatttcgttgatttcaaactctgcccataatccacagatctccgctcattttttgttcattttcaatatgcttgctcatttatttatattttcgacaattatttatttatttatttttcactttcttttaatttccttttattttcaatatttatttctctttcgcttgtataataaaaataaaatttagctttaaaatgccaaaaatcaaaaagaataagagttctaaaaaatccatctcggcggccccgtcacgacaaatgccactggcacaaaattatgaagacctcacatcatcgcgcgaatccgccactgtcgacaaacattcgccattaactccaacaacgaatgtcgtcgttgaccgaattttttcggatgatcctgaaatggcagatgaggatgggaagcgagtttctcgctctgaaaacgggcaacacattaaaaaaatgtctgtgaactcggccttagggccatccgtcatgattgaaaataaaagtggtggcgataatgagccaaattatgaagagagtgaggtgagaattgaggtcttggacaaaacaactaagacggccttagggtcaccagtcatgcatagcagagctaatttagctataaacaatataacaatagagaatattgaggacattaatagctttttcacaacctttgaaaattattttgctcgaacatatcagattttgggaactttgacagaccctctgttatgggctatgttacagcccaaatctctgagtgaatcagagaatagaaaatctgaaactatttcaacggatgacaaatttattgttattcaaacagggataaattggaccttggcatcacgattaactgaagtgagttcttggcctcattttttgctgatgaaaaagaaatcacaatcagatgaatattttcgattgggtgaaatcatagatataaaagaatttgtggaaaatgagtcaaattctcctaaggcttttagcaaatttgcgacagatctcaccttgcttccagaggatggttgtgggtcaattgctagaattctaaaatgcgaaagaactggtaaaataaatgccgtcgatatctgctttgatgagttagtgcaacggttctattcacaccaatttggttcagatgtcgatgtttcagaaattgttgctgatgcttatgtagaggttattaccttaggttttcgaattcaaggctttgaaaacagtctgtctactttaactggtctaaataccttaagcgatgaaccaatccaaatagtatctcaacccaatattggaaccagcatcgatttagtaatcaagattgtcagacaaattgatccagtagaggaggattaccgtcaatggtgtgagtttctcgtaaaacaacggtctacttccaaccatgatcaagactaccatcaccgaaggtagaattatattgagaacaaaagtaccctcgggtcaccagtcatgtgattttttccctaattattaaaaatttgcagcatttaaaaacttattttaaattctttcttattaaaataaaccattaaaattttgaaccaaaaataagtcaaattattttaattttcgaaatgtattcggaaactatcgccgttaaatataaagaagattaaacccaaggatttcggtccatctgtcaaggaaagtgcaattcttggaaaagcacaaaactgaggcacagctaaatattcaaatcgtagcagtattttatgttaattcgtgtctgcaaaagttctctgcttcggcagcactgtcaagattacgggccttgtggttaatatacattaaattttatgaatgttttttaattaatagaatactaaaaaatcgaccaaaaggaatctatttagacggacatttttaattactcttgtgtcttaataccaaaatttggggctcagatatcgtaaatcccctatttcacatcgttcagtaaagtcgatgataatataaaattttcaatttcgacacatacaaatctatgccatttagacaattctgaatattccactgatttgtagaagattatcagaaaaattataatctttctttttgctaatagatataaacaaaattatttttgctttataaaattttatttaattttttcaaattttgcggcagtaagaaaattctgcatcgaatatatcgaattaattttttttcccaattcgaatttcatgtgagtcaatcgtttatcatttgctttaaaaaacttctcctttttaatagctttgagtgataccaagatctcccaatttttttttactaaaactaatattctcaaaaaaatatattaaaatattaatgctttggaatggactctaacctaagtcctgcctttactatcttaaccagaaccacaaatca

SEQ ID NO: 18004 - DNA, 2842 bp, Heterodera glycines
acaattcgattttcttcaaatccatcagtttcaatattaaataatttttcatcattaaaattttcataatttaaaattccaattttttctaataattttctcagtaatttttctttttcctcaataattttcattttcttttttattatcattttggcttgatttcttataaatttattttcttcagtctttccattggcaattttaaataaatgggcgattgggttaagaaaaataaacaaattcaattggtctttcctactgttgaatattggaagtaaaattgaaaactaaaaactttgaaagtatttttaatgatttaataaaaaataaaaagcaatttttatacctttatgctttctatttcccttttacacaaagggcaaaaaccttttccttgagcagcgatccttatttaaaattaaaatttaaaaaccattcaattaattctcaccaatttatgatacaatgcttgtgaaaaatgtgctggaatagttttaatgtatacaattaattcatttttaattctttttttaatgaaacatatattaataaattcttgaaaagaaaatttaaaaattacattttgaagataggctaagaaaatcatttttggcattttctccaaaagctatttacacgctaatttgaccgaattccataagctttccatataaattgttttattaaataaaaatatgcctttgagttttcgttgtaatcttcatgaaatttgattgtctgtttttcgccatttaatgactcaaaacaaattgggcattcatcttcttcgtcatcattattacgatcacttttttgctttttgtcgttgattgaattttcaataattaaatcatcatttattttatttccctaaatttaattattcaattttatttcgctgaagaatctttacctcatcaaaataataaattttcaattgaagattcaaaattttgtgtttaaaaaagcgttgtacatcatcaatttcaattgataaattgtactcatttaactgaatttaacattaaaaaggttcaaattataaataattttacgtgttgttgcgaagttgatgcttctccgtgtaaatgatttgagcgctaaaacaaattaatacattattatttaccaacaatttaaaaaaaaaataaaaatttaaaaaaaatttgggaatatttttaatttttttttcaatataatttaccattaaatttaattttgccgattgttctctgttcgtagtcaattcatttctatgattttttgccgcagtgagtggcgcgtgtcccagcaaaattttttcatccaacattggcaaatttctttgatttttgttcacggtggcatataaaaagccataaaaattgcccgggccgccgttttttgtgtcgagaaaaattcgtcgcttccaaaagagtccgcgcgggtcaatttggcccaagttaaatgtgtaacgctttgcaaaattgggctcatacaaaacgaaaccgacagatcggaccattgatcgaatgtcgtccatttgaagttggtaatactggtcttgaattgtgaaagttttgacatatccaccgattagctaaggcattttgattaagaaatgctatttttggaaaacgccccgggaagaatatcgtcaaaaaatttaggtgcatgtgattgaattcaattcttccgggagtctaaaccgagccttgcccagacatttgcgccccagacatttgagccccggacatgcgcctcggacatttgcgcctatgtccaaaatcggatttaaatataaattctcaagagctgatacctgatcatgtattatatcttatagtcgaataaatgataatgatttaattcttctctcggggcgagctccgaccggaaacggatgttcttatgtcaaattacccaaaatgccaaatccaccttcaaacggctgatcgtccgatgggtcctcgtcaaatccacccgactggtactcattgtccaatggtttcacaaaaatgcaaaaaacaaatttgaattcgtcaaattcacgaacatttgttggcattggaatgtccaatttgtccccaatttgcacattttgttgaacatctttgctcatcaaattcatgttcaggtaaattgcactcaaattaaccgtaattttccgttgcgtgtcgtccgttgaatgattctgttcatattttatgcaaattttgagcaactcttcagaattgcatctgttgacaacaaaatatattaatagaaaaaaaataaatgaataagtgaaagaataattaaattccatttttctaaaattgaatttgttattataatataatactttttcatttgtaatgaacaattattatccatttaataaatttaaacatttgtgattattaatattataagtccttagttgtttgctatttattaaaaacatcctctgacgtatataatgtttttttcattagcgaattatgtatctttattgattcttgcatttatttattattttcagggatacaatttacgcacagtctatcatttttaaaaataaacaaaaataaaattaacataaaattttttgaattttcttactctcagaaaattatttacccatttggtatattttttaaatttgaaaaaatacattcaaattaaaaatgacctcaatgaacctaaaatcttcaacaaaaaaaaatcgagttcctatgaaaggaagttttcttaagagctttcataatttttactttatataaaattttaaattaaaggtttttggcagtggtttttgtttgtttttttattgtgtaaagtggtttcaggcaatttattttttttaatttgtctataa

SEQ ID NO: 18005 - DNA, 1756 bp, Heterodera glycines
aaataaggaaaatttttaaactaaaatttttatcaacaaaaaaattaaatttgggcgatcaatttttgtgaaattttttcaattcttataggtatatattttttggggtcatttcttaggggtgatttttttatcgcatttttgttaaggtttttttggaaaaaaacaaaacaaaattttttgatttaatttttatctgctttgcaacctcaaaatttaatttaaaaaatttttatttgcctattttttgcaattttttatgcctaaattcccattcttattgattacctctaatttatgcgctttgtccgattgacaacggaacgggccaactccgtcgagcaaaatttctgataatataacttttttgagtgttgatcaatccaacaatcttggcatcatttgaaagctgttcacaggctctgttagcttactatataaggaatatataacaggaaaaaaaagttaaaaataaaaaaaatacaaaattcagattttttggaggttttctttttttgtgagctgcttaattgcttagtactatagctgcttacaaatatcttttcaaacattaaaagctttcaaaatggtaccaaataggttttaacaataaagaaaaactctgttagctttttaaactaggctgattgtgagacgaatggaattggccattaccgtggccacaatgggtcaactccattgtatagactaatgcctaatacctacactatttcgtcgtttctctttttctttgtattttctctcactttggcgtactatctcttcatattttaatagaaaaacagtcatgtacttcgctacgtttaacttttttcctacacgttaaatcccaccaaattttgcatatccgatagagaaaaaaattctgaatcgattggtctatgaaattttagaattttctatccaattttaaagttatggggtgatgaaaattttgcatttctttttctctcattttggcatgctattttcatgtctctaacgcatgaaaaaaacacggaattcgcaaattctaacaattttaattttagggttacaaaattcggcctctgatctctctaatcattaaaattcagcgaacgaattacgcaatgtgcctaattacacgattaattaatagactaatgactagggctggcaaaaatatgcacataaaatcgcaaaatatgcgcataaaatatgcaccaaaaatcgtgaaatatgcacataaaaagtgaaaaatatgcacataaaattttccaattgagggttaatttctcaaaatttcttcaaatttgttaaacataaagtaaaatcttcaaaaatggctaaatgtggtattaaaaatcattttattgtcacttttttttgcactttttcgacactttttagttagtaattatttcgggatttttcgtcactaaaagtcgcggccctacttataaccctactaatgacactgataaaaaatggttgtgataagatgaatgaggaattaatcatcatttgctgctgctgctgttgctataaatatttttggtctctgttggtcacaaaacgacgataattaacccaattgaacgggctaattacctaattgatttttgcgctgacccacaaaatgtccaagtctcgaatttgagttttttattattcagatgggcctaaggttaggcaaggggtaatataaagggtatattcgtattcagcgaccccgaagaccctaaaaatcctaaattagactcatttgttttta

SEQ ID NO: 18006 - DNA, 1050 bp, Heterodera glycines
  unsure (1)..(1050): unsure at all n locations
caaaaaggagagagagagagagcgcggaacataacataaaaatggagcaaatgggggcggaaaataggcgaacagagcgagtgacagaaagtggggggggggggggggacaactcccagcaggaaatgaatgcagtgatcgacgaactaactgatcgttgatcgctttcgtcgtttcactgttatttgtatgtgattggacggtatgaaatcagtttgttgtttgttgtgccttggcctctattacaacaagacacgaggatgaacgctatataacttttttaaattatcaaatccgaacaatttagtatcattcgaaaactcttgatccatgtttataattaactcttcgaggcgaatcgattggcaaatctttagtgccattttttctggagagttgtctatagtatatccatacaggggattgggcaatggtaaagaacattggtcccgaaaaaaaaatttatttttttaatttgagaaaattattttaggggtaatccgaggtgctgagcacgaatctaacattgttttggctttatttcgaacccggattcgatcatttttcgaaaatataaatttttcattttttacaagtttccagggcgttgattttatttgcagaccaatatgcatgagtaaacataagggttcggacgtggatttcataacacttatattattgtacacatcaaatcaatgccttaacacatttacaaaaaaaatatatggaaatttaaattttcaaaaaatgttcgaatccgagttcagggtttgaaatagagccaaaagaattttagatccatgctcagcatcatggattacccctaaaaattattttcttaattaaaaaaaaaattattttttttgggaccaatgttctttaccattgccggggattgggttttaaaatttgagggcatgtgattttgcagcaggacaaatccccaaaaattttttaaattccaagaaataaacaaaaattttgcatacgaggataactctgtaaatgataaccccanaaaaacngagtggatgagaatatgcaaat

SEQ ID NO: 18007 - DNA, 2058 bp, Heterodera glycines
aaatgggtcaaataaaaaattgaatatgcctatcccctccattaaagtcttggctttctagtgatgtataaattgtcagggtccgggtccgggaagtgccctaaaaagggagttcaagcacttttgatcaggattttttcaaaaaaagaaagaaagggaaaaggttattaaaagggatgtgagcaagtaacttggtggtcaagtggttagtgtgcctgcctttggtcatggggtgttgtgggttcgagtcccattaatttattggattttcccgtcaaatattatatttaaattatttggttttaaatttgtttttaatatttttcctataaaaaattttatgggtttataaaagagaaagacataataacaaaaatttggagcaaagtacttttggataaaaattgattactttcctttctttcctttttttatatgtaatgcacgctcgccagtggtctttgacctcgccttttcaataagcaaaaaatgtctcctccttttctttccccagttcattatcaattgtttccatttacatcatcggttttttactgctcctacttttattcaataaatatttccaactaaattattgctgttttaatagcataaatttttagtttttcctttggtggtggtgggcgacggctcgggtcccacctattctgggtgttttcatccattattttattacattttttgaatgattttatttttttaaaattaattaagtttattaaaataatttattttaaatattaaaaataataattctttcttcctaatttagcccaaaaatctattgtttgaccttttttgtgcaaaatcatttaaaaaatggagacaaattaataagttacctaaacataaaattataaatattttatgccaaaaaagaaggaaagtgaaaaggaaattaaaaggaggcaagcgatccggtggtcaagtagttagtgtgccttcctttggtgctggcttcccatgggttagagtcccatttcttctgattattttaaagcaaatattatattgaaattattctaatttttgttttttttaatttattttttttattaattaactttatggtattttaaattaatgataatgattttttgaattaataaaataataaatatttttaattaatagaataataaagtctaaattaaatattaaaattaatcgaataaaaattaaaaataaacaaatattaataaaaatttaaataatttataaatctcaaaatgagttaattttaggattagacgaatccgggtatttgggcaaaactgggtccggatatttccgggtccagcaaagccgggtccgggtccaagtttttaaaccgggtacgggaggaacagaaagtggaagaggaacagaaagtggaagagaaagtggaagaggaacaaaagtggaagaggaaaagaaagtggaagaggaacaaaagtggaagaggaaaagaaagtagaagaggacagaacgtggaagagaaacagaacgtggaagagaaagtggaagaggaacagaaagtggaagagaagaagaggaacagaaagtggaagagaaacagaaagtggaagagaaacagaaagtggaagaggaacagaaagcggaagagaagaagaggaacagaaagtggaagagaaacagaaagtggaagagaaacagaaagtggaagagaaagtggaagaggaacagaaagtggaagagaaagtggaagaggaacagaacgtggaagagaaacagaaagtggaagagaaacagaaagtggaagagaaagtggaagaggaacgaaagtggaagaggaaaagaaagtggaagaggacagaacgtggaagaggaacagaaagcggaagagaagaagaggaacagaaagtggaagagaaacagaaagtggaagagaaacagaaagtggaagagaaagtggaagaggaacagaaagtggaagagaaagtggaagaggaacagaacgtggaaaagaaacagaaagtggaagagaaacagaaagtggaagagaaagtggaagaggaacagaaagcggaagagaaa
